United States Patent Application Publication US 2026/0092266 A1 - sequence listing, part 25

SEQ ID NO: 4109 - DNA, 6267 bp, synthetic construct
  misc_feature 1..6267: note = Synthetic
  source 1..6267: mol_type = other DNA
tagtgatgacaaaaaagacgagacgcatgtgatgcgccccgccttaagtgttttcacaacggaataatccttattgtgaattgcttcagatacagcaaaagtaaaacaaaatcacgattttacaaaactttttcatatatttatgcttgattaattttaaaccacaatagcatgaaaagcatcttgggactggattttggcactacaagcattggatgggctcttgtgaaagaatcagagaacgataatgaaaaatccgaaatcgtaaaactcggagtcaggcttgtgcctcttacgaccgatgaaaggaccgatttcgaaaaaggtaaaagtatcactacaaatgcggttcgaaccagcaagcgaagtatgcgccgtaatctgcagcgctataagcttcgccgagaagctcttgtaagtgagttgaagaaggaacattggatagatgagggatatcgtttttcagaggatggacctggttctacattcagtactctgcggctcagagctaaggctgctgaagaggagatttcgatacgggaccttgccaaagtgcttcttcaaatcaacaaaaagcgcggttacaagagctcaagaaagcttaattcagctgaagatggacaggcgatagacgggatgtctgttgctaaggttctgtatgataggggattgacgcctggagaatatgtatatcagaggatgcttgacggacagtatgttgttcccgaattttacaaatccgatttacaggcggaatacgacaagatatggaatctccaaaaatcgtattacccggagcttacggcagaactgtacgataagctgactggcaagaacaagtcccagacatgggcaatttgtcgggatgaacttggagttcagggatttaagagcagtttcactggaaaagaacgcctcaaggaggcatatttcaatcggcaacaggcctccaggcagaaggttgatctcgaagtgcttacctgcgtccttcaggatatcaatgggcagaaagcatctcttagcggactgctcagcgctataagcgatcgtagtaaggaattgtacttcaaccggatgactgttggtcagatgcttgtccggcggattcaggaagatccgaacctgagtcttcgtaacactgtgttctatcgtcaggattacatcgacgagtttgagaaaatatggtccgtgcagtcccgtttccatccggaactcactccggaactaaagaaaaagctgaaagatattataattttctatcagcgtccgttgaagagccagaaaggacttatcagtctctgtgagtttgagtcgagagaggtggacataagtgtggatggtgtcataaagaagaaaaagataggtcctcgcgtatgtccgagatcgtctccgctgtttcaagaattcaaggtgtatcagaccgtgaacaatattcttgtgaatggcgagcctttggatgacaatgaccgcgagaaacttgtcggggagcttgcgtttagggagaaaatgaaagggcaggatgtgttgaaactgctttacaaaacttccaaaggaatgagaatcaattttgaggaagtggaaggtaatcgcactatggcaactatccttaaggcctgtgaaaaaattgtcgaaggtcttggatatgataccagggacttatcgaaaattactgcatccgaaaaagtctcgagaattgaggagatttttgccaaggaagggtttaagtcggatttcctgcattttgattcgtcactttcgtcacctgaatttgagagtcaggcttcatattctttatggcatctcctgtattcgtacgagaatgataagtctgtaagtggtaatgaatctttgatagagaagataaagaaattatgctcgatggacgaggcgtcagccaaaattctgtccgggtgtacgttcctgtctgattatggaagcttgagtgccagggcgatgaggaagatccttccatatatgaaagacggcctggagtatagcgcagcctgtgcaatggccggatatcgtcattcaaagagatctctgaccaaagaggaactcgatagccgggtatatgtggatcgtttggaactgctgccgaagaacagcctgcgcaatcctgtggtggaaaagattctcaaccagatgattaatgtggtgaattccgtagtcgatacatacggcaagccggatgagataaggattgaaatggctcgtgaattgaaaaagagcgcgagcgaaagggaaaaggcgcaaaaagatatcgccgccgccagcaaggcgaatgaaagtattgtggaactgctgaaaaagggtcctttctatatttcaaatcctacgcgcagcgatattgtcagatatcggttgtataaagagctggaatccaacgcttaccatactctgtatagcaatatatatacccgccgaacggctcttttcaaaggactttgatattgaacatattattcctcaagcccttctttttgatgattcgtttgccaacaagaccattgaatcccgtcagtgcaatattgagaaaagcaatagaacagctatggattatgtaaaatccaagtatgattcatctggggtgcaagcctatatagacagggtgaaagggttgacgggtgtgtccaaaaccaagattacgcggcttcttatggagtccaaggacattcctgaagattttatcaacagggaacttcgcgacagtcagtatattgccagaaaggcccgggaaattcttgagtccatggttaagttcgtggtcccgacaaccggctctgtgactgcaagacttcgtgaagactggcagttggtgaatgtgatgcgggaattgaactgggataaatatgagaagctcggtcttacgtcgttcagagaggatcgtgacggtcgggcgattccggtaattgaggattggaccaagagaaatgatcatagacaccatgcaatggatgcccttacgattgcttttacccgtcggcagtttatacagtatctgaatcaccttaacgccaaaatagataccgtagacaagacagatatcgacctgcgggactataatcttgaagatatcagtttcgatggactcagagatggggataaattcggaatagtgaaggcgttgcagaagaagtatctgtataaggacgacaaacagaagtatcgttttgtcccgccgatgccgctggatgagttccggatagaggccaagcggcagatagaagatgtattggtgtccttcaaggctaagaataaagtttgtaccaagaatgtcaatactaccaaggttcgaggtggtcagcaaaggaaaattcagttaaccccaaggggaccgttgcataaagatacaatatatggaaaacgtcttcaatatgtcacaaaggaggaaaaggtaggtgggttttttgatgaagcgaagatagcctccgtatgcaagaagtcttatagagaggctcttatgcgtaggcttatggagtgcggcggtgatccaaagaaggcgtttaccgggaaaaactctcttgagaagaaccccgtatgggtggatgagttccactccggggaagttcctcttagagtacgcacggtgagtatggcttctgtctatactgtccgcaagtctgtggaccaaagtttgaatattgaaaaggttctggataagcatatcagggaaatccttctctcgcgtcttgaagaatatggcggaaatgcgtccaaggctttctctaatcttgatgagaatccgatatggctgaataaggagaatgggattgctgtcaagcgggtgacaattgacgaaagcgtgaatccgattcctttaaggagcaagcgggataaggacggacagataatttatggggagggacagaatccgcaggagtctgattttgtggctactggcgtaaaccatcatgctgccatatatcgcacaccttccggaaagctccagggtgtggtggtatcattctatgaagcagtcagccgaaagaacctcggcctggaagtgattgaccggaatttcaaaaaagacgaggggtgggaatttctctttacgcttaagcagaacgagtattttgtgttccctaaccctgccacagggttcagcccggaagattatgatctgacggaccccgccaacaatgcggttataagtccgaatttgtatagggtgcagaaacttacttctggggattattatttcagacatcatttggaaacaactgtagaagacaatgaaaaattaagggatatagcctggaagcgtatcagacgaccttccgattttataggagcggtcaaggtccgcatagacaatttgggacgtatcttggcagttggtgaatatgattaaacgtacattatacttcggcaatccggcatatttgtcgctaaaactccggcaattggtggtaagcaagcctggggcggacgactccaaggcggaagttgtcaagacaataccgattgaggacattgcgacgattgtcttggattgtaagcagataaccatcacgcaggcccttcttgaggagcttttggaagccaattgttctgtgataacatgcgattcgacacacatgccgacagggttgatgctgccgctgagcggacatacgcagcaaagcgagcggtttcgggcccagattgatgcatctcttcctcttagaaagcagatttggcagcagaccgtgcagtcgaaaatagccaatcaggctgcggttttggagtttgccacggggcagaagcatcctaatatgctccagtgggcgagcagtgtgcgcagtggtgaccctgacaatctggaagcaagggctgcggcgtattattggaaaactcttttctgtggaagtgtggacgggtttatccgtggacgacatgaggacacgccgaatgatttgttgaattatggatacgccctggtcagagctaccgttgcgcgagctctggtgagcagcggactgttgcctacactgggagtgcatcaccataacaagtataatgcttattgtcttgctgacgatattatggaaccataccgcccgttcgttgacaaattggtttatcagattgtcaaggagaatgatctgtggattcttgacatagggatgaaaacgagattgctgtcaataccgatgatggatgtgcagatcaatggggtgacgagtcctctgatgattgccgcaactacgactacggcttctcttgccaagtgcttcaacggagagtcccggcaggttttgtatccggtaatgtcttgcaaatgaaagagccggagcgcataagtcaatacagagtcatgtgggtaatggtattctttgatcttcctaccaacactaaaaaagaggtcaaagccgctgctgaattccgtaaacaacttttgagtgacgggtttataatgttccagttctctgtatatctccgacattgcgcaagtgccgagaatgccgatgtgcatatccgcagggcaaagtcgtttcttcctcctaaaggaaaggtgggcatcctgagaataacggataagcaattcggagccatggaacttttcaactcccaaaaatccgagtccttactggaggaaggggtgcagttggaattgttttagaattatacataaaggttatatgacatcatgcggagtttgtgttcaattcgcaggatatcagctttaccgagggaaaagacggggcgatttacgcattctgtatgaatgttccggagtctggcgggacggtctttattcacaatcccggggaatcctctggcttgtctgttaagagggtttcgttgcttggatatccgggagatttgctgtggagtcaggctgcatcgtctctgagtattacctatccgtcccaatcggcagatctgtcaacatctgtagtatttcggatcgagatgaagtaagtatatgtggcacggcatctgtatgggtgtgtgactttgtgcaaaagtgcacctaaaagtaaaaaagttcggattttctccgaacttttttactttggaataatctccataagtgcttggttatctttgtcttgcgcaaactctgttgtgttcgaagaacaaagataaaaaatctgaaagcaattcacaacaatctttactgaggcagcgaattatcagacgttgtgttcgaagaacaaagataaaaaatctgaaagcaattcacaaccatcatacataacaataataatatctcgccgttatataataaaaacaatagtaatgaaaaagatatcaatgcgtaagttttgattccttttgtac

SEQ ID NO: 4110 - DNA, 5949 bp, synthetic construct
  source 1..5949: mol_type = other DNA
  misc_feature 1..5949: note = Synthetic
actgttgtcggaaagaaaaggaaacgaagaaaactgaaggagaattattctgctctttttgaggaacttaacgatgcggaacaattagaactgaatggtagccgtcgtttatgtcaagaagaaaaagaattgcttgcccaagaactttttattcgtgataagatgacgaagtctgaagttttaaaattgttgtttgataatccacaagaattggatttaaattttaaaacgattgatggtaataaaacgggatatgcgttgtttcaggcctacagtaaaatgattgagatgtctgggcatgaaccagttgacttcaagaaaccggttgagaaggttgttgagtatataaaagcagtctttgatcttcttaattggaatacggacattctaggtttcaactcgaatgaagagttagacaatcagtcttattacaaactctggcatttattgtattcttttgagggggacaatacaccaacaggaaacggtcgtttgattcaaaagatgacagaactatatggctttgaaaaagaatatgctactatactagcaaatgtttcttttcaagatgattatggcagtctgagcgcgaaggctattcataagattctacctcatttgaaagaaggtaatcggtatgatgtggcttgtgtatatgccggatacaggcattcagaatcgtcattaaccagggaagagatagcaaataaggtgttgaaagacagacttatgcttcttcccaagaatagtttgcacaatcctgtggtggaaaagattctgaatcagatggtaaacgttattaatgtcattatagacatttacggtaaaccggatgaaatacgtgtagaacttgctcgtgagttgaagaagaatgccaaagagcgtgaagaactgactaaatctattgcacaaactaccaaagcgcatgaggaatataagacacttttacagactgagtttggtttaaccaatgtaagccgtactgatattttgcgttacaaactttacaaggagttagagtcgtgtgggtataaaacactttattctaatacgtatatttcacgaacatatcattccgcaagcacggcttttcgatgatagtttttctaataaaacacttgaagctcgtagtgtaaatattgaaaaaggaaataaaacagcgtatgattttgtgaaagaaaaatttggtgaaagcggagctgacaatagtttagaacactatttaaataatatcgaagacttgtttaagtcggggaaaatatcgaaaacaaaatacaataaactgaaaatggctgagcaggatattcctgacggctttattgaacgtgacctacgtaatacgcagtatattgccaaaaaggctttgtccatgttgaatgaaatttcgcatcgtgtggttgctacaagtggatcagtaactgacaagttgcgtgaagattggcaattgattgatgtgatgaaagaattgaactgggaaaagtataaggcattaggtctggttgaatattttgaagatagagatggaaggcaaataggtagaatcaaggattggacgaaacggaatgatcatcgtcatcatgcgatggatgcgttgacggtagcatttacaaaggatgtattcattcagtattttaataacaaaaatgccagtctggatcctaatgcaaatgagcatgcaataaagaacaaatattttcaaaatggcagagcgattgcgcccatgccattgagagagtttcgcgcagaagctaaaaagcatctggaaaatactttgatttcgattaaagcgaagaacaaggtcattacgggtaatattaacaagacaaggaaaaagggtggcgtgaacaagaatatgcaacagacaccacgtgggcagttgcatttagaaacaatctatggtagtggcaagcaatatctgacaaaagaagaaaaggttaatgcttcgtttgatatgagaaaaattggaactgtaagcaagttagcttatagggatgcattgttgaaacgtttgtatgaaaatgataatgatccgaagaaggcgtttgccggtaagaattcgctggataaacagcccatatggttagataaggaacaaatgaggaaagtgcctgaaaaagtgaaaattgtaacacttgaagcgatttatactatacgtaaggaaatctctcctgatttaaaagttgataaggtaatagatgtaggtgtccgtaaaatactaattgacagattaaacgagtatggcaatgatgcaaaaaaagcattctccaatcttgatgaaaatcctatttggctgaataaagagaaaggtatatctattaagcgagttacaatttcaggaatcagtaatgcgcagtcattacatgtgaaaaaggataaggacggtaaacctatattggatgagaatggtagaaatattcctgtggattttgttaatacaggcaataatcatcatgtggcagtttattatagaccagttatagataagaggggacaattagtggttgacgaagctggcaatcccaagtatgaactggaggaagttgtggttagtttctttgaagcagtgacaagggcaaatcttggtcaaccgattattgacaaggattataaaacgactgaaggctggcaattccttttcagtatgaaacaaaacgagtattttgtttttccaaatgaaaagactggatttaatccgaaagagatcgatttacttgatgtggagaattatgggttgataagtcctaatttgtttagggtacagaaattctctcttaagaattatgtttttagacaccatttagaaacaacaattaaggatacaagttctattttgagaggtattacatggatagattttcgtagctcaaaaggcctggacactattgttaaagtccgtgttaatcacatcggccagatagtgtcggtaggagaatattaatataatgaatgacttatggacaaaaacaataataatcctccaattccatctgatttctttctctataaaaacagcaatggagaggtgaaagtcgaaatctatatttttaatgagacggtttggctaccgcaagacaagatcgcacaattgtttggagtggacagaagcatagtaactgaacatctgaagaatgtatataaaagcggggaattatcaaaaggggtaacttgtgcaatttttgcacaagttcaaatcgaaggcacaaggcaggtcacaaggcagattgagttttataatctcgacgctatcttatccgtaggctaccgtgtcaacagtattcaagccacacaatttggaatttgggcgaacagtgtgctgaaagaatatctgattaagggggggccatgaacgatgagcgattgaagaatccgcaaatgttgtttggtaaggattatttcgaagaacagttagcccgtattcgtgacattcgtggcaacgaacaacgcttctatcagaaaataaccgatatttattcgtaatgcagtgccgactatgaagcgggtagcgatgttactaagaagttttttgcaattgttcagaataagttgcattgggcaatttccaggcaaacggcggttgagattattgtttctcgtgtggacgctgataagcctaatatggcattaactacttggaagaatgcacccaacggaatgatacgcaatccggatgtttctattgcaaagaactatctcaatgaaatggaaatggatgatttgaaccgcattgtttcgatgtatttggattatgcggagcgtcaagcaaaaaaaaggacaagtgatgtacacgagagattgggtgaaaaagttggacgtatttttgcagttcaacgaataagccgtcctacaacatagcggacgggtgagctatgagattgccaaggcattagcggaacaggaatatgacaaattccatgttagacaacttcatagctacaaattgaactttgacaaacttttaaaaggaatgagtcatgattaagaagacactttatttcggaaatccggtttatctatcgttacgaaatgcgcagctagttattaaacttcctgatgtagaaaaagcaacggttttgccggaaacgttgaaaaagcaggcggaagtaacgaaacctatagaggatattggaatcgtcgtgttggataacaagcagataactatcacttccggtgtgctggaggctttgcttgagaacaactgttccgtaatcacttgtgatagcaggagtatgccagtcggattaatgcttcctctttatggaaatactacgcagaatgagcgttttcgtaaacaattggatacttcgcttcctttgaagaaacaactctggcaacaaactattcaagcgaaaatcaacaatcaggcatctgtgcttaaagattgtatggacgaggaagtaaagtgtatgcgtatttgggctaccaatgtgcgtagtggcgatcctgacaatttggaagcacgcgctgctgcatattattggaagtctttattctcagatgttgatagtttcactcgggaacgtgagggaattcctcccaacaacttgttaaactatggatatgccattcttcgtgcggtggtggcgcgtgggttggtaataagcgggttgcttcctacgttgggtatccatcatcacaatcgctacaacgcttattgtttggcggacgatataatggaaccttatcgtccttatgtggatgagttagtgtttagtttgatacaagagtatggaaaaaatgcggagttgacaaaagagatgaaaactcgattactgactgttccgacattagaagtgataattggaggtaagcgcagtccgttgatggttgcggtagggcaaactactgcttcactttataaatgtttcaatggagagcttcggagaatttcctatcccgaacgatagattatggatcgttttaatgaatatcgtattatgtgggtgcttgttctttttgatttgccaactgagactaagaaagaaaaaaaggcttatgccgattttagaaagaatctacaaaaggatggttttacgatgtttcagttttccatttatgtgcgtcattgtgccagtagtgagaatgcagcagtacatataaaaagagttaaatcatttctcccagaatttgggcatgtcggaatcatgtgtattacagataaacaatttggagatatagagcttttttatggaaagaaagtgcaagatgtcaatacgccgggacagcaattggagttgttctagaacacaaaatctcgcattaatgcgagattttgtgttggaaacagtcttctttttcttttttctaatttactcttaacttattgaaggacaatatgttatgtaaaatctgctgtttccaatggttcaaagatactaatttgaaagcaaatcacaacaaccgaacctacactccgtgcaatgaacagctgtttccaatggttcaaagatactaatttgaaagcaaatcacaacatgcaagttaattggcaaataacattgctgctgtttccaatggttcaaagatactaatttgaaagcaaatcacaacccgaccgataaagtgtatttgggtggctctgctgtttccaatggttcaaagatactaatttgaaagcaaatcacaactacgtgtcacccggtaagaactcgtttaggctgtttccaatggttcaaagatactaatttgaaagcaaatcacaacccgcaggatgaagttaaattgtatcacgttgctgtttccaatggttcaaagatactaatttgaaagcaaatcacaaccattgaatgatagatcatcgaaatacatatgctgtttccaatggttcaaagatactaatttgaaagcaaatcacaaccagattggcaagacgatggcagatacttatgctgtttccaatggttcaaagatactaatttgaaagcaaatcacaacttaaccaccaagtttccc

SEQ ID NO: 4111 - DNA, 5842 bp, synthetic construct
  source 1..5842: mol_type = other DNA
  misc_feature 1..5842: note = Synthetic
gtgaaaatggtgtcggatgaaaccgccgaaaaatgtggttttatccgacagattgacatttcccaggactaaattactgaaaaactcaggaaaagaaactttaggaaaagaacaggcgacccgagggccgccttaaatgtttgcacaacggaataatccttattgtgaattgctataaacttttacaaagttatagaaaaggtttagatatacaatacttttttactaattttacacaatgaactgataactaataccaatatgaaaaaaatactaggcttggatttgggagtaagctccatcggatgggctttggttaatgaggctgaaaaaccagaagagtcgtcatccatcattaaattaggagtccgcgttaatcctttgacaactgacgaacagacaaaattcaaagaaggtaagagcataactacaaatgctaatagaacacgtaatcgcggaatgcgtcgtaatttgcaacgatataaattacgccgcgagaatcttatagaggtcttgaaggaacagggcttcattgatgacgataccatattggcagagaatggtaattttaccacatttgaaactcttcggttgcgcgctaaggcggcagatgagcagataagtctggaggaattggccagagtcttattgaatatcaataaaaagagggggtataaaagtaatcgaaagtgcaagtctgccgaagaggagggacaggtcgtagatagtatcgatgtggctagagagttgtatgagaacaacttgactcctggccaatatgtctatcttaatatatttggtctcgggaaaaagagtgtaccttcgttttatagatccgatttggaaactgagttcgagaggatttggcagaaacagagcggatactatccggagttgacgcccgaattgaaggaaagtcttacaggaaaaaataaaagccaaacttgggctattatagcaaagccttttggccttgtgggaaagaaaagagatgtaaaaggtattggactgaaggaagataattatagactgaggaacgatgccttgattggaagacttgacccggaagacctggctatcgcacttcaggaagttaatgatgacataagaaacgcaggtggctacctcggaagcataagcgaccgaagcaaatgccttgtgtttaataatatgactgtcggacagtatatgatgtccgaattggaaaagaatcctaactatagtttgaagaaccaagtgttctacaggtcagattatatggacgaattcgaccgaatctggagagtgcaatctgcgtatcatccggaattgactgacgagttgaaacatacgataagggatatagtcattttctatcaacggccgctgcgaagtcaaaagggattggtcagtttctgtgaatttgagactcagcgtaaagtctgcccgaaatccactcctatctatcaagagtttcgtacttggcaggaactaaataacctgactatcggtgggcttcctttgagtcttgacgagaaaaaggttttggcaaaggaactacaggtgcgagagtcattgagtggctccgaaatctattctcttctaaataagcctaaaaaccaaagattgaatttcaagcagatcgacggaaataggacacaatccgcattgtataagtcttatttaaacctgaaagattccagtcggaatcaagcggaaatggggaatatgacgtcaaaaagatgtcttatgacaaaacgcaaaaaatcgtatccgacgttttttcggcactgggagcaaaagtagactttttagttgcgaattctttagaggattctaaattcttcgcactgtggcatttgctttattcctacgagggtgataattcaaaatctggccaagagagtcttgtggttaagataagtgacctcacggggctgccatcggaatattcaaagattattgctggaataagcttcgagcctgactatggtaatttgagtgccaaggctattaagaagatacttccatttatgaaggatggggatgaatacagtgtcgcatgtgaaaaagcaggctatagacattccggaaagtcattgacgaaagaggagattgaatcgaaggtatgcaaagatcacttggagagcctgcctaagaacagcttgaggaatccagttgtagagaagattctaaatcaaatggttaatgtagttaatgccattatcgatgagtatggtaagccagatgagattagaattgaattggcccgtgaactaaaaaagagcgcgagcgaaagagatgaaatgactaaggccaataatgctgcggataagcaaaatggagagataaaagcggaactgaaaagagacttcggtataagctctcctacgcgaaacgacattattcgttacaggttattgaagtcaaatggttataagacattgtattcgaatacatatatccctaaagaaaagctcttttcaaaggaatttgatatcgagcacattatccctcagtctcgtttgtttgatgattccttttcaaataagacattggagtccaagagtataaatatcgagaaggataatagcactgccagggactatgttttaagcaagtatggcgaagcgaggcttagcagctataaggccaatctggataaaatgcttaatgcaaaggagattagtcgcacgaaatataatcatctgttaatgaaggagtcggatattccgtcggattttattaaccgtgatttaagggattcccaatacatcgcgaaaaaggctaaggagatgctggaggatgtagtaaagtatgtagtttccaccactggttctgtcaccaagcgccttcgagaggattggcaattggtagatgtgatgaaggagcttaattgggataaatatgataaattaggactaacatcttatggcgacggaaaagatgggcagaaggtaaagaaaattgaaggctggactaagcgaaacgaccatcgtcatcacgctatggacgctttgacgatagcttttaccaaacgttcttacattcaatatcttaataatttgaatgctcatttggagaaagtatcggacgatttgtcgtttttcaaattagaagactacgaactggatgatttggataggggcgatgtggcgcgcgtggttcgtgctattcaggacaaggaattacacagggatgcagataagaagctgcgctttaaccctcctatgcctttagatgagtttcgaagcgaagccaagcgtcagctcgaagatgttttggtgtccataaaggcgaaaaacaaggtggtgacgaaaaatgttaattacacgaagtctaaacgaggtgaccgtaagagtcaaaatacactgacgcctaggggtgcgcttcatgaagatactgtatgtggtagaatctctcgatatgcgacaaatgaagaaaatgtgggttctggatttaatgccgagaagattagcacggtcgcaaatgccatttaccgtcaagctcttttaaagcgactttccgaatatggaggagaccctaaaaaagccttctgtggagctaatagtctggagaaaaagccgctatatctaaatgagatgcatactgactacgtgccgcagcgggtaaagactgtccatttggagactctatatactaaacgcaagcctatagatgaatctcttaaggtagataaggtcatagataaaggtataagggatatacttaaggctcgattggccgaatatggcgattccgctaaggctgcattctcaaatcttgacgaaaaccctatatggttaaatcgagaaaagggtatagcgattaagcgtgttaccatagatgcaagtgtgtccgtggtcgaacctcttcattataagaaggaccataagggcaatgtgatttacgattcacgcggagagcgcattcctacagattacgtgaagtatggtaataatcaccatatagctatatacgaggacacatccgggcacctccaggagcaggtggtaactttctacgaggcgacatcgagggcttctatgggacagcctgtagtggataaagactatagaaagagtgaaggatggaagttcttattctctatgaagcagaacgaatacttcgtcttccctaatcctcagactggattcgacccgtcggagatagacttgatggatccgaagaattatgcggctgtgagtgagaatatgtttagggttcagaagatgtcttctaaagattattcattcaggcaccatttggaaacgtctgtggaagataagaacttgaaaactaaggatgtggtttggaagcgtgttacggctattgataaactgaaaggcgtagttaaagttcgagttaaccatattggccaaatagttcaggtaggggagtattagtatggtaaaaaggactttatatttcggcaatccggcatacctgtcacttcgtctgggacagctggtagtgcggctgccgtcccctgagccgaccattagtaaagacagttttgaggccaagaccatcccggtagaagatatcggggtggtcgttttggataataagcagataacgattactcagggcttgttagaggctttgctggaaaacaactgcgctgtgctaacttgtgattcgtctcgactccccgtggggcttatgcttcctctttgtggacacactcttcaaaacgagcgatttagagatcagatagaggcatcgcttcctcttaaaaaacagatatggcagcaaaccattaggcaaaagatcttaaaccaagctgcagttctgcgttattccacgggtcaggagcataacaatatgctggtgtgggcggaggaggtacgaagtggcgattccgctaatctggaggcgagagcggcagcgtattattggaggacagtatttggagacccgatgttcgtccgtggacgggaagaggctcctccaaataacctattaaattatggttatgccattttgagggctgtagtcgctagaagtttggtttgtagcggattgcttcccacactgggtgttcatcaccataatcgctacaacgcgtattgcttggcggatgacataatggagccttaccgtccgtacgtggataggatggtgtgcgatatgattgaattaggtggtagtatgattcttactccggaagtgaaaaaagcgtttttgtccataccggttctcgatgtcgacatagatggacatagaagtccactaatggtcgcagtgagtacgaccgcggcttctcttgccaagtgttttaccggggaatctcgaaaggttatatatccggagatgtaaactaatgatatgaccgataggtttagcgcatatagagttatgtgggtactagtctttttcgatttgcccacggatactaaaaaagagagaaaggcggctagcgactttcgtaagaaattagtttccgatgggtttaagatgtttcagttttctatctatatgcgccactgcccaagtgctgaaaacgcggcggtacacgtgagacgagtgaaattgaatttaccggatgcgggtcacgttgggatactaacgattacggataagcagtttggggctatggaactcttttgcgaaaagaaagaggaggcgccgcctatcgattatctgcagctggaactgttttagtattcaacacgatgtgcgaaaatgtagataataaaaattctcggccttaattgaccgagaatttttatttctggaaacatcttgtaaggtgttgtgttttaattttttacccatagtctactgtttccagtatgacaaagataatagtttataagcaattcacaacttgtcgcctcgtttcttttcggagtccgag

SEQ ID NO: 4112 - DNA, 5558 bp, synthetic construct
  misc_feature 1..5558: note = Synthetic
  source 1..5558: mol_type = other DNA
  variation 2097..2253: note = note, n is a, c, g, or t
gctcttccgatctgcagagaattccaattattctaccttcgaaacttacagattgcgggcaaaggctgtcaatgaaaaaattagtttgcatgagtttgcaagggtgcttttgatgatcaataaaaaaaggggttacaaaagcagtagaaaagcgaagtcaacggatgaaggtcaactattggatggaatggatgtagcaattaaactgtatgaagagaatcttactccaggacaactctgtttacaaattttaaaatccggtaaaaaaagacttccggaattttaccggtctgacttgatgaatgagttgaacaagatatgggattttcaatcgaagttttatcctgatatattaattgatgattttaaaaaacagttagaaggcaaagggaaaaacgatgcctcaaagaattttcttgggcggtttggtatttatactgctgatttgaaaggtctcaataaaagaacagaactttttcaattaaggagtcatgcaccatcaaaacaattaacactcgaagaagttgctttagtcatcagtgaagtaaacgggaatatccattcttcaagcggatacctgggagatatcagcgacagaagtaaagaactttatttcaaaaaaataactgtcgggcaatatctgatccaaaaactggatgaaaaccctcatttcagtttaaaaaacaaggtcttttatcgtcaggattatttggatgaatttgagagaatatgggaaactcaggcaaaacatcatccaattttaactccggaattaaaatctgagatcagggatatcatcattttttatcaaagaaggttgaaaagtcagaaaggattgatcagtttctgtgagttcgaaagcgagatcattgaaattgaagaaaatggaaaaaagcgaaaagttaccataggcaacagggtttgtccacgttcttccccattgtttcaggagtttaaaatctggcagactttaaacaatgtaaagatcagttctggaaaagagcattgggagcgtgatcttgatgaagacgaaaagctcatgctggcagaagaacttaagttcagggatcaactcgttgacaaggatgtgatcaaaatgctttttccgggaagacaggatatctccataaatttcaaaaagctggatggaaataaaaccatttctgctctgtacaatgtatatgcaaagatcattgaaatgagtggtcacgatgaagtggatttttcaaaaactactttttctaaagttcatgattatgtgcaaaaggtattcaatggattgggcttcaatacccagattttgaattttgattttgaaggggatcaaatggatccggataaacatgaactgtatcgtttgtggcatttgctgtattcttatgaaggggacagcagtaaaaccggaaatgaaggtttgatcaatgcgatttcacgaagatatggatttgataaggaatacgctgcaatgatcgctaatgttgtgtttcaggacgatcatggaagtttaagtgcaaaagcaattcaaaaaattcttccttttctaaaaagtggatatgcatttgctggtagaaaggaaggaaaattgaaagaaagtgcatgtgaagaagcaggttataaacactcaatagattctttgacaaagcacgaaaatgaacaaaaggaattattgccaaaactggaaatccttcccaaaaacagtctcagaaaccctgtagttgaaaaaattctcaatcaaatggtcaatgtcatcaatgccatcatagatgaatacggtaaaccagatgaagtccgcatcgaacttgccagagaattgaaaagaagcgctaaggaaagggaatcgatgacctcgaacatcaataaatcaaatattgaacatgaaaggatccgttcattattgatcaatgaatttggactcaggcatgtgagccggaatgacatcatcaggtataaattgtatgaagaactggaattcactgttaataaaacgctgtattcaaatacatatatcccgcgagaaaaactttttagccacgagttcgatatagatcatatcatccctcaatccagattatttgacgactcattttcaaacaaaannnnnnnnnnnnnnnnnnnnnnnnnnnnnnnnnnnnnnnnnnnnnnnnnnnnnnnnnnnnnnnnnnnnnnnnnnnnnnnnnnnnnnnnnnnnnnnnnnnnnnnnnnnnnnnnnnnnnnnnnnnnnnnnnnnnnnnnnnnnnnnnnnnnnnnnnnnnntttcaaacaaaacgattgagttaaaggatgttaatataaaaaaaggtaatcaaacagctattgactttgttttacaggaatatggtgaacaggaattgggtcaataccatgcacgtttggacaacatgctgaagaacgggaaaatttcaccagtgaaatacaaaaagcttaagatgaagggtagtgaaattccccaggacttcatccaaagagatatccgggatactcaatacatcgctaaaaaagcaaaggccatgttggagaccatagtcagaagcgtggtatccaccacaggttccattacggacagactcagacaagactggcaactgatagatgtcatgaaagaactcaactggcagaaatatgataagctggggttgaccgaagtgtttgaaaatgaagaaggacaccagattcggagaataaaagactggaccaaaagaaatgatcaccggcatcatgccatggatgcattgacagtggcgtttacgaaaagaagtcatatacagtatttgaataatctgaatgccaggagcgataaatcttccagtatatatggaattgaagctaaagaattggacaggaatgaaaagggtaaactgctgttcaagccgcctataccggtaaaagaattcagggcagaagccaaaagtaacctcgaaagcattttggtttcgattaaggcaaaaaacaaggtcatgaccaataatgtcaacaagatcagaaaacatggcggtcatgagtcggtagttcaactcactcccagaggtcaattgcataatgaaacgatctatggaagcagactggaatacgtgactaagacggagaaagtgaatgccggatttgatatggaaaaaatacagtccgttgcgaacaaaaaatacagggaagccttgatgaaacgcttggaacaatttgaaaatgatccaaaacttgctttcacagggaaaaacagcattacaaaaaatcctgtttggatcgatgatatgcgaacaataagcgttcccgaaaaagtgaaacttgccactttggaaaacatgtatacgatcagaaaggaaatctcaaaagaccttaagatcgaaaaagtggtggataaaaaaatcagaaagattttacaggaaagactggataaatatcaaggtgatgccaataaagctttcagcaatctgaatttcgatccgatttggctgaatgaagaaaaagggatcagtatcaagcgcgttaccataagtggtgtctccaatgcagttgcgctcagggcgcgcaaagatcatctgggcaacaagatcatggatgaacagggattgagtttacctgttgattttgtgagtaccagcaataatcatcatgtagctatatttaaagacggtaatggtaatttgcaggaacatgttgtatccttttttgaggtggtggaaagagtcaggcaggacttgcctgtcatcgataaacactttaatgaagatgaaggatggcagtttttattttctatgaaacagaacgaatattttgtatttccgaatgagcaaaccggatttaatcctattgataaggatcttttggatgagaacaattatcctgcaatcagtcagaatttattcagggtgcaaaaaatatcaacaaaaaactatatgttcaatcaccatcttgagacaaaagcagttgatggggaaatgttaaagaataaaaagcagttagtagatattacttttaaatcaattagaacccctgcaaatttggagggaattgtaaagattcgaattaatcatattggtaaaattatttctgttggcgagtattaggttcatttttatttagattcagtacaaatatcacaaattcaatagtttaagggtcattattgattttcaggcaagcattttgctgtattaaaaaaggaagtaaaccttgcctgtgttatgatcaaacaaaccctttattttggtaacccggcttatttgagtctgaccaataagcaattggtctggaaatctgcggagaataatcaagataaaaaaattccggtatttctcaggcaggaaacggaaagaacgatcaatatcgaagatgttggttttattatactggatcacagtcagatcactttgacacaacggctgatgtctgaattgatggaatgcaatgttgtattaatgacctgtgatccatcgcatcaccccaatggattatttctggctttgaatggaaatacattgctgacagaacggcatcagacacaggtgaccgcttccattccattgaagaaaaatttatgggcacagatcattacccggaaaatatacaatcaggcttgttcgctgaagctttctaccgggctaacagatgaatacagatatctggctaaattgtcaaaaacggtcaaagcgggagatttgaccaacagagaagccatggccgcatctttctactggccacggttaatgcctgaacttggaggttttatccgtatgagagaaggttttcctccaaataattttttcaactatgcctatgccttgcttagggcttctgttgcaagagccattgtttccaccggtttgattccgagtttggggcttcatcataaaaataagtacaatgcattttgcctggcagatgatatgatggaagctttcaggccggcggtggatgccgaagtggttaaaatcatcagaaaacatggagctgatcgtgaattggatacagaactaaagaaagatttacttggtattttgacgatggatgtaaaaatggaaaaggataaaagtccgttgatggtcgcatgtacaagatctgtgaggtctttatacaactgttttgaaggcagtacgaggaaattattgttgccgggattgatcatggaataggttaattgaaatttttattcatttgaaatgcaagacaggataagcgcatacagggttatgtggttgatagttttatatgatttgccaaccaattccaaaaaggaaaggaaggatgcagccaggtttcgaaaagagatcatggcctatggtttcaaaatgtttcaattcagtgcatacatcagacacgtttcgagcagagaacatgcggatgcatgtaaaaaaagcatcagaaaaattcttccaaaggaaggatttatcggaatgttggagatcacggataagcaatttgaaaagatggaattattttatcaactggtgaaaaaaccggttcccaatgcaccaatccaactcactttattctaaatttcgttttcattcataggctaaatagaaataaaaaaatccttcattaagaaggatttttttatattgaat

SEQ ID NO: 4113 - DNA, 5247 bp, synthetic construct
  misc_feature 1..5247: note = Synthetic
  source 1..5247: mol_type = other DNA
actgctgcattgaaagaagagttgagaggtaaaaaacgtgatgctgtttgggccatttgtgccaatgcttttgtttggaaagaaacctatacagaatggaataatgaagaaagcaaaaacgaacaaatagaaaaggaacataagttggaaggtatttatagcaaacgaaaaagggatgaggcaaaaaaggaaaatttgcaatggagggtaagtggtttgaaagaaaagttatcattggaacaattggttattatattacaagaaataaacactcaaatcaataattcaagcggttatctaggtacaatcagtgatagaagtaaagaattgtactttaacaaacaaactgttggtcaatacctaatggatattttggataacaatcccaatgcaagtttacggaatattgtgttttatcgtcaggattatttggatgagtttaatgtgctttgggaaaaacaagcagaatttcataaagaattgacgggagaactaaaaaaagagatccgtgatattatcattttttatcagcgcaggttgaagagtcagaaaggattaatcagtttttgtgagtttgaaagtcgacagatagaagtaaagatagatggtaagagaaaaattagaacagtaggtaatcgggtgataccccgttcttctcccttgttccaagaattcaaaatatggcaaatactaaataatattgaagtaacagctgttggtaataagaataaacaaagaatgcagaatggttcaaatgaaccggacgatacggaacaattggagttgaacggcaggcgttatttgtatcaggaagaaaaagaattgcttgccaaagagctttttgttcgtgataaaatgacgaagttggatgttttaagattattatttgataatccagaagaattggacttgaattttaaaacgattgatggtaataagacgggatatctattttttcaagcatatagcaaaatgattgaaatgtctggtcatgagccagttgacttcaagaaacccattgagaaaatagttgagcaggtaaagtctgtttttgttcttcttaattggaataccgacattttgagttttgactcaaataaagagttggataaacaatcttattataaactttggcatttattgtattcttttgaaggtgacaatacgccaacaggaaacgggtgcctagttcaaaagataatggattcttatggtcttgggaaggagtttgcaaagattttggcaaatattacttttcaagaagattatggcagtctgagtgcaaaagccattcataagattttacctcatctgaaagaaggcaatcagtatgatgtagattgcgagtatgctggatataggcattcaaaatcgtctttaaccaaagaagaaatagcaaggttcttcctaggaatagtttgcgcaatccagtggtggaaaagattctgaatcagatggtaaacgtaatcaacgcaattattgaggcttatgggagaccggatgaaatccgtgtcgaattggcacgtgaattgaaaaagaatgccaaagagagggagaagttaaccaagtccatagctgaaactacaaagacacatgaggcacataagaaacttttgcaagaggagttcggtttgaagaatgtaggccgctcggatatcttgcgttacaaactttataaggaattagagtcacgtggttataagactctttattccaatacctatattccaagagaaaagttgtttagtaaggaatttgatattgagcatattattccacaagcgcggctttttgatgacagcttttcaaataagacacttgaagcacgtaatgtaaatattgaaaaagggaataggacagcttacgattttgtgaaggaaaaatttggtgaaagtggaactgataatagtttagattgttatttgaataatatcgaagtattgtttgtctcagggaaaatatcgaaaactaaatatactaaattgaaaatgacagagcaggatattcctggtggttttattgaacgtgaccttcgtaatacgcaatatattgctaaaaaggctctgtctatgttgaatgaaatttctcgttgtgtagttgccacaagtggctcaattactgacaaattgcgcgaagattggcaactggttgatgtgatgaaagaattgaattgggaaaaatataaggcgttaggactggttgaatattttgaagataaagatggaaaacaaataggcagaatcaaggattggtcgaaacggaatgatcatcgtcatcatgcgatggacgctttgacggttgcgtttacaaaggaggtattcattcagtattttaataacaaaaatgccagtttgaatcccaacacaaatgagtatgcaataaagaacaaatattttcaaaatggtagggcaatagcacctataccattgaatgagtttcgtgcagaagctaaaaaacatttggaaaataccctaatttcgataaaagcgaaaaataaggtaattacgaacaatattaataaaaggaagaaaagaggtggcgtaaatacaaagaagcaacaaaccccacgtggacagttgcatctggaaacaatctatggttgttgcagacaatatttgacaaaagaagagaaggtgaatgcttcgtttgatgtgtcgaaaatagcgacagtaagtagctctgtttacagggatgcattgctaaaacgtttgcaggaacatcacaatgatccgaaaaaggcatttgccggaaggaactcactagataaaaagcccgtttggctggataaggagcaaataaggaaggtaccagagaaagtaaaaactgtaacatttgaaactatttatactatacgtaaagagatttctccagatttgagggttgataagataatagattcaggtgttcgaaaaatgctaacaggcagattaaaggagtatgggaatgatgctaaaaaagcattctccaatcttgatgagaaacctatttggttgaataaagagaaaggcatacccattaaacgagttacaatttcgggaatcagcaatgcgcagtcattgcatgtgaaaaaggataaggatggcaaaccagtattggatggaaatggtagaaatattcctgtggattttgttaatacaggcaataatcatcatgtagcagtttatcgtaggcccgttatagataagaacggtcaaatggtaattgacgagaatggcaacctaaagtatgaacttgaagaggttgtagttactttctttgatgcagtaacaagggtaaatcttggtcaaccgattattgataaggattataaagcgagtgagggctggcaattccttttcagtatgaagcaaaatgagtattttgtatttccaaataaaaagactggctttaatccgaaagagattgatttacttgatgcagataattatggattgataagcccaaatttgttcagggtacagaaatttactcataaaaactatgtttttagacatcatttggaaacaacgatcaaggatacgagttctattttgagaggtatcacttggatagattttcgtagttcaaaaggattagactctattgttaaagtacgtgttaatcacattgggcagattgtttcggttggggaatactaattgaataatacataataaataatatatgtgtaaaaacaatgatgatccttgatgctttgactcctattattacaaatatagagatagataggtgaaagttgaaatctatatttttgacgaaatgtttgggttggcgcaaggcaaaattacttgactgtttagagtactgtgctccgcagttgcaaaacatttcaagaatatctttgtagacagtgagccaattgaagatttttggaattagctgccactgatggtaaaatgtatcagatgaggttatatcatctgggcatcattctatctgtgggttactgcattgatgaaattcaaactacatattttgaatatgggtaaacagcgtactgaaaaaatgtttgattgaggtacttgggtatgaatgacagacgattaaagaattcgcagaaactgtttagagaaaattattttaagtaataatttgtttgtatttgtgacattcgtagtagcgaacgttgtttccataagagaataatcggtatttatttgcaaagtgatgctgactgtggagcgaatggtgatgtgatgaagaggtttaataaatagaaactgcttggaaaaatgtatctaacgaggtgatgtataaaccggaagttttttcctattgcaaaaaaaatctgaataatacagagttgtatgatttgagtcgcattctttcaatatctttagattatgtaaaaaatccggctaaaaagaacatgtttgtatgtgaaagatgaggtgaaaagtaggatttattttgataattcaatggaaaggttgtgttgtatacactggaagagtgagttacgaagtggtcatgccattatggaacagaaatatgatcgatttcatactaaatgattttatgattacaaatctgattttgaaacactttaataaaagaatgaattatgattaagaaaacactttatttcgggaatccggtttatctatcgttacgaaatgcacagttaatcattaaactgcctgatgttgaaaagacaatagctttgcctgaagtcttgaaaaaacaggcggaagtgacgaagcctatagaggatattggaataattgtgttggataacaaacaaattaccattacttccggtgtgttggaggctttgcttgaaaacacttgctctgtaatcacttgcgatagtaagagtatgccagttggactgatgcttcctctttatggaaataccacgcagaatgagcgttttcgtaaacaattggatgcttcacttccattgaaaaagcaactctggcagcaaactattcaagcgaagatcaacaaccaggcatctgtactcaaagattgtatgaacgaagaagtaaagtgtatgcgtgtgtgggcggctgacgtgcgtagcggtgatcctgataacttggaagcgcgtgctgcagcgtattattggaaattcttatttgctggcattgactgttttacgcgagatcgtgagggtgtttctcctaataacctattgaattacggatatgctattcttcgtgcagtagtggctcgtgggttggtaataagtgcttttatgtcttttgtcaactccacatcttttccatactcctgtgtcaagtt

SEQ ID NO: 4114 - DNA, 4846 bp, synthetic construct
  source 1..4846: mol_type = other DNA
  misc_feature 1..4846: note = Synthetic
aaacttttctccccagaccatccagtatttgccgtcaatcttggcaatcacttgtttgccgtcgattaattgggttacgatagaggcagatttggaaaattcatctatgaatccaaccctgcgttttatcatcgctttattaatcggaactgctgttgcagcattctttggattcttaatcggaattccggtacttcgtttaagaggcgattaccttgcaatcgtaaccctggcatttggagagattatcaagaatgtcatcaatgttctttatgtaggcaaagatgaaaacggtctgcattttgcaatcaatgacagcaagtctcttaatatgtcgggaaccggagaaatgattatcgatggtgcaaagggaatcaccggaacaccaagacagtctactttcttaatcggtgttattttgattctggttgcattgtttgtagtatttaatctggttaattccagaagcggccgtgccatcatggcaatccgtgataaccgtattgcagcagaatccgttggcattaatattacaaagtttaaactgatggcatttaccatttctgcagcaatcgcaggagcaggcggagtgctttatgcacataacctttccagtctgattgcccagccggcaaattttggatacaatatgtccatcatgattctggtatttgtcgtacttggtggaatgggaagcttccgtggttccattattgcagccgtagtactgaccatgcttccggaagtattgcgtggactgcgtgattaccgtatgctgatttattccattgttctgattgtaatgatgctctttaactgggcaccggcagcaattacctggagacagacacattctttgaagaatttatttgcaaagaaaacgaaggaggtacaataagatggcaatgttagaagtaaagaatcttggaatttccttcggtggactccgggcggtagatggatttgaaatgcagattgaaaaaggtcagttatacggactgattggaccgaacggtgcaggtaaaacaaccgtatttaatatgcttaccggtgtatacaaaccggatgatggaagcattgtactggatggaaaagatattaccggaaagaaaaccatagatattaataaagccggaattgcaaggacctttcagaatatccgcctttttaaagaccagtccgtgctggataatgtaaaagtcggactgcataatcatcatacctattctactttaaccggaattctaagacttccgaagtattttaaagtagaggcagagatgaatgaaaaggcaatggagctgttaaaggtatttggtcttgaggatgaagcagattatctggcatccaatcttccatatggtaaacagcgtaaactggaaatcgcaagagcattggcaaccgaaccaaagcttctgcttttagatgagccggcagccggcatgaacccaaatgaaaccaaagaattaatggataccatccgctttgtaagggatgaatttgatatgaccattcttctgattgaacatgatatgaaactggtatccggtatctgtgagaaactgactgtattgaacttcgggcaggtactggcaagcggaaataccagtgacgtattgaataatccgcaggttatcaaggcgtatctgggtgaataggagggatgataaaatggcaatgcttgaaataaaagatttggaagtatattatggtgtgattcaggcaattaaagggatttcctttgatgtcaatgaaggagaagtcattgcattaatcggagccaatggtgcaggtaagacaactacactgcagacaatcaccggaatgctcagtgccaaaaagggaagtattctttttgaaggaacagatatcaccaaggttccgggacacaagattgtatccatgggaatggcacatgttccggaaggaagacgtgtatttgcagagctttctgtatatgagaacttaaagctgggtgcatataccagaaaagataagcaggaaattgcagagtctttagagcgtgtatacaagagttttccaagattaaaggaacgtaagaatcagctggctggaaccttaagtggtggtgaacagcagatgcttgccatgggccgggcgttgatgagtaagccgaggatcatccttatggatgagccatccatgggattgtctccaatctttgtagaagagatttttaacattatcaaagaaatatctgcatccggtacaacggttcttctggtagaacagaatgcaaagaaagctctttctatgttgaatgaaatttgtcgtcgagtggttgctactactggggcgattactgatgaattgcgtgaagattggcaacttgtggatgtgatgaaagaattgaacctgccgaaatatgaagccttggggttggtggagaggtttgaggataaggatggaagaattatcaagcggataaaagattggacaaagaggaacgatcatcggcatcatgcgatggacgctttgacggttgcgttcaccaaagatgtgtttatccagtattttaacaataaaaatgccgcttgggaatccgattgcaaggaacatgctaatataataggtataaagacccgttattttgaatcggggagggctgttccgcctatgccgttgggacagttccgggttgaggcgaaatcacatttggaaaatctgttggtttctatcaaagccaagaataaagtcgttactaccaatgtgaattgcatcagaaagaaagggggaatatctgaaaagcaccagcaaactccgcgcggacaattgcatttggaaacaatttatggaagccataagcaatatgtcacgaagatggaaaaagtgaatgcttcttttgatgcagccaagattgcgaccgtaagtaggcagaattacaggaatgcattgttaaggcgtttagaggcttttgggaatgaccccaagaaagcgtttaccggtaaaaacacgttggaaaagaatcctgtctatctggatagggcacaaaccatgcgaatgccggacagggtacaaacagtcgaatttgaagcggtttatacgatacgcaaacctattgattctaatttgaatgtagagaaagtggtagatgcgaaggttcgcgctattttggaacaacgcctggaagaatatggaggagatgctaaaaaagcatttgtcaatttggatgaaaaccctatatggttgaatcaggagaaaggaataagtatcaaacgggtgagcattcgaggaatcaataatgcccaatcgctacatgtgaagaaagataaaaacgggaatccgattctggatgaaaacggaaaacagatccctgtggattttgtaaataccggcaacaaccatcatgtggctatttatcgtaagccagttttagataagaaaggacaggtgatgtttgatgaagatggcaatctgatgtatgaattggacgaagtggtcgtttctttctttgaggcagtaacgcgggctaatttggggttgcctattatcaataaggattacagaagaagtgaaggctggcaatttttgtttagcatgaagcaaaatgaatatttcgtattcccgaatgaaaaaacaggtttcaatccaaaggaaatagatttgttggatccggataattatgcggtgattagtccgaatttgtttagggtgcagaaattttctacaaaaaattattgttttagacatcatttggaaacagatgttcaagaacgaaaagctttattaggtataacatataaatggcaattgggattgaaagctattaaagatatagtcaaagtccgaatcaaccacattgggcaaatcgtttcagtgggagagtactaaagtcctaataggggttgaaacaaatagggtgtatgctatttccaaaaaggttgtacccttttccaaaatagtatgcacccttttttttattccgattaataacatattaaaatcgaatagcttatgatcaagaaaaccctttatttcggaaatcccgtttacctatctctgaaaaatgctcagttggtaataaagttaccggaggtagtcaggaatgatacattgcctgaaagtttcaaacgaaactcggaagtgaccaagcccattgaggatatcggagttgtagtactggaccataaacagattactatcacttcgggagtgttggaggctttgcttgaaaataattgcgccattataacgtgtgatagtagaagtatgcctgtcggtttgatgcttcctttgtgtggaaacactacgcaaaacgaaaggtttcgtgaccaattggatgcttcgttaccgttagtgaaacaactttggcaacagacgataaaagcgaagattgaaaaccaagcagcagttttacaggaatgttccggggcagaaacaagatgtatgaaagtatgggcggacgacgtgaaaagtggagattccaataacttggaggctcgtgctgctgcttattattggaagaatctgttcccgataaaagattttacaagagatcgagagggaattccacctaataatttattgaattatggatatgctgttttgcgggcaattgttgctcgcggattggtggtgagtggacttttgcctactttgggtatccatcatcataatcgttataatgcttattgtctggcagatgatataatggagccgtatcgcccgtatgtggatcgtttggtttataatatgataaatcaaggtgtcgattatacggaactgacaaaggagttgaaggcacaactgcttattattccgacattggaaacgaacatagcgggaaaacgtagtccgttgatggtagctgttgggcagactacag

SEQ ID NO: 4115 - DNA, 4247 bp, synthetic construct
  source 1..4247: mol_type = other DNA
  misc_feature 1..4247: note = Synthetic
acctttattctggatcgtcaagcggttatcttggcaagatcagtgataggagtaaggaattgtatttcaacaaacagactgttgggcaatacctttattccaatattcagaaggatccgcatttcagtacaaaaaacaaagtgttctataggcaggattatcttgatgagtttgaggctatttgggaaagccaggcatcttttcatcccgaattgactgatgaactcaagaaggagatccgcgatgtcgtgatattttatcagagaagactgaaatcccaaaaaggactgatcagttattgcgagttcgagagcaggaaggtagatgtggaaatcaatggccggattgtacagaaaatccgcggttgcaaggttgctcctgtctcgtcaccgctgtttcaggagttccgtatgtggcagaagatcaataatatcatcgtcaccaataaagagactggagaacaaggcacgctggaacaggatgacaaggtcagattggcagagtgcctaagggtgaaggacaaactgtctgataaagagattcttaagttgttgttcaagaaacctaagaatttagagatgaacttcaaatccattgagggaaatgaaaccttgggcaaactatattcaaaatttcttgaagtggtgtctttggccggtaacagtgactatgaatattcaaaactacgtcaagaggagttgatgaatatcctacggactgaatttgcaaggaacgggttcaacacagcggtccttgaatatgatccgtcgctgcctaaggaggaatatgaaaggcagccattgttcagactttggcatttgttatattcatacgaaggggataagtcccagacaggcaatgccagtctgataaataagatcgctgagatctgcggaatgccggaaaatcttgcgaaaatcatcgcctccgtttcattcaaacaggactacgcttgcttctcaccaccttcatcgttcatccggtttgccatacgaatatgccgggtacaggcattcaaagcaatccttgacaaaggaggagatcgagaataaggtcttgaaggatcgtcttgatcagatcccgaaaaactctctccgtaatccggtagtcgaaaagatttttaatcagatggttaatgtgatcaatacggttggtgacaggtatggcaaaccggatgaaatccacatagagctggcaagggaacttaagtcctcgcaggaggaaagggctcgggccacggaatccatagcgtcaaacaataaggagaatgataggatcaggatgattcttgagaatgagttccatcttgcttacgtcagcaggaatgacattgtcaagtacaaactgtatgaggaacttaagaacaatggttacaagacattgtattccaatcaatatattccggcggacaagcttttctcccgtgagattgacattgagcacatcatcccgcaggctgtgttgttcaatgactcactgtcgaacaaaaccttggaattcagagatattaatctggaaaaaggcaaggacaccgctttcgattatgtcaagaacaagtatggggagagcgggcttgaggattataaacttcgggtaaaccatctctttgagtcaggaggcatctccagaacaaagcgtgacaatcttcttcgtgattctaagaatattccggaaggattcgtcgaacgcgatttgaaggacactcaatacatcgccaagaaggcccgtgagatacttcttgaatatgtccgtgtggtggtctcaacatcaggatctataactgacaagcttagggaagactgggggctggtgaatgtgatgaaggaactgaatatgccgaagttcgaagcggctggatttgtggagacaatcacgacttcggacggaaaggatattcgtaagataaaggattggaccaaaaggaatgatcaccgtcaccacgctatggacgccatcactatcgcgtttacaaaacttgctcatattcaatacctcaataaccttaatgccaagggtgacaaatcttccagcatttatgcgatattgcagaaagagacttatctctccggctccaaaagattgatcattcctccgcttccgttggaccagatgaggcgggaggtccgcaggcaacttgaaagcattctcgtgtcaatcaaggcaaagaacaaggtgatgacggagaatatcaaccgtataaggatcaaggacggtgtgaaaaacgtcaagtgcctaaccccacgtggtctgctgcataaggaacaggtttatgggcaacgtaaacgttatgagacttatgatgtggcggtgaacgggaagatgactgaagacgtgatcgctacagttgcgtcaagtgagacgaaagcggctttggctttgaggctcgcgcagttcaaaggtgacccgaaaaaggcgttcaccggcgctaattcattggataagaatcctgtttggcttgatgccaatcattctcgcaaggtcccggcgaaagtcaagtgtgtgcgtttcgtgaatgtatattccatcaggaaaaacattgatccaagccttagtgttgagaaggttatggacggaagagtgcgccgcatcctcaaagacaggttggctgagtttggtaacgatccaaaaaaagcgttcgtgaatctggacgagaatccgatctggttcaacaaggagaaaggtattatcctgaaaagtgtgaccatagccgagaatttcgaccttgaccctatcaggatcaagagggataatctcgggcgtgtcatctgcgacgcagaaggaaatcatattccatcggactatgtcaatttcaggaacaaccaccacgcggcgatattcgaggatgcggacgggaatattcaagaacacatagtttcgttctatgaggcggtgcggaggcggtctgccggacttcctgtcgttgacaaagaatataacgctgacaaggggtggaagttcctgttcacgatgaagagcaatgagatgttcgtgttccctaatgaacggacggggtttgatcctcgggcagttgatttgatggatccggagaattattctgttatcggacctaatttgttcagggtacaggctgtatctactcgtgattattggtttaggcatcatctggagacatcattgggagcagataaaaaattgaaggatattacttggaagagaataactaatattgcgatatttaagcaactcgtaaaggtgcggataaaccacatcggagagatagtatcagtcggagaatatgattaaacgaaccctgtatttcggaaatcctgcttacttgtcctacaagatgaagcagttggtcatccgtcttgtggctaatgacccagatgagtattccgagcagatccgtactgtgccggttgaagacattggagttgtagtggttgataatcagcaggtgacattcacatcaggtctgatggctgcgttgttggaggagaatgtcgcgttggtgacctgtgactccaaacatattccgaccggattgatgctttcgcttcaaggacattcctcgcagaatcaacgcttccgaaatcagttggaggcgtcattgcctcttaaaaaacagctttggcagcagacggttgagtgcaagatccgcaatcaggccgctgtgctgaaatatgtctcgggagaggatgcgaagaatatgcttgcgtgggcaggttcggtcaagagcggagattccgagaatatggagggacgtgccgcagcatattactggaaaaatgtgtttgaggtacgcttcgtgcgtgaccaattcggggaatatccaaataatcttctgaattatggctatgccatattgcgagctattgtggcaagggctcttgtcgccagcgggatgcttccacttcttgggattcaccaccacaacaagtacaatgactactgtttggcagatgacattatggaaccttacaggccttttgtggataggttggttctcaatgttatggatgaatatcctgatgataaggaactgaataagaacataaaagcacggcttttgactattccggtccttgatgtgaatattgatggacataagagtcctttgatggtcgccgtgtccgccacgactgcctctttgtacaaatgttttagcggagtatgccggaagatagtttatccatcaatgtagaaaccaggtacagtaaatatcgggctatgtgggttcttgtcttgtttgatttgcctgtggcgacaaagaaggatatgaaggc

SEQ ID NO: 4116 - DNA, 4226 bp, synthetic construct
  source 1..4226: mol_type = other DNA
  misc_feature 1..4226: note = Synthetic
agcaagaacttgatcctatctggacgttgcaacacgcttgtcattcagcgtggatgaccgacgaattgcgtgtagccttgacgcaggctgacagccggagagcacagcagctgatggatgcgcatggcgtaattccggaaacggtaaaggggaaggaacgtcgtcagatcctttatggctggcgttctgctgcggctatgggtggtttgccagcggcacagttggctgcggtcttgattcaaatcgtgagagacataaacgcttcgagcggctacctggggcagatcggagacaggagcaaggaactctatttccggcatgagacagtgggtcagtatatgtggagacacatacaggccaatccccatgagagtttgaaaacccttgtcttttatcggaaggattaccagaatgaattcgacgcgttgtgggcgagccaggctcggttccatcctgaactgacggagaggttgaggaaacgtttgcggcacattctctttttccaacgcccgttgaagagcaagaaaggcttggtgaaccgttgtgaactggttcattattctattccggaaaacgcggcggacggcggaggaaaacggcgtgatgtcggaccgaaagtgtgtccgaagtcgtctccgctatttcaggaattcaggatgtggcaggtgttgaacaatttaatgctcattcacgtcccgacacaagaagtccgtcccttggctgacgaggagaaggaaatgcttgcggccgaactgtgctatcgtgtcaggatgaagaagaacgacgtcttgaaattgctgtgcgaccattggcgcgaatgggacctgaattataaggaacttgaaggcaaccggacgctggcggctttttataaagtgtatgagcaggtcatcgcgcagacaggacatggcgaatacgattttgaaaaaatgcgtgcggctaaggtgcgcgaacttgtcgggggagtgtttggtggcctcggctttgaagtgggacttctgtcttttgatgcggaactggatggtcttgcatatgaacagcagccgctctatcgtctttggcatcttttgtactcgtatgagggcgacagttcggcaaccggggacaaatgtctgcttaaacgcctctgtgcactgacgaaaatggatgaagatgtggccaggttattcctgactgtacattttgaggatgattacgggagcctgagcaccaaggcaatgcgccgaatccttccttttctgaaaaagggatatatgtatgacgtggcctgtgagcaagccggttattgccattctgtacgttcccgcacgcgtgaagaacttgacaagagaacatataaggaccggttggatctcctgccgtcgaagagccttcataatcccgttgtcgagaaaattcttaatcagatgatacacgtagtgaacggcgtgacttctgcatacggtaagccggacgaaatccgtattgagatggcgcgtgagttgaagagttgtgccgctgaacgtgagagaagaaccggcctccatagcgaaggcaacgaaggaaaacgcggagatagaaaagatactccgacaggaattcggcctgtcgtatgtcagccggaatgatatcgtgcgctataagctctatgaggaattaaaggaaaatggttataaaacgctctactcaaacacatatataccaaaagaagaattgtttagcaaagcatttgatatagagcatatcattccgcaggcccgtctgtttgacgactctttttccaataaaacgcttgaagcgcggcaagtgaacattgagaaaaaagaccgtacggcttgggatttcgtaaacgattgttatggttccgaaggggccgctctctaccggtgcagagtagatgagttgttcaataaaggcatcatatcgaaggacaagcataaatatctgttgatgccgggcgataaaattcccgaggatttcatcaatcgagacctccgtaacacccagtatatagtccgtaaggctttggaactgttcgaggattttgtgcctggcgtattggccacctctggggccatcaccagcagattgcgtgaagactggggtctcgtcaacgtgatgaaagaaatgaacctgcctaagtatgagcgacaaggagtagttgagacttgttcggatcgtgaaggccatgtgtttaagcgaattcaggattggaccaaacgcaacgatcatcgtcatcacgccatggacgcgctgacgatcgctttcaccaagcgggcttatattcaatatctgaatcatctcaatgcgcggaaagacgtgactagtcaagcctatgccatacaacaaaaagaaatggagtgtgacggagaccaccgttggcggttcaaatgtccgttcggtgatagatctagattccggcgggaggccatgagacaactcgaccaaatactcgtgtcgataaaatcgaagaacaaggtgcttacgccgtcattgaaccgctcgaagaaacggggaggatataacaggaaaatagaatggacacctcgtggcccgttgcataaagaaactgtatatggacgaatccgtcgttacgtgacgaagaacgtccgagtgggctcttcgtttacgcaggcggagattgagaaagttgcaaacacatgtttccgtagagcgttgttggctcgtcttgcagagttcggcggtgatccgaagaaggctttcacaggaaaaaatagtttagagaaaaatccgctttattgcgatgaggcacatacgcagaccgtgccgctcctggtgaagcttgtggagcttgaagaggtaggtacgatacggaaagaaattactcccgacttgaaagtggaaaaagtggtcgatcgccgtattcgtactttgcttgaagaacgtctcgccctgtatggtcaggatgccaagaaagcattttccaatttaggtgaaaatccgatatggctgaaccaagagaagggcatatcggtcaaacgcgtgacgattatcgacaaaagcgacgttgtatccattcacgagaaacgtgatgttgacggtcgcctgatgcacgatgaacatggacgaacgattccgtgcgactacgtgcagacgcagaataatcaccatgtggcgatcttctgcgatgcagagggaaacttgcaggaacatattgagacgttttttgacgtggttgaacgtgtccggcagcaacgcattgagggtcggaccgtggaagtaattgacaagaactacaagcgtgatgagggttggcggttcctcttctcaatgaaaataaatgagtattttgttttcccggatgagaagaccggtttcgaccctcggtctgtcgatttgatggatcccgctaattatgcgttggtcagtccacatttgttccgtgtacagaacctatcgtcgaaatactatgtattccggcatcatttggagacgaccgtcgaggacaccaaagccttgaaggacgtgacgtggaagcgggtgcggactttgggaaaattgaagaatatagttaaagtgcgggtgaatcacatcggacaaattgtggccgtaggtgagtattgactttatggaacagaaatatgataaagaagacactctattttggccatccggctcgtttgtcgttgagcgaaggtcagcttgttattgagaggcccggtgcagagaaagtgcgccgggccacggaagtgtggtttccggaggacaaagtcacacgtcctattgaggatataggcgtgatgatactcgataatcctcagttgacgctgacctcgcagttgatggaggctttgttggaaaacaattgtgccctcatcacgtgcgacgggcggcatctacccgtcggactgctgctcccgctttatggaaacactactcagaacgaacgcttccgtcaacaaatagatgcctcagtgcctctccgtaaacaattatggcaacaaacgatacgggctaaaatactcaatcaggcggttgtcctccgcgaagtcggcgtcgaaaccggttgcttggaagcctgggctcgtgaggtgcgcagtggtgaccctgacaatttggaggcccgggcggcagcctattattggaagtgggtgtttcgtccccgtcaaggcttcgtacgcgaccgcgaaggggattatcctaacgccctgctgaattatggctatgctattcttcgtgcagtgatagcccgcagtctcgtcgcaagcggcttgctcccaacattg

SEQ ID NO: 4117 - DNA, 3819 bp, synthetic construct
  misc_feature 1..3819: note = Synthetic
  source 1..3819: mol_type = other DNA
gaaagagaggaggcacaaagggatattgcatcctcgactgcggaaagccagaaagtaattgagatactaaaaggcgagcctttcttcctccagtttccgacacgtaacgacatcatccgttaccgcctgtaccaggaactggcacagaacgggttcaagactctttatagcaacacttatattcctaaagacaagttattctcaaaagaatttgacattgagcacataatcccgcaagctctcatattcaatgactcctttgccaacaagacacttgaatcaagacagtgtaatcttgagaaaggaaaggagacggcaatggattatgtcaaatcgaaatatgatgagaccggagtccagacatactgcgatagggtcaatggcctgattggcaagggaatttccaagacgaaggccaaatggctgctgatggagggcaaggatattccggaagatttcatcaacagagaacttcgtgacagtcagtacattgcaaagaaagcaagggagattcttgagtcacttgtcaaattcgttgtcccgacaacaggatctgtgacggcaaggctccgtgaagactggcagcttgtgaatgtgatgcaggagctgaactggggctcaccggtgtcagagaagacaaggacggacgcagaattccgttcatccaagactggacaaaacggaatgaccatcgccatcatgcgatggatgcgttgaccatcgctttcacacgtcgtcagttcatccagtatctcaatcacttaaactcaaaaattgacgttgtctcttgggacaagaaggatctggatcttagggattatgaccttgaagacatcaagttcggtaatctaagcgccggagacaggtacggcatagtcaaggctttgcaggacaagttcctttacaaggacggcgacgataagtaccgctttgtcccgccgattcctttggatgagttccggagacaagcgaaagaacaattgagcgacattctcatctccttcaaggcaaagaacaaggtctgcacaagaaacgtcaatgtgacaaagaacaagggaggggcaaacaggaagactcaacttacacctcggggaccgttgcacaatgaaaccatctatgggagcagtctggaatatgtaaccaaagaaaatgagaagatcggtagttcatttgacgccgaaaggattacgactgtctgcaagaaaaagttcagggaggcccttgcgcgaaggctggaagagtttggggaagaccccaagaaggcttttaccggcaagaattcgcctgaaaagaatccgatatgggttgatgaacatcattcggagcaggtcccggccaaagtgaggacagtgactatgggacagcggttcactggccgaaagcccattgacgctactctgaagatagagaaagtcattgataaaaggattcgtgagattcttcaggctcgtcttgacgaatttgacggcaaggcggcaaaggctttctcgaatcttgacgagaatccgatttggctcaacaaggagaagggaatcgcgatcaagagggtgactgtgtccggtcctgcgaatccggttcccgtccggttcaagagggacaaggatggcaagccaatcattgatgatgccggtaaaacaataggggctgattttgtgactcctggcaacaatcatcacattgccatattcagagattcttcaggaaagttgcaggagcatccggtatcttttcttgaggcgaccatcgccaaatctcatgggttagacgtgattgaccggaactacaataaagatgaaggctgggaattcttgttcaccctgaaacagaatgagtattttgtcttcccgaattcagagacggggttcaatccgttggattatgatttgacggatcctaggaattatgcggagattagtccgaatttgtatagggttcagaagatagctaccggggactactatttcaggcttcatcttgaaacgaccgtagaggataacaaggcactgaaaggaatcacatggaaacgtgtcgggccttctggtcttgaaggtgctgttaaagtccgcatagacaatctcggtagaatcgtagccgtcggggaatatgattaagcgcacactctatttcggaaatcctgcctacttgtcactgaaattaggtcagcttgtggtctacaaaccggcctccggtgaggaaaagaaggaagtagttaagactattccggttgaggacatcgcatcggtagtgcttgacaacaaacagatcacaattacgcaggctttattggagagtcttcttaaagagaattgcgcggtcataacctgcgattcctcccatcttccgaccgggctgatgctacctcttgacggacacacgctccagaacgaacgtttccgctcgcagattgacgcttcgcttccgctgaagaagcagatatggcagcagactatccaatccaaaattgtcaatcaagcagcggtccttgaatatgccacaggcgaaaagcatccgaatatgcttaaatgggcgacttgtgtacgcagcggggatcctgataatcttgaagcacgagcagcggcatactactggaagaatcttttctctgacaatatcagaggtttcattcgagggcgggacgaagatgccccgaataacctcctgaattacggctatgccattgtccgcgctactgtagccagagctttggtttgcagcggcctgttaccgaccttgggtgtccatcacagaaacaagtataatgcttattgtctggctgatgacattatggagccatatcgcccgtatgttgatttacttgtctatcagatagtgaaagaggaaggtccgttggagctaaacacatctatgaaggcaaggcttttgtccatcccgatgactgatgtcagaatcaatggggtgacaagtccgctgatgatagcggcgactaccacttccgcatcattggctaaatgcttctgcggagaatccaagcaggtcatatatccgatcttgcaatgactagctcagaacggataagtcagtatcgtgttatgtgggttatggtgttttttgatctgcctaccgacacaaagaaggaggttaaagctgcgacggagttccgcaagcagttgatgagcgacggcttcgtaatgttccagtattccatctatcttcgtcactgtgcaagtgcggagaatgcggatgtccacataaagagggcaaagtctttccttccgcccaaagggaaagttggaattctccgcataaccgacaagcagttcgccgcaatggaactcttcaactcgcagaaatcagaaagtcttccagaagaaggcatccagttggaattgttctgaaaacccgcacgcccaaatcaaaaaatccggcaaatgccggattttttgattcttgaacacctatcgtaagtcgttgtacctcatcgttctacacaaatcctgttgtgttcaaagaacgaatatacaaaatctgaaagcaattcacaaccctacaccggagaggagagggaaagcaaaagttgtgttcaaagaacgaatatacaaaatctgaaagcaattcacaactgatgaggagtcgggcggatatgccccgatgttgtgttcaaagaacgaatatacaaaatctgaaagcaattcacaacggcatccatgagcaaatttgccaagggagattgtgttcaaagaacgaatatacaaaatctgaaagcaattcacaacagtcctctgccattggctgccacatcgtcaattgtgttcaaagaacgaatatacaaaatctgaaagcaattcacaactaattctt

SEQ ID NO: 4118 - DNA, 3675 bp, synthetic construct
  source 1..3675: mol_type = other DNA
  misc_feature 1..3675: note = Synthetic
cacaaatgaaaataatgagagtataccaaacacaagtactgctgctttcatgatggtgtcttttcttgaagtcccttttgttcatcttcttcccactccaagatcaatgttgtccaccccatctgccatactcacatattataccacaagcaaaacttttatctcaataatgaaatcattcccctgtattcttgcacttatatcccaatagaagaattattcagcaaaaaattcgaaattgagcatatcataccaaaggcacgcttgtttgacgactctttctcaaacaagacgcttgagacaagcggagtgaacaaagacaaaggtgatatgacggcatacgatttcgtggccatgaaacatgacgaaaaatatctggccgactatgaagcacgcgttaatgaacttttcaagcagaagaaaatatcaaaagcaaaaagagacaaactgcttatgagggaggccgacataccgaaagatttcctaaaccgcgacctcaatgacacgcagtatattgcaaagacggcaagggaaatgctcgaagacattgtgccggaggtgctaaccaccacagggaaaatcacgagcaggctgcgtgaagactggggactggtggatgtgatgaaagaaatcaactgggacaagttcgacaaactcaaaatgaccgttacggaacatgaccgcgacgggaggccgataaagcgtatcatggactggacaaagcgcaacgaccacaggcaccacgcaatggatgcactgacgatagctttcacgaaacgggcaattatacagtatctcaacaatgtgaatgcaaggagcgacaaaggaagcagcatatatggaatagagaagaaatatatgaaacgcaacgagcgcggaagactggttttcgttccgccaatgccttcaggcaagttgcgtgaagaggcaagacggcaactcgacatgatacttgtatccgtgaaggcgaagaacaaggtggtgacgaagaacatcaacaaaacaaagaaaaatggcggggtgaacaaaaaagaacagttgacgccgcgtgggaaattgcacaacgaaacggtatatggaaaaatatcacgctaccaaacggaaatgaaaagagttggggggagtttcaccgaggatgtcgtactgagtgtggctgacaaacgtatacgggaggctttgtatgaacggctggcagagcatgacttcaatcctaaggaggcattcaccggcagcaactcgctcacgaaaaaacctctgtggcttgacaaggaacattccagatgtgtgccggaaaaagtgaaaacagttatactggaaccaatatgcaccataaggaaacctgtggataaagatttgaatatagacaaggtggttgatgtcagggtgaaggaaatccttaagcaacgcctgaaggaatatggcggtgtcgcagccaaggcgttctcaaatcttgaggaaaacccgatatggcttaacagggaaaaaggaattgccataaagagggttaagatcttggacagtaaaaacaatgtcgcaatacacggcaagcatgacattgcaggcaggcccatgcttgacgaggacggtaaacctgtggggaatgactatgtaaacacttcaaacaaccatcatgtggcaattttcacagatagtgaaggaaacttgcaggagcatgtggtgtcgttctacgaagcaacggcgatggcaatcctcgggtatccggttgttgaccgtcagtataataaaggtctgggatggaagttcctgttctcaatgaatcagaatgagtatttcgtattcccgaatgaggcggaaggatttgatccaaatgaaattgacttgaccgacgaaagtaacgccgcaataatatcacggaacttgttcagggtgcaaaaattctcaaagggggattattttttccgccatcatttggaaaccaatgtggaaaccaacctgaagttgaaaaacgtgacatggaagcgcataacgcgtcttaatgatttgattggtgtcgtaaaggtgcgtgttgaccacattggtagaatcgtgtatgtcggggaatattaaaaacatattgccatgataaagaaaacgttgtgtttcagcaaccctgcctacttgtcgttgcgtgacggacagttggttattaagatccccgaaatacagaacagcaagggagtcctggaggaactgaaagaaaagtcggtaataacacgcccgatagaagacatcggcgttttggtaatagacaacaggcaggtgacaattacgagtgctgttctcgatgccctgcttgccaacaactgtgcagtgataacatgcgatgcacggtcgatgccagttggactgcttctgcctctttacggcaacaccacacagagcgaacggtttcgtgtacagattgacgcatcgcttccgctcaagaaacagttgtggcaacagactatacaatataagataattaaccaagccgccgtactttcggaatgtactgacgccgagacgcattgtatgaaggtgtgggccgcagacgtaaggagcggagacccacaaaacgtggaggcaaaggctgccgcatattattggaaaaacattttccgtgacgttaccggtttcatacgcgacagggaaggcacgccaccaaacaatatgctcaactacggatatgccatactgcgggcagtggttgcaaggtcactggtttcgagtggcttgctgccgactttaggcattcatcatcacaataggtataacgcgtattgcctggcagacgatattatggagccttaccgtccttacgttgaccgtctcgtggtcaacatcatggcacgttacggacatgacatggcacttaccagggaaataaaaatgcaattgctgtcaatacccaccattgatgtaaaaataggaggaaaaagaagtccgctcatggtcggcgtttcgcagaccacggcatcactgtacaaatgcttcagtgggaagtctcgtaaaatatcatatcctgaaatgtgaaaagtgaaagaataagtgaatatcgggttatgtggctgatggttctttttgacttgcctacagagacaaagcgtgacatacgcgcctattctgttttcaggaagaacttgatgaaagatgggttcacgatgtttcagttctccatttacattcgtcattgcgcaagcatggaaaatgcagaaatgcatataaaaagagttaagtcattccttccggagttcggaaaggtaggaattatttgcataacagacaagcaatttggtaacatcgagttgtttttcggcaaaaagacatttgcaccaaatgcacctgggcaacaattggaattattctaagaatggggattccattgctaaaaatgaaatccccatcctttatcgcacttttttatttctgattaataccataactattttattatcagaagcatactgcatatctgttgttaatgcaagtgcaaagatactaatttttaagcaaatcacaacagtcatgcagggtttccatttcgggagccggttgttaatgcaagtgcaaagatactaatttttaagcaaatcacaactccgcaggacatagaagcagtcctccgccggttgttaatgcaagtgcaaagatactaatttttaagcaaatcacaacaaaaagagatgatttaatttt

SEQ ID NO: 4119 - DNA, 3290 bp, synthetic construct
  source 1..3290: mol_type = other DNA
  misc_feature 1..3290: note = Synthetic
ttacaaactttatgaagagttgaaagataatggatataaaacattgtattccaatcaatatatacctaaagaaaagattttcagtaaggagatagatatagaacatattattccacaatcccgtctttttgatgattctttatctaacaagacattggagtataaggctattaatatagaaaagggaaataagaccgcttatgattttgtaaaagaaaaatatggagaagaaggcttgcaacaataaatcgttgcgaaagcttgttcaatgacaaaaaggcgaaacttcggaaattgaaaatggaacagaaggatataccggatggtttcattgatagggatttgagaaatacacaatatatagcgaaaaaagcactcgctatgttgaacgaaatctgccgtagagtagtggcaactaccggttccattacagatcaattgcgtgaagactggcaattggtggatgtaatgaaagaactgaacctgcctaaatatgaagccttgggttttgtggaaacatacgaagataaggacggaagaaaaatcaaaagaataaaggattggacaaaaaggaatgaccatcggcatcatgcgatggatgcgctgacggtagcttttacaaaggatgcgtttattcagtatttcaataataaaaatgcggcacaagattcaggcaatagaaaccatacgaatataataggtatcaagacccgttattttgacaaaggaagagctttgcctcctattccattggagcaattccggatagaagccaaacagcatttggaaaaactgctggtatctattaaagctaagaacaaggtggtgactgtcaatgttaatcgaacaaaaaagagaaagggtgaaaatacgaagatacagcaaactccgcgaggtcagttgcatttggaaacggtttatggtagtcacaaacaatatgtgacaaaaatagaaaaggtgaatgcttcttttgatgcggctaaaatagcgactgtgagtaaacgggcttatcgaaatgccttacttaaacggttggaaacattcggtaatgatccaaagaaagcatttacaggaaaaaatgcattggaaaagaatccgctttatgctgataagtatcagaccatacgagttccggagaaggtacaaacagttgaatttgaaactatttatactatccgaaaaccggtcgatcctgctttgaatgtggataaagtagttgatgtaaaggtacgtgctattttagaacggcgtttgaaagaatacggtggagatcccaaaaaggcatttgttaatttttgggaaaatccgatatggctgaataaggaaaaggggataagtatcaagcgggttagcatccgaggaatcaataatgcccaatcgatacacgtgaagaaagataagaatgggaatccgatatgggatgaaaatggaaaacaaatccctgtggattttgtaaataccggaaacaaccatcatgtggctatttatcgtaaacctgttttagacaagaaaggacaggtgacgtttgatgaggatggtaatctgatgtatgaactggacgaggtggttgtccccttctttgaggctgtaacacgggctaatttaggacttcctattattgataaggattacagaaaaagtgaaggttggcaatttttgtttagcatgaagcagaatgaatatttcgtgttcccgaatgaaaagacaggcttcaatccgaaggaggtggatttgttgaatccggataattatgcaatgattagtccgaatttatttagggtgcagactatgtcaaaagttatgtatggaaataatgttgttcgagattataaatttagacatcatttggaaacaacagtgaaagatatgaaagagttgaaagatattgcttataaacaatataaaacactttcttttggtaatagtgttgtcaagatccgaattaaccacattggacaaatagtatcagtgggagaatattaatagtatctattagaaattgaaataaatagggtgtatgctattctcaaaaaggttgtaccctttttagaaacagacttttatactgattaatagtaatttaaaatctaactgcttatgatcaagaaaaccctttattttggaaaccccgtttatctgtctctgaaaaatgctcagttgatgataaaattaccggaggtagtcaggaatgatacgttacctgaaagtttcaaacgaacttcagaagtgacgaaacccattgaggatattggagttgtggtactggatcacaagcagatcaccatctcttcgggcgtgttggaagctttacttgaaaataattgtgctgtcattacatgtaacagtaaaagtatgccggttggtttgatgcttcctctgtatgggaacacgacgcaaaacgaaagattccggcaacagttggatgcctctctaccgttaaagaaacagctttggcagcagaccataaagacgaagattgaaaatcaggcagccgtattgaaagaatgttctggcgcagaagtgaaatgtatgtacgcatgggcttcggatgtgaaaagcggagatacgagtaacctggaagcccgagcggctgcttattattggaagaatttgttttggatagaaggtttcacaagagacagggagggcattccgcctaacaatttgttgaattatggatatgctattctgcgggcggttgttgctcgtagcttggtggcaagtgggcttttgcctactttaggaatccaccatcataatcgttataatgcttattgcttggcagatgacatcatggagccttatcgtccgtatgtggatcaattggtctgtggtatcataaagcagggagtggattatgcggaactaacgagagagttgaaagcgcagctgcttactattcctgtgctagaaacttatatgtcaggaaaacgtagtccgttgatggtggctgtcgggcaaactacggcttctctgtataagtgctttagtggcgaattgcgtagaatctcctatccggaaatgtaatatggatcggtttagcgaatatcgtgttatgtgggtacttgtgttgtttgatttgcctaccgagacgaagaaggagaaaaaggcgtatgtggatttcaggaaaaatctacaaagagatggatttacgatgtttcagttttctatttatgtccgccattgtgctagtagcgagaatgcggccgtacatgtaaaaagagttaaatcttttcttccggagcatgggaatgtcggaatcatgtgtattacggataagcagtttggga

SEQ ID NO: 4120 - DNA, 23156 bp, synthetic construct
  source 1..23156: mol_type = other DNA
  misc_feature 1..23156: note = Synthetic
aaggcagtgcaaagcggtgcagcaggggtggacatgggaagaaacatctttcagtccgaggacccggtggccatgattcaggccgtaagggccgtggtgcaggagggcgccagcgcccagaaggcctacaagctgtttcagagcctgaagaggaagagggggcgcaaatgagggcaaggctgcgctttaccgaggggcttcagttcgtgggcttcagcgagaccggccatgccgtgctcatggacggcgaccctgaggcagggggcgaggactccgctcccaggcccatggagatgctccttatgagcctggggggatgctcgggcatggatgtggcctccatcctgaggaagaagaggcaggccctgagcagcctggaggtaaaccttaggggcgagagggcccaggagcatccccggcgattcctcaagattgaggtggagttcgtagtgcggggaaaggacataaacgaggaggctgtggccagggccgtggagctctccatgaagcgctactgcgcggtgaaggcctccctcaatgccgaggtcaaggccagctacaaaatcctcccggagtgaaaggccggttcataggatacctcctccgccatgcggccaccctgtgcgtggtgggctacctgcccctggccccgggcacctttgccagcctgctggccatgatgctggtgttcgtgtttcagccctccaagggggtgctcgtgggggccgccgcactccttaccctcctgggccttcctgcctcccgggaggcagaggccaggctgggctccgacgccaggcacatcgtgattgacgagttctccggtttcctgtggtgcgcggccttcatccccttgacggtgggccacctgacgggggccttcgtgctcttcagggccctggacatcctgaagcccccgccccttaggcagattgaaaggctccccaggggcctgggcgtcatggccgacgacctggccgcagcagccgtcaccctggggttcatccatctatggaagatactcttttagaggccgccaggaggctccaccacaccctcaaggccagggggctgagcctctcgggggcagagtccttcacaggcggcttcgtggcccacctcataaccgccctgcccggggcctcggagttcttccactgcgccctggtgctttacagcccccaggcaaaggagaggctcctgggcatcaagagagaattcctccaggagcatggagtagtgagcgaggccaccgccgggcagatggcccgaagggtgcggaggcttgcgggcacagccctggcctactccagcactggaaacgccggccccaccgcccaggagggcaaacccgtgggcctggtttacctgggggtggacggcccagggggaaccgtggtaagggagctccacctgaagggccagaggggagaaatcatccagcaggcaaccctggagctcctcaggatgctcctgcaggaggcctccggatgagcagggccgataccctcaggtgcttcatctccgtggagcttccccctgacctcaggagctccctctatcgggccacctcggcccttagggagagctgtagccgggcccgctgggtacccccggaaaacctccacataaccctcaagttcctgggcaatgtgaaggcccgggccatccctgggctcgtcgccctgctcaaggagcacctggccccctttgcagccttggaggtggagctacaaggtgcaggggccttcccctccccccagcgccccagggtggtgtggctgggagtaagggagccccgggccctccaggccctgcagcaggccgtggaggccgcagcccaacaggccgggttttccccggaagaaaggccctttgtgccccacctcaccctggggaggctcaaggagccccgggcatgcccttccctaagccagagcctctctacccttaaggaggccccttttggtaagataagggttgacagggtctgcttgatgcaaagcaggctgagcccccagggggctcaatacagcgtagtggcccagatacagcttaaggggggaaggaatgaacaaggacaggtctaaagccctggagatggccatagcccagatagagcggagctttggcaagggagccattatgcgcctgggctccaaggaggtggccgaggccgtacaggttatacccaccggctccctgtcgctggacatagccaccggcgtggggggcttccccaggggccgagtggtggaaatctacggccccgaggcctctggaaagaccaccctggcgctttccgccatagcccaggcccaaaaggccgggggcgtggccgccttcgtggacgccgagcacgccctggatgtagcctatgcccagaggctgggagtgaaggtggaggacctgctcatctcccagcccgacaccggggagcaggccctggaggtggccgaggccctggtcagaagcggcgccgtggacatcattgtgatagactccgtggcagccctggtgcccagggccgagattgagggcgaaatgggcgacagcctgccgggccttcaggccaggctcatgagccaggccctccgaaagctcactgccgccatctccaagagcctcaccacggtggtcttcataaaccagataaggatgaagataggggtgatgttcggaaatcccgagaccactacgggcggcaccgccctgaagttctactcctccctgcgcctggacatccgcaagatagagaccctgaagggcaaccaggagcccgtgggcgccagggtgagggtgaaggtagtgaagaacaaggtggccccgccgttcaaacaggcggagtttgacatatacttcaacgagggtatttccagggagggcgagctggtagacctgggcgtggcccacggggtgatagaaaaggccggggcctggtacagctacgccgggcagaagataggccagggcagggacaacgccaagcagttccttaaggccaaccccaaggtggcccaggagatacaggaaaagctccttcggcagataagacagcggtaggcagatggccgcagagattgacataagggccctgctcaagaggacggtggagctggggggttcggacctgcacataaaggtgggcacccctccagtaataaggatagacggcaagctcaagctcctggatgcctcggtgcgcgtcatgcccgagcaggcggtgaagctggcctccacggtgatgagcccggcccagaaggagaccttcaagcgagaaaacgaggtggacttcgcctacagcgtgcccgggctgggcaggttccgctgcaacgccttcatgcagcgcggcagcatagggctggtcttcagggtcatccccacccgcatccccaacatagaggagctcaacctgccccccatactgaagaaaattgccctggaggagcgaggcctggtgctggtcactggcaccactggaagcggcaagtccaccaccctggcagccatgatagaccacataaacaaccacaagaccgtgaacatcatcaccatagaagaccccatagagttcctgcacaaggacaaaaagagcatcatccaccagagggaagtgggggccgacaccaagagcttcgccaaggccctcagggctgccctgagacaggaccccgatgtcatcctggtgggcgagatgagggactttgagaccatccagaccgccctcatggccgccgagaccggccacctggtgctgagcaccctgcacaccctggatgctcccgagacggtcaaccgcatcgtgtccttcttccccccctatcatcaccagcaggtgaggctgcagctgagcaccgtgcttaagggcataatctccctccgcttggtgcccagggccgacggcaagggccgggtgccggccgtggaggtgctggtcagcaccgccacggtaagagactgcatactggaggccaagaagacccccctgcttccggatgtaatagcacagggaaagctgcactacggaatgcagaccttcgaccagtccctctttgagctctaccagaaggagttcatcagcctggaggaggcccttaagtgggccaccaaccccgaggacttcaagctgaaggtcaaaggcatacaggccacaagtgagatggcagcagagcagcagaaacccccggacgacttcaccatcgagaggttttagcctcctgaggaatgtcccaggccctccgctacgccctgaagctcctgtcctacagggcccgcagtgcccatgagctaagggaaagactcctgaggaagggctttgacccccgggaatgcacccgtgccctggaggaactggagcgcctgggctacctggacgatgtggccttcagccagtacctgctgaggcactgcatggagcggaagctcctgggccttcagggcgccctgaggtacatgcagcagatgggcctcagccgagagcttgcagaggcggccctttctgggtatgatgagtgggtgcccctgagaaggctgctgaggaagcgccgcagggcctggcacacggtggagcccccggtgcgcctcaggcgcctgaggcagaccttgcagaggaggggcttttcagcacaggccatacgaagggccctaaaggaggcagagcaatgaggtggtggctgacggttgcggccgtcctgctcttgggatgcactccgggggtgcgctactcccccggggagatacaggcctacccaccccatataagggagcacataagggccggacaggtcaccccgggcatgagcccccagcaggtgcgctacgcctggggggccccctcggaggtggaggtcctggaaccctccagagaaggccagtcccgggaggcctggacatacaagaagctccttttccgcaccaccgtgatattcacaggcggcgtggtgacggaaatcatctccacatcgccaggggcaaggaagtacatcatccctcgggagaagccatgaagagccaggaggtgaggcagagctttctggagttcttccgccagcgggagcaccaggtggtgcccagctcccccctggtgcctgcccacgaccccaccctgctctttactaacgcgggaatggtgcagttcaaggccgtcttcctgggccaggagagcagaccctacaagagggccgccagctgtcagaagtgcatgcgcgcaggcggaaagcacagcgacatagagaacgtgggctttaccgccaggcaccacaccttctttgagatgctgggcaacttctccttcggcgactacttcaagcgccaggccatagagtttgcctggcaactccttacagagcactacaggctgcccaaggagaggctctgggtctccatatacgagcaggacgaggaggccttcggcctgtggcaggagctggccgggctgagccccgagcgcatagtgcgcctgggggccaaggacaacttctggcagatggccgacacagggccctgcggcccctgctcggagataatcatagaccagggccccgaggtgggctgcggaagaccctcctgccaggtgggctgcgaatgcgaccgcttcctggagctgtggaacctggtgttcatgcagtacgaccgggacgagcagggacagcttcatcccctgcccgcccccagcatagacacgggcatgggccttgagcgcatcaccgccgtgcttcaaggaaagaccaataacttcgacacggacctcttccagcctatcatccaggccctggagggcctctcgggcctgcgctacggccaggacagggccaccaccacctccatgcgggtcatagcggaccacatgagggccatagtgtttctgctctcagaggggctcatgccatccaacgaggccaggggatatgtcctccgcagggtcatccgccgggcctcacgccacgccctgaagctgcagatggaaggcccggtgctttacaggctggtggaggcagtgctggaggtcatggcctcgccctaccccgagctacaaagggaggcagagcgcaccaggaaggtgctccgcttcgaggaggagcgcttcgccaagaccctgaagcagggaatgcagatactgggagagctcattgcccggctcaacaagaccgggcagccccagatccctggggaggaggccttcaggctctacgatacctacggcttccccctggacatcctcagggacatcgcccaggaagaaggcctggggcttgacgaggagggattccaacaggccatggaggcccagagggagcgggccagggcctcctgggtagccgaagaggccactgccgccgccatctacagggagcttcactcggagctgggggacaccaggttcctgggctacgagaccctccaggcccaggtgctggtgagggccatcctgaaggacgggcacaccgtggaggagctccaggagggtcaggaggctgaagtcttccttgaccagagccccttctacggggcctcgggcgggcaggtgggcgacacgggaaggatgttctcccaggaggtggagctcctggtgctggatacgaagaagcccctgggaggcctcctggagcacagggtaaaggtgctgaggggcaccctgagggtgtggcagaggcttactgcccaggtgcaggaggcccgaagggcctccatcatgcgaaaccacactgccacccacctcctccatgcggccctcagggaggtgctgggtgagcatgtaaagcaggcaggctccctggtggagcccgaaaggctcaggttcgacttcacccatttctccgccctgagcccaggggagatacagaaggtggaggaactcgtaaacgagaaggtgctccagaacctcccggtggaggtctcccacatggggctccaggaggccgtgggcaaaggcgccgtagccctgtttgaggaaaaatacgccgagaccgtaagggtggtctctatccccggggtaagcatggagctctgcggaggcacccatgtgcaggccacgggccagataggccccttcatcatagtctcggaaggcagcgtggctgccggcatccgcagggtggaggccctcacgggccaccaggccctaagggagctccagagggacagggaggagctcaaagccctcagggagatgctcaagggccaggagcccctggaaggagtgaaaaagctcctcaaggagaagaaggagcttcaggagcaggtctccgccttaaaggtaggcaccactgcccgggccacgcaccagcgcaccgagaaggaactgcagggggtcaaggtggcggtgctgaacacccaggggcttgagcccagggagctccgcagcctggccgaccgggagcgctccaggctgggcccccacggggcggtagtgctggtatcaagagcggagggacaggcccatctgctctgcgccgtctcaaaggagctgagccatcgcctcaatgcaggggagttcatgaagcactttgcctccgccgccggcggccgaggcggcggaaagcccaccctgggacaaggaggcaccagagagttgaagcgtctggacagcgccctcgccagggtatacgatatcctcaaggagatgctggatgccgacaaaggtgccagggagtaattcactaaggaggaggtgcttgaagcatgccaatctttgacatcgtgcgcagggccatgctggctggcttcggggtgcaggagcgggtcaaggagttcatagacgagctggtcaagaaaggagaactcagcgagtcccagggggccaagctggtcaaggaatggaccgagcgggccgagaagagcaccgcggagctcaacaagaccctcaccgagctggtggagaagaccctccagaggatgaaccttcccaccaaggccgagatggaaaagctcaacaagaagctccagaacctcagccagcgcctaaggcgcctggaggaggccaagggccaggcagaggagccagaggagtaagggcagagaggcttgagcttcctcagggccgccaggacataccgcaccgccaggaggcttcagcagatagtgaatgtcctgctgaagcacggcttcggccaggtgatagaccagattcacctgggccgctacattcccttccttcagcgcttgaggaccttcggccagtggcccccgctgaaaggccctgcggtgccggagcgcctgaggatggccttcgaggagctgggccccagcttcatcaagctggcccagatactctcctcccgaccggacctcatcggggcccgcttcgccgaggagttcaagaagctccaggacgaggtgccccccttccccacgccccaggccaaggccatcatagaaagggagttgaggctccccattgacaaggtcttcaaggagttcgaggatgtccccatggctgcagccagcatagcccaggtgcacggggcagtgctggccgacggctcggaggtagtggtgaaggtgcagcgcccggggattgaacagaccatccagacagatatagaaattctcaccaccttggccaggctcctggagcgctacctccctgaaagccgattcttcaaccccacgggcatagtggaggagttctccaagaccgtcaggaaggagatggacttcatagaggaggcccgaaactgctgccgcttcaggcgcaacttcgagggccacccggatgtgtacttccccagggtctaccccgagttcctcaccgaaagggtcctggtcatggagcgcataaggggcgtaaggattgatgacataaagcgcatcgaggccctgggctatgaccgggcggccctggccaagacgggcgtggatgcctacttcaagatgattcttgaagacggtttcttccatgccgacccccatcctggaaatatctttgtcactcccgacggtagaatcgccttcgtggacttcggcatcgtgggcagggtctccgaggagctcaaggagaccatggccagcaccttcctggccctgctgcacagggactttgaccgcctcatagacaactacatagagctgggcctggtgcccgaggaggtggacctggatgtgttccgcagggagttcaaggcagacctcgtggagtttctggagcccctttacggccgcaccttgggggagatcaacttcgccgagtacctggacggcctggtgcacctggccctcaagcacaacatgcacattccctccgagctgctcttgatcaacaaggccatgctgatactggagaacctggggcttcagcttgaccccagctttgacttcgtggccgcctccgagccctatgccgccaggctcctgagaaggcgcctgagcccccagaggctgtacaagcgcctcagcgaggaggcctacgagatgggggcctttgccttccagctgcccaggcagttgagaaagctcatgagaaaactcctcagggacgacttccacatgaagctcacccacctgggcctggagcacctcataagggacatggaccgctcctccaaccgcatcgccttcgccatggtggtaagctccttcatcataagctccgccatcatgcacgccacgggcgtgggccctaccctgcacggcgtgagcatcctgggcctttcggcctttgccctggcagtgctgctgggcatctggctacttatctccataatccgctcgggaaggctctgagcagtagaagcagcagaggaggttgcaaccggcctcggccttcccataatataggggcaaaagcggaaagcaaaaagcgaggcgcctgtcatgccttgtatcctgctcatcgggcagtgaagcctttgttgtcaagccccagcctgaatagccaaaattaattaggcccgccactgggacgggcctcagggggccccgtagggccacgccttccgagacggttgcgtctcttactgagacttgtccaacaaccgccgctcaagtacaatctaattaaaaaatgacacattcctttagttttgtcaagaaaggagttgccatgaaggatgaagatttgattttaggtctggatttgggagccaattccctgggctggtcattgataagagggcagaagagcttagtagcctggggcgtgaggatttttaaagccgggcttgaagatatgcaggtagacggaacgggaaaaccccctaaccaagagcgaaggcaggccaggctcaggcgccgacaggtagagcgccgtgcaaggaggctggcccatgtagctcggctccttcaacgctctaagctcctgccgccgggggacatagaggctccccagcagcggcatagcctctttagcaacctggacagccaccttatgagcgacaaggagcgcctcagggacctcggtgcactggatgaaaatgggctccgggaaaaactccaggcaggcccttgctatctcctcagggctgctgccttggataaaccactcaagccttatgagctgggcagagccgtctaccacctggcccagaggagagggttcctgagcagtcgaaaggcccttaggaaagacaaaaaggaggagggaaaggtcaagaaggggaccactgaacttcaaaagaatatccagcaggcaggctgtcgtaccttgggtgaatacctttacaaggtggctcctgccgaacgcctcagggagcgctacacttccagggccatgtatgaggaggaatttgagactatctggaaagctcaagccccatatcatcagggcattcttaccgaggagcttaaagagaagctccaccacgccattttccaccaacgccctttgaagaggcctcaggtgggcacctgccagctggagccgggcagacccagagccccctgggccctccttagcgctcagcgctataggttcctgcaacggctcaatgacctaaggataatggacgatggaggtcaacaacggaagctcactccggaggagcggcagacccttataaaggagcttgagcgtaaaagagagctcggatttgagaggataaagaagctcctgagcctgcctcaggactacagtttcaacctccagcgaggaggggaggaaagacttctgggaaacagcacagccgcctcgctgaggaaaatcttcacccccagacgctgggacgccctctcccatgaggacaaagaccgcgtggtggaagacctcctgagcatagagaaggaggagactcttaaacgccgggccgtgcgccactggggccttaccgaggaggccgccgaggaactctgccagcttgagctggagaaaggctactgcagcttcagcagaaaggccctccggaagctcctccccctcctggagcaaggcacatccctccaggaggccataaaagagctctacccagggcacaaaagggctcaagagggccgcgacctcctgccccctgtacgggaagccctgagcggggtgcgaaaccccgtggtggagcgctccctcacagagctgagaagggtggttaacgcccttatcaagcgctatggaaagcccgacatcatccgcattgagcttgccagggagctcaacccagccaagaggcgtaaggacatttggcgtcgcatgcgccagcaggagaaaaggcgcgaggaagctgccaataaaatcgtccaggaggcgggcattcagaacccctcccgcagggacatagagaaatacctgctggccgaggagtgcaactggcgttgcccctatacaggcagaggcatcagcctgagcgccttgctcggcccccagccccagtttgatgtagagcacatcatcccttacgaccgctgtctggacaactcttttctcaacaagaccctctgccatgtggaagaaaaccgccgcaagcacgaccgtaccccctgggaggcctacgcccacaacccggaacgctaccaggaaatactccagagggtaaagaccttcaggggcccggcagcaagggaaaaactcatgaggttccagcttcacggtgaggagcttgaggagttcatcgagaacttcaaggcccggcagctcaacgatacccgctacgccgctcgcctggccatacaatatctgggcctcctttacggaagccccgagggcatagacccagaggggcgtcgccgggtccaggccgtcccggcagggcaaatagtggctcagctcagggatgcctgggggctcagccgtctgctgagtagcagtggcagcaagaccagggacgaccaccgccaccatgctgtggacgccttggtggtagcccttacgaccccgagggaagtaaaggccctcagcgaggcagccaagagagctaaaggccgaggtcgcctcctgagctacatgcctgaaccctggcgaggattccacgaccagctggcgaaggccctccagcacttggtggtctctcacagggtctgcaaaaagcttcgtggggccctccataacgaaaccttctatagcaaccgggtggacaaggagggcaaattcaccgtgaagcgcaaacctctctgggagctttcaggctcggacattgaacgcatcctggacaaggcggtacgccaagcagtggaggagaagctccgctcccttggcatagacaccaagaaagacaaatttaagaaggtcaaggctctccaggacaacccccctgtgctcaagaacggaaaacctgtaaggagggtgcgcttcagggttaatctggaggtagtgcctataggctcaggcccccatgtgcgccatgtagtgcctggaaacaatcaccatatggagattgtcctggaccaacgcacaggaaaatgggaaggccatgtggtaagcctcctggaggcgacaaaaagaaagaaacagggcctggaagtggtaaagagggaccacggagagggcaaaaagttcctcttctctatagcccccggcgaggtactggaaatggatacccccgagggtggcagaggcctttacagggtgcgtaccgtgcctcagaacaagcaactttacttcgtccccatatacgacgcccgcccagtaaagaaaataggcaagaagggattgactgcgcaccccgatactttgagggagaagaactgccagaaggtggtcattacccccttgggggaggtgcgctacgccaatgactgaggagcgtatcctggacatcaccgaggcccccgcgaagttgaccataagacatgagcaactggtagtgcagtcccggggacgaagcaccagcgtacccctctcagaggtggcagtgctggtggtgtcccaccccggagtaagttatagccacgccgtgctttcagggctgtgcaccagcggcggggtgatggtgctctgcgacaccgtccatatgccggcagggatgcttcttccccttcgaggccactatgtgcagtccgaacgcttcagggcgcaggcagaggcctctaagcctctaagaaagcagctctggaggcgcctgatacaggccaagataagggctcaggctctggtactcaagacactcaggggcacagacaaagggctttcagccttggcctggaaggttcgctcaggcgacagcaccaatgtggaaggtcaggcctccaggcgctactggcaaggcctctttggaggagaatttgtgcgcagtcccagctccctggagcagaccaacatgtttcttaattacggttatgccgtcctcagagccgtcgtagccagagccatatgtgccgcggggcttcaccccagcttggggcttcaccaccacaaccgctacaatcctttctgcttagcggacgacctcatggagccccttcgcccccttgtggacagaaccgtagcgaccttgcttgagcagggccctcagtcccttaccgcctttaataaaaggctcctgctccaggggataactcaaagccgcctgctccttcaagaccaacagcggggcccctttgacgctgcaaccagaatggcttcctccctggccagatgctttcagagcaggactcataccctcttgttggtgcctcaactgacggagccatgagcccggtaccctctccctacacggccatgtggttgtttgcaatgtttgatttgcccgtaagcacccccgagggacggtatcactataccaaattcagagagtttcttctcaaggaggggtttataaagatgcagttttcagtatatgtgcgctactgctcaagccgggaaagaacgcaggccttcaagcgccggttgaaaaaggcccttccgccaaatggcgaggtgcgtctcctggcagtcactgatcatcagttcggctccatggaagtcttcagagggaaaacccgcgtccccccagagaaggccccccaacaaataatgcttttttgaactctgaaaggcatttgccccttgtaaatcaaagacttacaaggggcagattgtacttgagcggattttgttgtcaagccccagctaagcggacatgagttgctcccacttggggattgtacttgagcggattttgttgtcaagccccagccgccaccagccacggtaataacccttatctattgtacttgagcggattttgttgtcaagccccagctgccgaagtgctgcaaacaccgccaagctgaattgtacttgagcggattttgttgtcaagccccagccccagcttgcttctgaggcaacgcatcagattgtacttgagcggattttgttgtcaagccccagcagtggacggcccagctgaactgctacgcctattgtacttgagcggattttgttgtcaagccccagcgccagaaggtagataccggcaggctgtacgattgtacttgagcggattttgttgtcaagccccagcctgctccttgctgatgagctcaacctcggtatattgtacttgagcggattttgttgtcaagccccagcgaacaggcctcacgaaaaacgcctgcttcttcggcctcgccgctttccggcccgctcccttaacgcccttgccatcagcaccttcagcaccgccggatggctcggcagggtcagcagcgcatacccgtacctcagcgcatccagaaaaatccactcggtagcaggacacagcagtatcaccgtcggtccagacttcacccgcatcctctccagagcgccgagcacttcctccgctgcatcctcccctgcaaccaccacgtccgccctctccagggcctttcgcgaagcccgccttgcacaccttacctccacgccccgcacggccgcaccgctggcaacacgcctcagaaaggcgttgccagacactatcagcaccagccgtgccatccagacccgcttctacgccgctgcctccactgccttcctccccgtgagcttctcatacaacagcgctttctccttcaggcgccctatcgggaacaccgcaggaatggtctcagaccccatgtagaacctggaacgccccacctgggctatgggaaaccccagcatcctcaacagacggtagaacctcttgtcagcggacatgaacaggtgcgtaagctgcaggccttccgcctcggcaatcaccgccccgcacagacccagggtgatctcatgacgcttgaaccgagggtgtggcggaaccacgaaccttgagacctcaccgtagccccctatcctgccatgcgccgcctcgatctgctgccagggctgcagggcaaagtgccgctgcacaggtagcggcagctcacccgacagaatcagccgaaccgttcctacaacctgctgctcgccatcgtacgccaggaagcttacagcctggaatacgtcatactcgtccatctccagcccgccgggacagctgtcctcggacacccaccccagctcgcggcacatgacctcataacgcagcctgtagcaggccctgaggctttcctccgaacgcgccacctcagccctcaaccctcccgacatagctcaccttcctcccgaaatccagaggcgcaggatagcgcccatgttcaaacacccttaccttgacgggtagccccgcaaaggcctttcggaacccctccctgaaggccccgacccgctgcccgggcttcagctgaatccagagcatggtgacgcccccctcctgctgcagccgaaaagcccccgtaacagccgccgccaggtcaaaggagctgtaaagcacctccttgacctgctctggagaaacccctccggcacgctcagcccggccgaaatgcgccagcaggggcaggcccccctcgtccagaaagggcatgcgcccgtgcctgtcaagaacccgattgacctccttgcgaaccagaagcattcccctgtcgccgctccgatacctcaccaggggcagcagccgctcctgcagcgtggtcagcagcaggaacccaggctcgccacccttgccgagcacctcaacatgcacctccgaggggctgtagcagaagatcagcggtgcaacctccgactggccaaaaagcgccttcctcagagcctcatcctccgccagcattgcccgcaggaccgcggtctccacggtctcccagaagtaggtcagccccagctcggccatccccagatgagaaaacacccgcccggcgcccaccaggctttccaggtagttcctgtagctctccgatatccactcgccgcccaccagcaccttcagcggcatctgctcccacactatatcgtcggcagcaccttcctccaggagcgccttgagaaacagtggttcccctaccaggatcacctgctcaaactgcaccccgaactcctccagcgtagccaaagccgagtcaatcctcacgcccacgggcactaccgtggcaaccgagctggacagcggaacggagcctggcagcaagttcagcagaagcgtcttgcgacggccggcctcatacagacagcacagcaggtcgtccaccgagcgggccgacctgtccaggtccgccgcactgaaggccccgaaggaaaaccgtcccgtggtgccagagctgggcagaagcatcctggaggtgtgaagcggtattgaccgaagaagcctcagcaggaaatccttgtcagtaacgggcaggtcctcaagccgctgggcggcctgtgggtcagcaccaccggccctgaagaaccaggcacacaaggggtgcgacttcacgacacgccgcacagcctctatgacaccgtcgcccgtagacctgtctgccatgctacacaagcccattcctatcggtaaggataaacagacaggcctcgggacggcttcctgaaaatcaggaaggcggtgaattaaactcccgaaaccatccctgatttccaggagcccggcagcctcccggcttggcaggcctcctcaggccgctgaaaaaacgcagggacgaaagacggccgcttagcccttcaggacttcaactgccgcggccagaagggccgtcttgctgttgacctcgaacttcgcaaacagattgcgcagatggcgctccaccgtggtgggtttaaccgagaggtgatgcgccagggccttggtggaagccaccttgccctctatcataagcctcaggacctcttcctccctcctggtcaccccccgggccttcagcctctcccacctgaacggtgtcgcctgacgaagctccagggccctccgcacggcctccaggagctccggcacggcgaagggcttggtgaagtagtctgccgcccccctctttacggccttgatggcactatccgccgaaggataggcggtgattactatcacgggaaggtccggataatgctcggaaagatagctaaacagggcttcgccccccctctcgggcatcacaaggtcggtaatcaccaggtccaccctgcccctctccagcctccttatcgcctcccgcacagaacgggcaccaacggcttcatagccctgcatgttcagaattgttaccagatttcgcctcagaatgttctcatcatcagccaccagtatgcgcgccttcatcgctgctgcccctcctccttggaaacagcacttccactgctgtgcctttcccctccctgctgtttatccgcagcagcccgccataccgggccgctatctgacgagttatggccagccccaggcccgtaccctctgccttgctggtgtatgcccctccggaaagcacctccttcagctgctggggcgacataccacagcccgtgtcctccaccctcagccctatgtgccgagcatcagcccaggtgctcacaactatcagcctggcccgagcgtccacaagggcctcctccgcattcttcagcaggttcagaagaatctgcttgatgtgcccaggacagcacggcagagtgggtagctcggtccccagccgggtcagcacagtgacaccccggccagacagccggcggcgtaccagctccaccacctttgcagcctcggcgctcacatccacctcctgcagggaggcatcgtcagcacggtaaacttccagaatgcttttaactatgccggacatcctgcctacttcctcgcgcacctcgccaagaagctcccggtgatgctccgtcttgagagcatcccacagtatgaaaagggtggtttccacgttggccagcgagttgttgatctcatgcgctacctccgcggccacaacccccttggcggcgtagcgctccgcctccagcagtcgggccgacatctccttctccagcgtgacatcccgcgcagacagcatcaggccaacaggctgctccccctcgcttactaccgaggtacttaccgaaaacagcagccgacaagggccgaacctcacgggaacctctattaccaggtgcctgcctccaagggcctccttcagcctccgcccggtcctgttgcgctcggccggctccaccagctccaggaaggaccggcccgttagctcccccgcagagcaccccaggagctcccggcagcgccggttcaccccttttatccccagctccttgtccagcaggaagatggcgtccccggagtactccatgagagtacggtacctctcctcggaactgcgcagaagatcatacgccctctgcagcttggcatagctccgctcaagctcggccacggcatccatgagcgcctgtaccttgtcctcggccctcaccgccggcacgcgcctgccatgcttcctccatctgatttcatatctgcagcagtccgccccgaagagcacgccttccagcaggtacatcccgccgcgaggacgccccactaccttgagccgccccccgggaagctcttccaccagctgacgaccctgcatacggtacctgcgccccctgaacagggatacctcctggcagggcaccacgcactgctgctcccgcacctcggcaggaccgaggccgaacaggtcgggtaccgcgctgaacataccctggttgaacaggcaggcaccacgcgtctgtcttccccggaccttcagctgaactactgccatgccgtcaacggcttcctccacatggacagacaccagccccttggtgaagtacttggttagctcgggcgagtactctatgagctgctcgggagaggaaaacagcctggacagcacgcccaccagccccaccgagccagcagcgaatatgctctgccctatcctgtaggtaatggcctcgtcaccaaacagctccgccaggcgtctctccagctcccgctccacatcccagggtatccatgcgtcagggtcggttagatgagcctcgccgaagggtagcccctggagcagtggctccaggagctcaggacgtgcctgcttcacatactggatgaaggcattggatacacggcagcttacatcggcaagcggcgagcctgaaggagaggaagagccgggcacaagggggaaggtcctccctgacgcaccctccgcctcgccgttaagaaaatactccacggggacctgaagagcctccgaaagctgcagaagccttcggagcgatatgttaatgccgcccttttcgtatttctgtacctgctgatacgtgaccccgagacgctccgcaagggctgactgggtgagccccagctccctcctccgcctcctgatcagcctccccacatccatgccctccctccagatgaaggagaggtagaggtgtttacgcccaaagtccccccacggaaaagtgctgtattttataaaatgcaatctacatttgcaatcccctggtctttgaggaattgcaacggggtcttttcatccaggcagtggtgcggtcttacgcagttgtagatgaactcccacccgatgagctctttgttgagttccggcaccgtccaggggcagtcccggacctggtagagcgctccgggtccgtctccgggctccgaaaccttgtaatccctgggcttgcgcatctggggccgtctgcccggagttctccacctctgagtaatgatggtcgacgccggcgcttcggtggcaaagcaatggtcaggttagttccccgctcccaggaactgccccagaaggctccgagctacacctcattgaccgcgcctaccccagtaagggccggcgggcagtagcgacacccgggactacaccgctttagcttcaacaccagcttgccgcgccgtaaacctcttttgaactccacccgataatcctcaaccagacgccttattgccgcatcaacctggcggagatggctggtcattactgctttcgggtgcctctttgtctatgagtcgggggtgcaaggcacaaaagaggcccccgcgctgggtttgaacctccttacggtgcaggagctcctgggccacaagaccctcaccatgaccctcaggtacgcccacctggccctcgagcacaggacagaggccgtcagaaagctggaggccagaacgggctcccgaaagggggaaagtattacgattttattacggtcggaaggaaaaaggggttagcccatcgggctaaccccttgattttcatggtaggcacgggcggtttcgaaccgccgacctctaccgtgtcaaggtagcgctctcccactgagctacgcgcctaacacctttttattaaccgaaaaaagcccaacttgtcaagccttttgtcaagcctttctggtataatatttaattcaaaaaaagggaggcgctcttgaggaaattcctggcattgctactactgggcctcctggcctgggagcaggcgggggggcagcagaaagaccccttccgcatcttagcggacggtctcctggagttcttcaggcccctggagggtcaagtggtggccgtagagggggacagggtggaggtggccttcgccaattcaccgcagcccggcataagggtgagggtgctgcgccggggggagccgtttcttcaccccatcaccaaggaacccatcggtgtgctggaggagcccgtgggtctcctggaggtgctgagcccccgggagggaaggctccttgagggcgaggcccaggagggtgatgtcctgaggctcagcagggctcccttgagactcctgttttatcaactcaagggcaccagctgggccttggcagagcagtactacagggtgctgaaggagacgggccggtttgagctgctcagcagtcccgaggacgagcaggcccgggccctgccggaggccaggaggctcaaggccgatgccgtgctcctggtcagccaggagcagggcaggcagggcaggacgctccttaggcagcgcctcctgtggcccgacggcaaggaggccctgagggcctcggtggagctttcccaggagctcgtggcagagctcaccctgggagaggagcttttcagccccagggaggatgtggccctggtgttcaaggtcccctacggggcggagctcatctgctgggccgacctagacggcgacggggagggtgagctgctcgtggccacccagaggcgcctcatggcctaccatctgggcccggcctccctgcttcccctggaaggcgcagtgctcaagggccccagcagggcagagttcctgtggcttcaggctgccgacatagatgacgaaaaaggacaagaggtactgctttcggcaagactggaggactcggtgggctccttcatatacaagttcaaagacggtagcttcataaagctctgggagggggacttcctcatccgccacctcaggggcaggctctacgggcagaggttctccaggttcaagggcccccttccaggggtctttgaactctcctggcagaacggaaagccgaggcccacggggcaaagcctcaagctccccccgggggtcaacctgtatgacttcatcctcataggcagcaaggaaaagcccttggtgctgagctacgatgacgacggctacctgaacctctttgaccacgaggccatgctcctgtggagaagcagcgccgacctgggaggggtgctgaagagctttgagctgccctccacagagcccaccggggaggccgagttctggtctgtgaaggacaggctccttagtgcaggaggcagcgtgctggccatatggcggcagcccattgcgggcaaggccaaggggctgggctacaagcgttccgggctcctgagtcttcgctacaacggcctgcaggtggagaaacagcacctcattgaacccgtagcaggcaaggtgctggacttcgccttggcccaggacaggctcatggtgctcctgagccctcccctgggtcttgaccttaagaggctcctgaaggcccgctcccctttcaccacctacttgtatgtgtaccccctggaggccctgcaatgagaggctcccctgtacatgtggccatcataatggacggcaacgggcgctgggccgagctgagggggctgcccagggtggaggggcacaagcagggagccgccagggccaaggagataatcagggcagccaaggagctgggcataagggtgctgaccctctatgtgttctccctggagaactggcagcgcccccaggaggaggtgcaggcccttatgaagctcctggagctctacctcacccaggagacggaaaacctcaaggcccagggcatagccttcagggccataggcgacctggaacgccttccccgcagcacccaggaggtcataaggagcacagaggctgccaccagggagggcaaggccatggtgctggtg

SEQ ID NO: 4121 - DNA, 23477 bp, synthetic construct
  misc_feature 1..23477: note = Synthetic
  source 1..23477: mol_type = other DNA
tccgtaatagatctgattgtgcctgctaatacacggtttttgagaatttcttccagccagtcctaatttcacaattgctgttttccgtcgcatacaggccaattatacggtcggcaactcctactgccaagatagtttcacaattcttgatgaactagggatcaagacttgaattaacggtcactgagagtggaaacgactacttcacacaatggaagctgaacctgtttctacatcttcccgttacaacggttacacatctgatattttctgtcaggtgagcatccatttcaccttccagaactgcatctatatactttctaataggggcgcgaaatcaccctctatatctaaaaaagagagtgtaaaataaactgtgtcaggctataataataatagtttaacacagtttttataatatggccaatttggaaatagactacaagaaagcagcccagcagctgcgtagcggtgaagcactcttcggtaaagacggagctttggctcctatgctagaacgtatcctaaacgcagccttagaaggtgagatggatgctcaccttaatagcgttgactgcagttctggcaatcgtcgtaacggcaagatgagcaagaccgtacagacaaagtatggagaggtgatagtcgaaacccctcgtgaccgtgacggttcttttaaaccggagacagttaagaaacgtgagacaattcttgctgaaggtatggcagatcaaatcatcaacatgtatgctcttggtacaagcactcgtgatataagcaagtactttgagcgtgagtttaacacaaccctttcagcagaaaccatcagtgctataaccgaccgagttattcccgaaataacagcctggaagtcccgtatgcttgaccccgtctatgccatttgctggcttgacgccattcactacaaggtaaaagacgataagggtcgtgcagtcactcgtgcaatatacaatgtcctaggtgtaaacaagtctggtcacaaggatcttcttggtatgtatatatctgagagtgagggtgctaacttctggcttgatgttatgaccgaccttcagaaccgtggtgtacgtgatattctgatttgttgcgtagacggtcttaagggattccctgatgccatccaaagtgtattcccggaaacctccgttcagctatgtgtagtccaccaaatccgtaactcaatcaagtatgtaggaagcaagcatcagaaagagtttctgaaggatctcaagaccgtatatggtgctgtaagcaaggattctgcattagcacagcttgacatggttgatgaaaaatggggtgagatgtaccccatagtaatcaaatcctggcgcgacaactgggagcgtcttacggaatattttcagtatactcctgcaatccgcaaacttatctacacaaccaatacggttgagggctatcatcgtcaggtgcgtaaagtaacgaagaacaaaggtgtgttcccgtcagacaccgcacttgaaaagcttgtgtatcttgcctatcgagacattagtgggaaatggactatgccactgtctaattgggcactgatatcacagcaacttgccataaaatttggtgataggttcaagattatgtaactttgcctgtgaaaggctcctcttatttgtatgcagatgtgaaatctgcacacaaataagagggaaagaataaaaaacagagccgtgacacagttcagtttacactaccctaaaaaagcttactagctttaacgattctatagtcttgttcttgaagctttcaaaatcaaattcctctttcataaaaactatgttaacaaagttaatattttattttactctttgctaacacagtttaatttatattcttttacaatccaggtgacacactctaaaaggtattgtatttctcggataaacaacttatacagtgcatattcgtgatgtatatttacagcattttatcaatttatccatatcctccgaaatcttgtcatcagtaacttttgcgtatccttgtgtagttctgatatttgtatgtcccatcatcttggatatgctttccataggaaccccggcagaaaccatcagggtaccgaaagtatgacggctttgatggtatgacaagttatgcttgaactgaagggaaaatcccaattcatgtatctcaaaccaaatcatactccgtataggtaacgggaaaatgggctgactatcatctgtcgtattatacaaggaaattatctgctccgctaccgggtgcaatggtataaatgactcaacgcttgttttcttgcggtatgttctgatatattttcgtccttctgcagttgtacctatatgatgcggatagagattgcgtacatcaacgtaagccaaaccgcaaaaacatgaaaatataaaggttcttcttgcaagttcctgtagtggatccggttttggatggctcattatctcctgaagttgattcttgcttatatacatgagctttgtaggtgccttcttttcatattttataccatccaaaggattatatctcaaaattccgttatccacggcaagataaaccagacgtttcagccagcaaagacaatggttacggtatgatggcttatgagggtaatttgttttcagatacaaaatgaaattggtgccaaactcttcggtaatatctgtaaaaagcatgtcctctttgcccaaagaacggatgtattcacccagatagtaatgatacatttttgattgcctgtaactggaagttgaatctatttgaatggaacggatttttagattttcccgttccacttcccctgcttgtaatatatacttcgggatgtcggcagttcctgtcatggctgttttcagaagttccgcactgataacgccgttcactttcaacagttcagcataagtttcatctacgcgtttcttatattcatcaagcattccgttcagcctgttatttttgacttctcctttcttgctgatccactcttccggctggcaatacaacccggttgataatacgacagcctttccgtctattgtaatacgacacatgattgatgtggtcccgtcagatttgactttaccacggtttatataatatagttgcttatatgtacttctcatgattctttcttttttgattttataataccagtttcatatcactcgttgcttcgatgaatttgtccatatcctcaaaaagttttttaggagttacccttgcataaagctgtgtcgtggtcagattggtatggcccaacattttgctgattgtttcaataggcacaccggcctcaagggttattaaacttccgaaggtatgtcttcccatgtgatagaccaaatcacagcttatgccggccaaatcacgcaaacctttcatgtgccgtcgcatattgggatggtgtatcatcgggaaaagctcatccctttcatccgaacgatatttttctattagagcgatagcctccggcagcaatttgacgcgtgcctgataatcatttttctttctcagatactttaaccacaaatcgcccttatcatccttgtatatattctctcgggtaattgaaaccgcatccgcatatgggactcctgtataacaggcgaagaggaataaatctctggctatgttatgggtgactctttctgggggtattacgacatcacggattttctcaaaatcttcgcgagtcaaagcccgtggtggtttacggtgctcttggggtagtttgaaattcacaaaataacgcttctctgcatgcccttccttgaatgccatccggcaaattttcttcaggatggccagataatgtcttgccgtatctaccgcaagtcccttgtccttcagtatataatcctgaaactcccatggaatgtgttcattcaattgtccaaaagcgacatcacttgtcttgaatcgtttttgaatatattcaccaagatacctgcgggtgtaaatgtatgttgacatggagctttttgccacatcaataccgattcttgagcgcatatcctctatatgcatatcaagccgtttcaacagagtcatctgggtttctacacttccttgtaaaagttcttttacggcagtcgcatcaaaatcaatcttacgttctaaaagtgaatcaaatgcagaattgaccgaaagcaagagccggtcaattttcgcattaatatcaacggcttctttactctttccattcagtcgactttctcttggattccataactccggagtacatgacagcttacaactgaattgcgccatcgtgttgtttaccgttattcgccccattatcggagccttcccaaatttgtctagaccgctctttttcaggtagagcaacaccttgaatttttctactttcatacgcttattatttaatggcaaaattacctatttcataagcgtcctttgatatgcaaaatgctgacatatagtgaataatagcttctgtgacagcttcttcattgttcagccagttacctattcggctcaggtaactgggcagctaacattttggtaactgaacacccgcaatatcctgtccatttttgctttcccttatctcagcaaaaaacggaacttttgctcatattcaaccaattacgttttcctttctcatcccttcatctgcttgctacctatattctgttccactgtttccgccactccttcgctgttttggcattgaattacggtatgccgatagaaagcgtgagcaaggttttggggcatacgaagatagccaccacacaaatttatgcgaaagtgacgaacacaaaacttgacaatgacatttccgcctttgaaaagaaagtgggcaagcgtttcaccatataatgtgcagcctatgaaacggacaacaatcacgatggacgggtgcggcaaggttgccgtaccgtccgatgccgccaatgtatggatgagtgaaatggaattggtaaggttgttcggtgtaatagccccaacactccgtaccgctatctgcgccgtgtacaggagcggagtgttgaagccttgcgagatggaaaggtacatcaggttgcccaacggttattattcggaaacgtataccatgccgatggtcgtagcactcgctttccgtatcaatacaccaatgctacaagtgtgcacaacaccctgttggaacggctgtacttacgaaaagaaaggcaagtgctgtgggctgcattgggtggcggtcaaaggtacgggtgttagagtgacaaccgccaatcttaccatcacattttgttgaattgttgaatatggtaaataatatgttgatatataataaaatacgctctcaacaggcagtcaacagaaggaaacggctgttgaaaagaaaaggtaaacggcatacagcaatgcctttactgtttcttttcgcctacaaatgttttgtgaacggatttgttgagcggttgttgatggcatatattacagaatgtcaatgtgttatatcatctattcaacagttcaacgctttttcacccctcaacaagtccgccgggaaaatgacagaagtgaatgtcaccatccgcaggtcggtcggacggacttccatcctgccgaccgacataggaaagccgatgttgcaagaaaaagaagaaggcaatccgacaaccgctgacactgccgcaggcttttgggaaacaaaaagccatagttcattagggcgttttcttcacgcatcgcttcgctcatgctaaaaataccctaatgaaccaacggggttacaccccgctggacacccccgtttgcctctaaaagaagcagcaaattgtcctttgggttacccaaaggcagatgcgttactccaaagtcggaactctgtttttcaatggtagcaagtttgtgttttgggcagaccaaaaaccgcttgctatcctcccgttggtcaattccctattttttagagattgtcattgaatgtctgttcaatgaatttatgagggttgttttatgttccatgagacacagttgagaccccctccatgactgattatatttgatatatcaactggttcgatgcaaccttgatagtctggaaatgccgcctcaatttgctgtaaagcctgttcatcctcctttatattgaatacaggtactatgataacattctttgtctgaagaaaattgatgtatgcccaagaatgttccctgttccgtggacgagtggagtatttcatggatatgacatcaaagttccgttccaactctttgagaaacttgtttgcaaagtaacgggacatttcgtaagcagtcagtaagactgtatttccgttaacccaacggacaataccatctgcatgaccgtatgtttctgatttatcccatggtagaaagacaatgctacattcaaataactgttcaagcatggcaattaccttgttacgcgggatatttttgttttcacaaaacacctttttagtcattatcactttgtcggggcacttgataatgttaccgccatctattatcaaatctgttttgacagtcggaatgttcaggtcatgcaaaacggctgtcggatcggttatatacctcctgtttttctcgttctgcaaatagtcaggagcataagcgtaatgtacaaatttggtttcattgacttgtatgggcatatagtccctgcaccaataatctttggtatggcgcaggaagccgtatttaatcccatacttgtccaataacttgcagatattatttattggcacaggaaagtccttcaatgcccattccgagaaatacacggtatcagtcagtcggtcggtaaccatatatcttcattgagtttaaagctccattgccttttgtctttttctgtcgttttcttgccgtcttttataatgtacaccccttttctcgcattttgcaaaagattagattgtgggaagtgttcatcatcgacccatacgatactgggcttgccgtttagcgagaagccgttaagataatatttcaaatatagaactcgttcatcacgaaacatccctttagaagtcagacgaagaaactctttttgctcaacatcatatatcgaatattctcgaatcagtgccgaagccctgtattcctgttcttcattctcaaaagtgatgtcatatccagagctgtgcatgtaaatcgacataagcggcaaataaggctcctcgtaaggttcttctatttcttcttttgtatgattcctgtgatacatgattgggtctttgattgcatccggtttgtcactctcatcatggtagtaaaattcaatggtacgaatgtatactctatacgcatcatttaccttaatatagcctccatatatgaaatgaggtgccaatttctcaaatgccgctgtcaatttctcttcagaagaatgacgcttgaagtttgacagatgttcaaataaagtcatactttggtaaatttaagttcttctaatagagatttgtatgtcttacagaatttgctggtatcattgagaataacgcctacattcttgatgtgcataagctcattgaaatacgccatatccgctattgccgacctcattgcatcaacagaagaactgtaacctgtcactaattttgctcctgtttgctttttaaattctaacgcaactttttcgttagtcaatgtccggcatgaactgaaatgaacaatcttactggagaaaaaatttttgttcatggcagcaagttccatcaagtcaatcccatcagtctctccttcaaatgatatagtatgattccttccatgacatgcaaaataaatgatatcatatttatcgaatttggcgaatttacgtttggtagtaaaatagtccatataatattgtaaatcttctctatacaaaatatgtctatgtattatatcacatttgtagaaatttctcaaacaatccaaaagcaacttggtttcaaggttgaactgattacccttgtggctgttatacagccattccgtttcaaaacaaattatattatgcatagtttattcaataaaggcattcatttattactttgtatcaagtttgttgggaataagaagctcacgcacatcactgctgtccggagaagattctccaaagcagctattattaattaatactcaactggttacgaggataataaaatttttcgattagaaatcatagttttgcaagaaggtataaacagccaattctgcaaactatgaacaaaggaaaaacaatatttgcacaggttatgtctcttataaacacatacgaattcactagtgtccggagaaaaattctccgacaagggtttaattattaaacatcaataatgttataagcattagaaaatttttcgattagaacatcagtaactttgcggtagccatcaagaggttatccgcaagccatgaacaaaggaaaaacaatcttcgctcagattatgtctctcattaacgaatacgagttcaagaaatgtgtcgaccgctacaaaggtgaccggcatgctatcaaattcaattgtcgtgaccagttcatggtgatgagttttgcacagttcactgacagagctggtttgagagatatagagactacacttaacctctgcggcgacctctatcgctccggaatcaaggcaatacctcgatccacgcttgcggaggccaatgagaagaaggattggcgtatatatcaagactttgcgatgactttggtaaaggaagccacgatgctttacaaggatgaaaagctgcgaattggtcttgaggagatgatatatgcgtttgacagcagtaccattgaactgtgtcttaagttgtgtccatgggccgagtttcatcatggtaagggcgcgttcaagatacatacactgatggatctgcgaggctcgattcccacatttgtcatgctcacgccaggcaaggttaacgatgccaggatgatggacaagattcctgttgaagcaggtgctttctacctgatggataggggatatgttgcctttgagaaactttacaagcatttccagcaaaagggcgcctactttgttacacgcgccaaggacaatatgtcttatgaggttattgagtccagacctgtcaataaagactcgggcgttctttcggatgagactatcagacttgctggatattactctaccagaaagtatccagacacattgagacttgttgtgtatgaagactttgagactggaagagtatatcgatttctgaccagcaactttgcgattgacgatccgctgactattgcggaactctaccgtgaacgctggctgatagaactgttcttcaaatggatcaagcagcatcttcacatcaggactttctacggcacttccaagaacgccgtgtacacgcagatatggatagccatttgtgactatctgctgctcatcattgcgaagaagcgatacgggttggatccaagtcttcattctatctctaactcaatcggacaagtcctcttccagagggcggatatccgtgaaatttataatcagccgacaactcccgtttgtgttccggaggcgggttctgtcgagcaacctactttatggtaaaatttctccggacagcagtgcacgcacatctattttcaagatgtctgcaatctgatataaaacaggaatgggaggctgcaccttgttcgtagcatatagattgaccatattaaaagtctttccaagcctatttgctaattctgtttggctaatgcccttagtctccaatacctcttttattcggttcatatcacattcttttgtctgacggttacaaaggtacaaaattttatttggtattttgcttgtttctcaaaagaaagtgctaattttgcaaatagaacaagaggtgtttgacagaaatacactgcatatcgcagaaaatgtgaccgttgccaagtcattacctcaccttttgaggaatgctcataagtagcttatttttaattagttcctgtttaacatcaaattctgtttgcaaaattgaattgattgctatgaaaaatattttggggctggatttgggctcttcgagtatagggtgggctgtgattcatgaagatgatacgcatggtgagctggtgactatgggtagtcgcattgtgcagctttcgcccgatgagttatcgtcgtttacccaaggaaacggagtatcggtgaatgcgcagcgtacgcaggctcggggacaacgccgggggtatgaccgctaccagttgaggcgggcattgttggtggagaagttacgagagttggatatgttgcccgatgtttctttgacgggtttgccgaagctggagctatggggattgcgggctcgcgctgtgaccgaacgtatcggactgcgggagctggggcgggtgctgtttcatctgaatcagaagcgggggtataaatcgacgaagagtgatttctcgggcgataagaagacgaccgattatgtgaagacgattaataatcggtatgacgacttgcaggctgcgggattgacggtcggtgaacatctgtatagagagttgtcggccaatccgttttatcgctgcaaggagcaggtgtatccccgccgagcctatgtcgaggagtttgaccgcataatggcttgccagcaggcctattatcccagcttgttgaccgatgagcagattcgttgcctgcgtgatgagattattttttaccagcgtcccttgaaatcgtgcaaacatctggtatcggtttgtgagtttgaaaagcggcgatatgtcaatgccgccggaaaggaggtagaggccgggcccaaggtggcgccccgcacctcgccgttgttccaactgtgccgcatgtgggagagcattaaccatattgtggtcaggaatcggcagaacgagatactcgagatttcactcgagcagaagaatcagattctggcgttcatgaatacgcacgagaaactcagaataaccaacctgttgcagctgttggggttacccaagtcgggcggttatcggtttggcgaccagttcaaggctggtatacagggaaacaagacccgtatcgacatagcgacagcgctgggcgactatcccgacaaagagcgattgttgcagttcaatgtccgtgagatttcctcgtcgatggtcgatgaagagacgggcgaaattctgcccattatcgacccttcattcgagcaggaaccgctgtaccggctgtggcatgtgctctattcgattgacgatcgtgaccagttgcaggccgtattgcgccggcagtttggcattgacgacgaagaggtgctggctcgattgagtgccctcgattttgtcaaggccggttttggcaacaagtcgagcaaggcgatgcgccgcatcttgcccttcctgcggttgggcttgaactatgccgatgcctgtgccgcggccggatacaatcatagcaacagcatgaccaaggccgagaacgaggctcgcgaactgctcgaccgcataccggccattcgcaagaatgagttgcgccagcctgtggtggagaagattctcaaccagatggtcaacgtggtgaatgcgctgatggccaagtatgggcgcttcgacgagatacgtgtggagttggcccgagagttgaagcagagcaaggagcagcgggagaagagttataaatccatgctgagcacccagcgcgagaacgagcggattgccgcccgcatagccgagtatggtgttgtgacacgctcgcgtatccagaagtacaagttgtgggaggagaccgaccattgctgcatctattgcggacaaccggttgatgtacacgatttcctgcaaggctttggggtggagatcgagcacatcatacccaagtcgttgtatttcgacaacggtttcgccaacaaggtgtgtgcttgtcgccgctgcaatagcgagaagggcaattccaccgcctatgactacatgagccataagggagcgtctcttttccaggcctatgtggaccgggtgaacgacttgaaaagccggaataagatcagtgagaataaaatgaaaaacctgttgaccaaggtcgaaaatattcctgacgatttcattgcccgacagctgaaagagagccagtatatagcccgcaaatcgagagagctgctctcgatggtgtgttgccaggtgacggctaccagcggttcggtgaccgatttcctgcggcatacgtgggggtgggacaccgtgctgcacgacctgaatctgccgcgttaccgtgaggcgggacgtaccgagataaaagaggtgcagcacaaggacaaagagcaaatcgtggggtggaccaagcgtcttgaccaccggcaccacgccatcgacgccctcacgattgcctgtaccaagcagggatatatccagcgactgaacaacctgagcgccctgggtaaaaaggcggagggagaggaggctgccagcggtagcgagaatggctcgcagaatctggaacggtatatccaggcacagccccatttctcggtagctcaggtgcgcgaagccgccgatcggatattgatttcgttcaaggccggtaaaaagtcggttactcccggcaagcggtatatctacaaaaacggcaagcgtgtcgttgcccagcgcggtctgctggtgcctcgcggtgcattgagcgaagagagcgtgtatggcgtggtacgactctgggaaaaagacgaccgggggaatcgtgtccaggtgcagcgggccgtactcaaatatcccgttacctcgattgacagcaagtcgctcgataaggtgttcaataagggtattcgggagattctctcgaaccgtttggaacagtatggcaacgatcccaagaaggcctttgccacccccgtgtacagcgatgccgagggtcgcaggcccattcgcacggtgcgatgtctggcccggccggcagtcgatacgctggtaccgttgcggtatgaccgggacgggaagccgatagcctgggtcaacccgggtaacaatcatcatgtggccatttatcgtgacgaggcgggtaaataccgggagcaggttgttaccctgtggaacgtcgtggaccggcggcgagccgggttgccggccatcatcaccgatccccgtgcggtgtgggacagcgtgttgcagcgcaccgatctccccgaaccgttgttgaagagcctgcccgatgtaaagtggcagtttgtactctccttgcagcaaaacgagatgtttgtcctgggtatgagcgacgaggattttcgctatgccatggaccatcacgactatgccttgctgaacaaatatctctatcgggtacagaaagtaagtaagggagattatttctttagatttcatgttgagacgatggtcgacgataaatatgacgggaagacaaacatggctttatctatccgtatgggaaaattgaaacgggtgagtgtcaagtctttgttgtctttgaatccttacaaagtgcatttatcggtcttgggcgaaatagacgaagtattatgatcaagcgcacattgtatttcggtaatcccgcttacctgagtttgcgccgggggcaactggtcttgcggctgcccgaggtgtcgaaaaacacctcgctgcccgaatcgttcaagcgggaagccgagcgcacgatacccgtcgaagatataggagtggtcgtactcgaccattcacaaatcacgattacacagggattgctcgaagcgttgctcgagaacaattgtgccgtgattacctgcgacaagaaccggttgccggtaggactcatgctccctctgtgcggcaatacaacccagaatgagcggttccgtcatcagcttgctgcatcgcagcctctgaaaaaacagttgtggcaacagaccattcagcaaaagattgccaaccaggccgccgtattggagtcgagaggcgccgtggcgaaaaatatgcgggcctgggccggtgaggtgcgcagtggcgatgccgacaatatggaggcccgtgcagcagcctactattggtcggcactctttcccgaggtggactgcttccggcgcgacagggaggggagtccgcccaacaatctgctcaactatggctatgccattgtgcgagccatggttgcaagatcgctggttattagtggactgttgcccacttggggaatccaccaccacaaccggtataatgcctattgtctggccgatgatgtgatggagccctatcgcccttatgtagaccggctggtgtgcggtgtagtgagtagcggggacgattataccgtattgacccatgaattgaaagcaaaactgctgtccttgcccgtgatggaggtgagtatacaggggcgtcgatcccccatgatggtcgctattgcacaaacgacggcatcgctctacaaatgtttttgtggagaattgcgcaaaatagtttaccccgagatgtgatgagcctcgaccgtttcagtgaatatcgcattatgtgggtattggtattttttgatttaccgacagagaccaaacgggagcggaaattctatgccgaatttcgtaagaaacttatacaagacggtttcaccatgtttcaattctctatttatgtgcggcattgtcccagtcgagaaaatgccgaggtgcatattcgccgggtaaaactttcattgcccccgttgggaaaagtcggaatcttgtgcattaccgacaagcagtttggtttgatggagatattttatcgcgccaaggaggccaagccgcaggtccctccacagcaactcgaattgttctaaatctaaaaagccgaccatacgatcggctttttagtgaaatacagctttgattttaatttctaataattgctataatcggttgactattaatgagctatacagattgtgctgtatttaataagtcaaagatacaaatttgagagcgaatcacaacgacaaaaacacaaggccggagcggtttagggctgtatttaataagtcaaagatacaaatttgagagcgaatcacaacttatcatctcggaggctgcgacaaagatatgctgtatttaataagtcaaagatacaaatttgagagcgaatcacaacaccgacagagccgagaaaccgacaagacaagctgtatttaataagtcaaagatacaaatttgagagcgaatcacaacgtagaacgctgaaatatcttcccggccgcgctgtatttaataagtcaaagatacaaatttgagagcgaatcacaactctttttgagcttgggttttcaaattcttggctgtatttaataagtcaaagatacaaatttgagagcgaatcacaactgcaagtccttgattccggccgacgtcaaagctgtatttaataagtcaaagatacaaatttgagagcgaatcacaacgtaaagctcgtcgtcccgacagtctttatagctgtatttaataagtcaaagatacaaatttgagagcgaatcacaaccactccaagtttggtgacctctacgttatgctgtatttaataagtcaaagatacaaatttgagagcgaatcacaacctatattcccagattgataggtcaaagtaggctgtatttaataagtcaaagatacaaatttgagagcgaatcacaaccatctccataagtacgtcaccgcgaggagagctgtatttaataagtcaaagatacaaatttgagagcgaatcacaacctcgttggtgatgctattgcttctggttttgctgtatttaataagtcaaagatacaaatttgagagcgaatcacaacgcttctctcttgcgccttttcgatttaatggctgtatttaataagtcaaagatacaaatttgagagcgaatcacaacttttccagataatgtcccaccagcgctgaagctgtatttaataagtcaaagatacaaatttgagagcgaatcacaaccgaacgagcggcctatgtattcggttccgagctgtatttaataagtcaaagatacaaatttgagagcgaatcacaactatctatttatcactcttttttctttgaaggctgtatttaataagtcaaagatacaaatttgagagcgaatcacaacaggtttgagcttcggggcctttggtgtcgtgctgtatttaataagtcaaagatacaaatttgagagcgaatcacaacccaacgggaaagatagcggtgtacttttggctgtatttaataagtcaaagatacaaatttgagagcgaatcacaactagtcaaaaagtccttctcccagttagcacgctgtatttaataagtcaaagatacaaatttgagagcgaatcacaactgatgggcaaggtcaccaacatcaacagaagctgtatttaataagtcaaagatacaaatttgagagcgaatcacaacaggctcccaagggtatgaattctacttttgctgtatttaataagtcaaagatacaaatttgagagcgaatcacaacaaaattgagagtaaggctcgcgatatggcgctgtatttaataagtcaaagatacaaatttgagagcgaatcacaaccagggcaccaactgatacatataaaatacgctgtatttaataagtcaaagatacaaatttgagagcgaatcacaacgggctaccccgaaattaggtttgcagttcagctgtatttaataagtcaaagatacaaatttgagagcgaatcacaactacgatggctatcaaaagcaactaccaaggctgtatttaataagtcaaagatacaaatttgagagcgaatcacaaccgacggttgagaaggcaggtcgaccaagcagctgtatttaataagtcaaagatacaaatttgagagcgaatcacaacttggcttcctcgtatctcttttcgagggccgctgtatttaataagtcaaagatacaaatttgagagcgaatcacaacacaatgtcaagagccactcgggttttcccggctgtatttaataagtcaaagatacaaatttgagagcgaatcacaacggcggtggtcggttatgaacagccgcgtgtgctgtatttaataagtcaaagatacaaatttgagagcgaatcacaactcactcttatgcacattcaccaacttggagctgtatttaataagtcaaagatacaaatttgagagcgaatcacaacaaaaatcactgtcgggcgatgcaaagtgacgctgtatttaataagtcaaagatacaaatttgagagcgaatcacaaccgatagcgagtttttcgtcggctgtaagttgctgtatttaataagtcaaagatacaaatttgagagcgaatcacaaccgccccgtcagggtccagtttgtcgtggtcgctgtatttaataagtcaaagatacaaatttgagagcgaatcacaactcgtctctgatagcttattacaccattctggctgtatttaataagtcaaagatacaaatttgagagcgaatcacaacacgaacacgagagaaacatacggaaccaatgctgtatttaataagtcaaagatacaaatttgagagcgaatcacaacattgcggattagggtgttgactaaatgcaggctgtatttaataagtcaaagatacaaatttgagagcgaatcacaactcaaaagcactttgcaaatcctgcgccatggctgtatttaataagtcaaagatacaaatttgagagcgaatcacaacttccgatcgagactttcatttctcttcctcgctgtatttaataagtcaaagatacaaatttgagagcgaatcacaacgaagagccttatcatgattttgcctctgccgctgtatttaataagtcaaagatacaaatttgagagcgaatcacaactgatgttcttttgaccttcgtgtcaaaaagctgtatttaataagtcaaagatacaaatttgagagcgaatcacaaccgttataccgttgttgctgccattgagcgtgctgtatttaataagtcaaagatacaaatttgagagcgaatcacaacgtcaattccttcactttctgaggcgtcaaagctgtatttaataagtcaaagatacaaatttgagagcgaatcacaactggctgatatggatttaacaaaggccgaaagctgtatttaataagtcaaagatacaaatttgagagcgaatcacaacattgtgacattgactacctcgaaagaggccgctgtatttaataagtcaaagatacaaatttgagagcgaatcacaactggcgtgtatttttattcgttatcttcgtgctgtatttaataagtcaaagatacaaatttgagagcgaatcacaactttaaattaagtttataatatttttgtttgctgtatttaataagtcaaagatacaaatttgagagcgaatcacaacgacgtcgaggtgcgttatgatgatttgaagctgtatttaataagtcaaagatacaaatttgagagcgaatcacaacttccggtgagtgaaacgaatcaccccgacagctgtatttaataagtcaaagatacaaatttgagagcgaatcacaaccttttctatttcgggctgccaaaatcgaccgctgtatttaataagtcaaagatacaaatttgagagcgaatcacaacgtcaattccttcactttctgaggcgtcaaagctgtatttaataagtcaaagatacaaatttgagagcgaatcacaactggctgatatggatttaacaaaggccgaagctgtatttaataagtcaaagatacaaatttgagagcgaatcacaactacaaaactcatcaaggcattttttatatagctgtatttaataagtcaaagatacaaatttgagagcgaatcacaacattgacttatgaagccggtctgccacctctgctgtatttaataagtcaaagatacaaatttgagagcgaatcacaacgcgcgtctttcagattttttttactcatgtgctgtatttaataagtcaaagatacaaatttgagagcgaatcacaacattgaattattttcgtatctaatcaataaagctgtatttaataagtcaaagatacaaatttgagagcgaatcacaacatgacggagatatagtagttggaaattctgctgtatttaataagtcaaagatacaaatttgagagcgaatcacaactgctggttgcagaactcttcggtcgagaaagctgtatttaataagtcaaagatacaaatttgagagcgaatcacaacccataagcaagtatttcggctttttggcttgctgtatttaataagtcaaagatacaaatttgagagcgaatcacaaccgtccatatattcggttgtcgtttgttcgtgctgtatttaataagtcaaagatacaaatttgagagcgaatcacaacaggctgtcgatgagtgtccgcatcacgctgctgtatttaataagtcaaagatacaaatttgagagcgaatcacaacaatgaagctgatgctaataaaagacgttatgctgtatttaataagtcaaagatacaaatttgagagcgaatcacaaccggcggcgctgctggcggtgccgtcaaacgctgtatttaataagtcaaagatagtgaaaggcgagagcagtggcaaacgaaaacggtgttttcaagtttgacaaggccgagccacctcctatcttcttgaaagatacaaatttgaaagcggatcacaacacttgcggatgacgattgtgaggtccacgcgctgcatttaataagtcaaagagggtgaaaggagagtacccaacaaacagccgttacgatttgagggtcgatgtcggatcggtagcgggttttcatggtgagtcggtgggcgtttggttgattagacgatgccgccgccgagcaggagccgcaagatgcctacgataatcgagacgatgcagagggtcttgccgttgtccgacttgatgaggacgcagataatcaggaagataatcgataggggtatggctacccagttgagtattcccagcaggggaatgaaggctaccagggtgacgagtagcgcgatgatgcctaagagtgttcccattgtatcgcttggttttgtgggtataacaaatgtgtgccgcaaggggttgacccgcaggggtcaatccatgcgggtcttgtagtcgttgtagtcgaactcgcgccacatctcgaccgtgccgttgcttctgaggcaggcgatggaggggtggggtatgccgttgaacatggtggtcttgacggtggtgtagtgaatcatgtcttcaaagatgatgcgttcgcccacggcgagttcgtggtcgaagtaccagtcgcccatgtagtcgccgctcaggcacgagttgccccccatgcggtaggcgtagagcccggtggcgggggtggtgacggctccgcgaatagccggttgatagggcatttcgaggcagtcgggcatgtggcaggcaaaggagacgtcgagtatggcggtgcgtatctggtggttctcgacgatgtcgaccacggtcgagaccagcgggccggtctgccagccgaatgcgctgccgggttcgagaatgagttcgaggttggggtggcgacgtttgaagtcccggaggagatggaccaggtggtcggtgtcatacccctggcgggtcatgaggtggccgccgcccatgttgagccatttgacttgcgggagcaggtggccgaatcgctcctcgacccgcacgagtgtcttttcgaggtcgtaggaggtcgactcgcacagcgtgtggaagtgcagcccttcgacgccttgcggcagcgtggccagcttgtcggcggtgatgcccagtcgcgacccgggggcacaggggttgtagaggtcggtttctacctcggagtattcggggttgatgcgcagtccgcacgacacgcggttgccgtcggctacgacctgggggtagaagcgctcgaactggccgatcgagttgaaggtgatgtggctgctgtaccgcagtatggcgggaaagtcacgctcggtataggcgggcgaataggtgtgggcggggctgcccatctcctcgaaggccaatcgggcttcgtgtatggagctggcggtggagcagggtatgtactcccgaatgatggggaacgatttccacagagcataggccttgaaagcgagtatgatgtttacccccgcagcctccttgaccgagcgaatgagttgcaggttgcggcgcagacgctcctcttcgagaacgtagcagggcgaggggatttgcatgagtatcgtgtcgtcgttgtgcatggtggtatagtgatgggtttatgattattcgatcagggtgaacttggcgaatttgagcaggagctgtttccggcccacgttgtcaaactcgacggttattttgctgttgtcgcccgtgccctcgatggccgacacggtgccgttgccgaatcgggcgtggcagatgcggctgcccaccacgatggctccggcggcggttgtggccgaggtttgcggcgcggaggagttgtcgctcgcgggacggctctcgatgcgggtgagccgcttggccggagccggggcggtgaagggacgaggcgccggggtgcggctgtcgtcgctgtcgtcgcggcggaagggcttgcgaccccattcgccggcgaaggagttgcgccacggcctctcttcgaggggctgctcctgccgggcttgggcaggcatgtcgacatacctcgggtcgagctctttgaggaaccggctgggaggtgacgacaccgtctggccgttgcggtagcgggtgagggcataggtgagggtgcagttctcctcggcgcgggtgatggctacgtagagcagccgccgctcctcctcgatttcgcgctcgctctcctgactcatcgacgaggggaagaggttctcctccacacccacgatgaatacttgcttgaattccaaacccttcgaggcgtgtacggtcatcagtgtcaccttgtcctgctcggcctcgtcgccgttgtcctggtcggtcgccagcgaaatctcggccagaaagtcggagagcgtggtgttctcttcgcccgactcctgacgcagtgtgcagaactcctgcacaccgttcagcagttcctcgatattctcttgccgactgatattctcgggggtgcgctcggcggtaatgtcgcgcatgatgcccgactggcgcacgatggtctcggccagttcggccgtggtctgacgggtggctgcgaggcggaagctctcgataagctccttgaatccctgcaacttgttgagtgtgccgctgttcacctcgacaccgttccccttggggtcgtcgagcacgttccagatgctgagtccactctcgtgagcccggtcgatgagtttggtgagggtggtgttgccgatgccccgggtggggtagttgatgacccgtttgagcgcctcctcgtcgttggggttgatggtgaggcggaagtaggcgatggcatctttaatctccttgcgctggtagaacgaggtacccccgtagatgcggtagggaatgttgcgtttgcgcagtgcctcttccagcgtgcgcgactgggcgttggtgcggtagagtatggcaaagtcgttgtagcggcagtgggtggtgaggcgcagttcggcaatgcggttcgagacgataaagccctcctcgaagtcggagtaggcactgattaccttcaccttgttgccctgctccttttgcgagaatatctgtttgggaatctgctccttgtttttggcaatcaagctgttggccgtgttgacgatgttttgggtagagcggtagttgcgttcgagcttgaagattttcaaccccgggtactctttgctcaatcccagaatgttgtggatattggccccccggaaggagtagatgctctgggcatcgtcgcccaccacgcagatgcggttgtgctccttgcccaactggctcacgatgaggtgttgggcaaagttggtatcctggtactcgtcgaccaagatgtaggcaaagaggtcacggtagtgctgcaacacgtcggggtggtcgcggaacaggatattggtgttgagcaacaggtcgtcaaagtccatggcccccgacacgaaacagcggtggcggtagatgcggtaaatctcgcagatgagcggacgcttcgagcgggtatccatctcgatcaactcccggttcttggcatacacgtgcggctcgatgagggcattcttggcgttcgagataatcgactgcacggtcgaaggcttgtacaccttgtcgtcgagttgcatctccttgatgatgctcttgatgagcgagagggagtcggaggcatcgtatatggtgaagtcgtggcgatagcccaaccggtcggcattggcccgcaggatgcgcgagaaaatcgagtggaacgtgcccgcccacaatcgcgaagccgtctcgatgcccaccacctcggcaatacggtttttcatttcgttggccgccttgttggtaaaggtcagtgccagcagccggtaggggggataccccatctgcaag

SEQ ID NO: 4122 - DNA, 23459 bp, synthetic construct
  misc_feature 1..23459: note = Synthetic
  source 1..23459: mol_type = other DNA
tatttatcagtgtatgaaatgtatacgaatatcctttcatcgatgaaaatgagcattgatccatgttgtattatttttaaatagcatgaaataagattaaatttcaacagttttattgtgtgcaggggaaagtttatcatgctttttgtggtcccgagttttatttgtaaattgcacctattgacgatagagaggggagaactcctttcgatgaagccgaataatcttttcggttattgttcatattaactcaaacttatatcaagtaacaaatttttatgagagtagcattcattgtgttgctgtcagccctgacttgtatggggccagtgactacgtatgccaagaaaaaaaaggctacgcttcctaaaaaggagacggttcagcaaactccctatgaaaaattgtttaaaaacaagaagggagagtgcgttaaaggaatgtttaccgtccacaaattggatggtaaagtctatttcgaaattccagaccagcttttcggacgagatatgctgttgggatctacggtatcggagatcaatgacaattcggatgctttggttggggccaaacccacaaaacccatgcatgttcgatttgttcagcaagattcgattgttgtccttcaggagtttacggcacggaataccgtaattgatccaggatatgaaaatattgcttctgcaatagaaatcaataaaattccggctaccatagcgaccttccctatcaaggcttatgctccggactcatctcgagttattgatgtttcctctctgttcttaacagatattaagtccttaagacctttcgagggggggagcagtatggggggaatggccagccgttctgttaattttaaaaaggatcttgcctatctggatgagatcaaggcttttgatgataatgtgagcgtcaaatcggtattgacctattcttccgatatgaaggtgttgggtattctgactctgtataaggataaacccaccactgccaaaatgacacgaactttcttgctcttgcccgaagagcctatgcgtcctcgtattgcggattctcgcatcggaacttttttcgcgggtgtagaacatttttcaaatgaagatcaggttaaggcgttgtattatgccaatcgttggaatctcgaacccagtgatgtagaggcatacaaacgaggagaacttgttacaccgaagaagcccattattttttatgtggatagtgctttccctgaagcctggaagcctgcgatcaagaaaggtatagaggattggaatcttgcttttgaaaaaatcggttttaaaaatgccgtacaggcattagattttccgactgatgatcctgaatttgatccggataacttaaaatattcttgcgtacgctacgctccgacttgggtagccaatgctatggggccatcatggaaagacccacgtagtggtgagatcgtatgcgcatcggtctatttccaccacaatattgccaaattgctcaataactggcgtttcgttcagacggcccaaatcgacacttctgtccgtaaagttactttgcctaccgaagtgatgcaggaaggtattcgttatgtgactgctcacgaggtgggccattgcctcggattgatgcacaacatggcagcttcagcagccttccctgtggattcattgcgttcggcaacctttacccaacaatatggaaccactccttctatcatggattatgcacgatataattatatcgctcagccaggagacaaaggggtgaaattgacgccgccgcaactgggtgtttatgacctgtatgcaatcaaatggctttatacaccgttgttcgtatcacctgccgaagagcgtgaaatcctggataaatggatctcagaaaaggccggtgatccgttgtatcgttatggtaaacaacaggtgtttgcccgttacgatccttcatcggttgaagaggatttgggtgatgatccgatcaaggccagtgcctatggtattgccaacctcaaatacatcatggcaaacatgaatgattggctgaaagaggaagataaggatttccagcatcgggcaactttgtatgatcagatcctgatgcaatataaacgttacttgaataatgtgctgatgaatatcggaggtctctatttgtatgattgcaaagagggtgatgctccggaaatggcatacaagtctgttcctaaagaggtacagcaggcttctgttaacttcctgcttgatcagctttatgatatggattggttggtcaatgaagagttgttgaaaaatctgcctccacagaaaaataaagctcgtgaaatgcagatcggaggtgcctcaatgtttaaaaacctgttgaccattaagaaaaagaatggtgtgattttgtcgtcatctctgtcagatgatccctatactctgaatgattacttggatgatatttatcaggtcgtatggaagaagacaatggctggtagatctttggaggctgtggataaaacctatcagaatgactttatcatttcgatggtttcagcttttgatcctgcagctaaagcgggttcactgttgtttacagatccggaagctggtcgtgttgagtcacccagcatgtgggataaagcctatgctccgactctcgatgaggtgatcttgtacgatctcgatccaagcggtatggtgtctcgtatggagggagccattcgcatggcagcgaacgctcagggctttgagaccgaaggttttggatggcagcgtgaagtgaagagtgatgaggtatacaataccaaggctctgcaatttagctatttgcaaaaggttaaaacgttactggaaaaacaacagaataccggttcagaggataccagagcacattataaacatctgctttataaaattaacagaatgctcgatgttcagtaatcgctgaaagttactagttaagggctatcacattgtgatagccttttttttgtcctatttctatcccagtcccttccttcttcgtttattaggagtgtttcgtgcttacattgttgttacgtgtggaggaggatgctttagtatgaagtgtgtgttagaaaattgaatacgcgtttcgattgggagtgttgttttttaggtaattgttttccatcagtctatattaaaatggcgagcgtttttgctggcgagggaacttgtaatcttcttgatttgattcaaggaaggatgcgaaatctttctctgatgctctttggggggggatattaaaaataaaacagccgccttcaaggcggctgtttatgtttatgctattggcacgtggactggtagatcagaaggaacaacctattttaaagctgaacactccagctgaactatcgagatattccacatcaaaagctttaacaaaatcgtaatctactccgatataaccggtaaatccctttttgaaaaaacgggaatagcagaatcctccacccgctgagatgcgagatgccgttaaatattcgaattcacgattgaggtaatagtcgctctctttgggcgtttcttgatctccagatacatcagcgtacagaccgtcatttttcaacgttccactaccgaaaccataaccggtaccaagtcgaatcgagtacatatttcgattggtgatgatgttacgtaagcccgaaagatatacgcgtgtcgaagtggtagaatgtttacgataataggggtagattgaggtctttaaattacgctgccaaagatcacctccacctttcagaacccatgtcggttgaaaggccttcactccgagattgagcgtataaaccgcacttgcctgaagggttttgcgtgacgatacctcgttgctgccgaaatattctacgacgctgttgccatcagaagatccagatgacattttgtagatattttcgtctccagttcccttttcgtaggctgccgctattttcaacgtatgtacggtttgaggcctgtttaccgagagctgtccgttatattcgaggattgtggcattctgttcatagaaggtgaccgttttcgaggatctttcaccataatatccagaccggtctttgaaggttaactcattgaaccagctgacctgtggcgaaaatttgaaattgatctgcaacgatgccccgtgaaaacggttaaacaggggttgtgctgcagaggaggcgtatcctgattcgccgataaacacctcttccataccataaaaaccgccgtaactgatcagtgattcgtaaattttactggattcaccgctgatctggaacttaatggattcaacacttcggcggtaaaaatagttcagaccgagatcgaccactttattgaaccggtaacatcctccggccgtcaaagttaggtcgagccatgagttgatgtgacgcaagtcgcgcatttttgcgtagttggctgtcgtgtaatcaattttcgctccgagactgaatttttgggtgacagccacacctaaacttccgatcaaatggtaagtctcaatctgtttttttccgagacgctctgggtcggattcgacaatatcgaatagattgtagtaaggatcgagaaaggcggaaccggtcatatttttcccttggaaattatcgtatgagaccttcccgtacatgacgattttcggattgagtcggtaaaaggattctgtccgaatgccaatatcgtaactattgtctgattgataatagttgacaaatcccccgttgttcttggtaaacgaagcttcaacgagtgatatattgtttacgggaagtgacagcagtcctgccgcattatagctggttaaccagccatcgaatcctttgatgtattcgaaatcacgaagatttgctgccggaggcagagcctctgcctgaaaagcaaaggcccctccgaacaacagaaatagtccgactttggtgagtctcataaatttcataaccgattccagttctttatttctttaatgaggctgtggctctcatgtggaaatctttcgatgagttgttgttgtcttggtaaacaatccgtgcaccgttgttgagtgaagcctctgcatcgatgccgcttggatcggttgtgccgtctgctccacctgcgtagttgtagacgattttaccagcattgctttcgatcgcttcggtagcagctttgtctacgttacggtacagagagtaaccttgagcactggtcatctcgattgcaccggcatcaacagctgcggtcaaacgttttttgtttttgttattgcctttcacaaatacctcgataccgtcaattacccagctctcaggaaccatcttgcgggctcttgaatccatcactttgtcctgatagtagttggtttcagaactcaagaagcttgacagcgtggtgccatcgtccggtgagaagataaagagtgccggggagttgttgctaacagtccagtaggtcgaggttccgtaaatatagcctttgagccagtgagaagacggaatctgttcagacggagtggggtggatggtagtgttgttgaagttcgggtcatacaccacatagttatcagcaccactcaggtcgacagaatgaggataggtcaaggtgtgattgatcgcaccactcaaagctacgaccacttgtttgccgggagccaattcaacgtctccggtgaatgcccagtaagcttgacctgctggtacggttttctgtgcttcataccacagttttccgtcagtaccataatcatagttggtggtgttggttgagttggccggataaacaactgcaatgcaaagatcggtcaaaatagcaggttcctcagagttgttgtagaggattacatatttatcattagcccaggagcgggtttcaccgtcgatggggcaaccaccgcaatagagctctttgataattacttgacccaatttggattcgctcatgttgatctcgacaacatcgtctgtcttccaagcttctgtaatggtaacatttgaacgagtgccactcaatacgaaaatattaccggtttcagtccgtttgtcggttgctgagaattcatatacacctgccggcaatttgataaccgctacaccgttagcatcggtggttccactataagtcgcttcgttgatagtgcttcttactgagacaggcacatttgccacagcagtgaaattaccatcgctaggataaaccaattggacggaaacatcatacgtttggtatccaccgccatcttctttttcacaggaggtactaagcaataacgtacctgccattaatgcatagagaaattttttcatcggttgattaatttattgttattgaaaattaagttagaattttactcttaaactcagtccgtaatagaaactggggatgtacgatgcgctaaacagcgaaatttcgttaccgttttgggttgaggttacttttcccatgttattgaagaagttgttggcatagaaagagatagatgcaatatctccgatctctttggtcacgctgatattggctgcatagtaaggtgagattcttcgtgaattgaatgagtatccgtatgcagatttgacaaccaaacgagccaactgatcatagagcgccggatcgttggttttggcccaggagaacttctccataaacggaacgggggtcggatcgtcaaaggagacgtaatattgcggataggtaattgtgtattgatttttgttgtagatgtccggactgccgggatcatagctgccagattcaacggtatagctacgattccctccactccattctgaaagactttgcgagaaggagtagagtccgctttcaatacgcagagagagaatcatgcggattttggggatgtgcgtggtcaaggtcaggttggcacttacatctttggcaatacggccattggctgcatcacgtccacctacgaagtatccaacatattggtagggttgtccgtcagtcatgacaccgcccggccaatatggaacaatgttttcatcgatcgtcttataataataataggttccatctatgcgtacgctggttcttaaggctttgatctgtccgaaatcgacaacccattccaaacctctacggataacaggagctccgttatcggcgtatgtctctttcatgaaagagttgcgggtttggtaggccagtgagacatctgaatgggctccagtacgatcggatactgtaacaatacctgtttcacgatcgatcgagtatatgcgatctgccgacgggatattgattccttccagctctttttggctggtaaatttatagctgtacggatcgtaacgatcacggatgacataggtgttacgcgtcttattggagtatgcaaccaatgagaaagtgatcccttttatgtcaatctccattccgatttctgcctgacggttgtattgccaccgtaaaccggagttatattccagttggtgcggtttaatataataggcatagaatgtactaccggtagctgttgttccgggagcaaatgtcaaaatatcctcataagtgggctctggatagagaatgttgaaagaggggagtttggtcgccaacccccaacttcctcgtatagaaaggtcgcgtacaaaacgcttcgaatcatattgcagaattgtatacttagcgttgaaacgaggtgagagactgttcacattaccgtagccagagtgctgcaccatcgtgtgttccgatcgaataccacccaccagatttaatgaggttgagccaatcggaataattgcattttcctccaggtagaaggcaaggttattcatgaacggaacttcatcataacgatactcacgccatgtcggagcataacgcatatcttcataatagagtccccgtcccaagttcccgctgctggtgaagttcgcaccgaattttatgcgattttgaaccttgccgaatctgcgggaccaattggctttgaggtggatattgtaatccagcggtttgttgtctgtgaaagcccgttcgtaccagattccggcaggaattaatgtgatggcagcgttgggatcgacatcatattcggttgccacaaagtaaccctcttccgtgccgtgttgagcggcgactgaggaagctgcggattttcgtgcatagttttcactcagtcggtccgaatagctgattgaagcggacaagtccacattggtcagccatggtttatctgccagccaattcaacgtaaagttacttcggattgtattgtcccgaacctttgagtaggagttcaacgcagcatctggatccgctttggtgtctgatccaccgacatttcctgtcagtccgaaagtgaaacggatagggcgttcagaacgccgaaacgtatttgagtagatcaatgacagggtgttgcggtcataggaagagtagggtgaagccaaattggtgattgatttggtccgttccaaactaaagttgaggattccggcggtctctccaagctcaagacctttgtttagagcgtattgtttagtccgagggttggtagagaaagagacttgccagggcgatttacccttacgtgtattgattttgacaataccattactcatatctccgtattcaaccgaaggtacgccggaaatcacctctacagattcgacatttgctgacgagaggttacgtgtactggctcctgccgtttcgttgaatactgcattattggagaggcgtactccatccacttcgactgcggttccaaaacttgcgccggattcacctcctgtacgaatctcgaatcgcggggatgtggtcaagttggggttaatagtctttccaccaggcattaatgccatcaagtctgaaacattcaccatctgcatgtgatccatggcagtacggtcgatggtacggctggtagtcgcactgttttcatttactttggccgtaatttcgacatcatcgagcattaggctgttctgttcaagataaaacttgaggtcggtagtatcgctatgaatctcaatttcatgagtagcggtaacgtaacctaaacaggaaattacgacttgaatttttcctttattgacattttgaatagcaaaatctccttttgcatctgtcatggcccattggtcgctttgagtcaaaagaacaacggcggcttcaacgggggcttttttggtacttaatacccgccctgagagagtgtaggtttgggcaaaggattggagaggaaaaagaactgaaaaaccaatcgaaaataagagcgcttttaaaaggttagtataacaatggtagctcatgaaccatgttttgtttttgttacctgattaagaaatttggcacaaaatatgtaaaatttcatgtttttacaaattattcaacaaaatccttatgttttgtaggtgggttaagtgtttgaaatctaaatggaaacattgtttttatttagatgaggccgggtgaaaatccccattagtggggatgcgaacattacagatcaatttgcattttagagtctacatcacactttcgtcctactagttcaaaagttttttagacaataaacatatttgggaatagatacctaattctataggatagttattgttcctaatttaggatagagactttgtccacaaatttgttcttagttgtattgttgttactgtggaaaatattggtatatacctttaacgtacaaagataatcacataatacagataatataataatgtctgatccttgattctgtgcctaatattgtaagaaagggttacgttattttcgtggctttttctacctatctattgatggatattgtggatgatactgtgacaggtagatgtggtgagagagaatgtcataaaaagaaagaggaaacacttattaatcgtgtttccccgttccacatgttttcacaacagaaaaatctttattgtgatttgctcaaaattgttttacaaatatagcagttcttttgttaagatcaaattttttgatcctgctcattttttttgtatctttaagaaaacgaatcgattataagtatgaaaatgatattaggattggatcttggcacaacaagtattggttgggccgtggtgtcagaagacgatcagacgttcaggttggatagtttgggtagccgtattattccgttgacgacagacgatgccaatgagtttctttccggtaatgctatttcaaaaaatgcgaaacgtacgcaacgacgtactcaacgaaagggctatagtcgctatcagcaaagacgagcgttgttgcaacagtttttgcagcaacatgccatgcttccggatgaatcgctgaaggggctgaataaactttcgttgtgggggttgcggacccgggcggtaagtgaacaactctcactgccggagttgggtcgggtgctgtatcatcttaaccagaaacgtggctacaaggcaactaaagcagattatgatgcagacggcgataaaaaacagggtgagtatgtaaaagctgttatgggtcggcatcgaatgattaccgaacggggtattacgattgggcagctgttttttgagaaattatcggaggacccgtcctatcggatcaaagagcaggtcttccctcgcagagcttacgaggaggagtttgatcggattgtggcatgtcaacgccagttctatccgacgttgtttaccgaggagaacatcgatacgctgcgtaatcggatcatctattatcagcgagggttgaagtcctgcaagcatctggtttcgttgtgtgacttcgagaaacgtgcgtacctcaatgctgctggcaaaacggtcttcaatgggcccaaagtggctccgaagagttcccctctggcacaggtttgtaaaatttgggagagcgttaataatctgacgttgaagaaccgtcgaggagagacgttggagattgctccggaggagcggcgtgccctgttcgagcatttgaacacacatgacaaattgacattgaccgatctgtatcgtattttgggaatccgaaagacagatggatggtgggccggcaaagcgatcggtaaaggattgcagggcaatacgacccgcaatgcgttgcgtaaagccctggccggacagtacgacgagttgttgcgcttcaatcttacgacggtagagacgaatcaagtggatgcggagaccggggagattatccagatggtttcggagtcctatttggatgagcctttgtatcgtttgtggcatgcggtctattcgattcctgatcaagaggatttgagcaaaacgttgcagaagcagtttgggatcactgatccggaggttgtggagaatctttttgcgatcgattttgtgaaggcggggtatgccaacaagtcggccaaggccatgcgacgcatcttaccctatcttgaattggggcttaagtatgccgaggcgtgcgaagcggcgggcttccgtcacagcgagagcctgaccgtgcaggagcgtgagaccaaaacgctgttaccgaagctgcgacagatcgaaaagaacgagcttcgtcagcctgtcgtggagaagatcttgaaccagatggtgaatgtggtcaatgcgttgatggatcggtatggccactttgatgagattcgtgtggagttggcgcgtgagctcaagcagagcagggatgaacgcaacgaaacgaccaagagaattgacaaaaatgaacgggagaaccgggcagttgcagagcagatcgcgaccgactaccagctaacgccgacgcgtaaccggattcggaaatacaaattgtgggaggagtccggccatgtctgcatctattgtaatagtgtaatcaatgccagtgaattcttacaaggtgttgatagcgagaaggagcatattattccacgttcgttgtttttcgatgacagtttctccaatttggcctgttcgtgtcgcaagtgtaacgctgctaaagggaatcgaacagcctacgattttatgcaacaaaaatctgaagcggaatttgcggactacctcgatcgggttgaaaagctatacaaagagaaaaagatcagcaagaccaaatacgaacggttgttgacgccggaatcgaaaatacccaccgattttattgatcgtcaactgcgggagagtcaatatatcgctcgcaaggcgcgggagattctctccggggtgtgtcggcaagtgacggcaacgagtggttcggtgaccggttttttgcgacgaacctgggggtgggatcgtgtgttacatgatctcaattttgaccgttatcgtgcggcgggtctgacggagattaaagatcgggaacacaacggcagacattggcaagaggaggagatatgtaactggaacaaacggttggatcatcgccaccatgcgatcgatgcgttggtgattgcctgtaccaaacagggctatatccaacgactcaatacgttgagtcaatggaaagatgtctcttttgcgccgacagaagctcaaggagaggtttatcggaccaagcggtccaaactggagaaatatattgttgcgcaaccccatttttcagtgcaggaggttcagcaggcggtccgttcggtactggtttcgttcaaggcgggtaaaaaagcggcttcgaccggcaaacggtatagctatcgacatgggaaacgggtgttgatgcagcaacatattttaattccacgcggtgctctgcacgaagagagtgtttacggtgtggtgaaccgttacgcgaaaaaccgtcgaggtgaaacggtgatcaaacagaagagtgttttgcgctatccgttggcctcgatcgagcgcaaccagatcaattcgattgtggatagtggtatgcgaaagttggttcaacagcgtttcgaccgccatcccgggagtgacaaagaggtgtggaaagatttgcaaaatgatccgctgctgttcaatggggtgccggtaaaatcggtgcgtcgtatggcccgaccggatgtctcctcgttgatccatttgcatcgaggcgggtatgtgttgccgggcagcaaccatcatatcgcgatctatcgggatcgtgaaggaaaactgtacgaacattgcgtcaccttctggcaagccatcgagcggaagcgatatggcctgccggtggtgattacccatcccgaagaggtgtggaatagactcccggaaggagtgcccgacactctgatggagcagttgcccctgccggagtattcgtttgtcgtcagtctgcagcaaaatgagatgtttgtcatcggtatggcgcccgaactgtttgaggaggcgatgcgcaatcaggattatgctttgttaggccaatatctatatcgggtgcaaaaactaagttcaaacgattattggtttaggctgcatgttgaaacgggtacagaaagtgagaagagtgatagtttagccaagaagttttatcgattcaaaagtctcaaagccttttttgcagctaatccaacaaaagtacggatatcattattgggtgaaataagtaaggtatgatcaagaggacgctctattttggtaatccggcctatctgaatctgcggaatggtcagttggttatccatctgcccgatgctcagggggtggatgacgctagcggcaaaaataccatccccatagaggatattggtgtcgtggttttagatcacaaacagatcaccatcactcaaggggtattggaggcgttgttggaaaacagggcggcggtgattacttgtaatagtaatcgtatgccggtcggtttgatgttgccgttgtgtggcaatacgactcagaatgagcggtttcgtgctcaattggatgcttcgttgcccctgctgaagcagctgtggcaacagacggtacaaatgaagattgccaatcaagccgcagtattgcaaatgtgccgaggggtcgagacccgtaatatgttgaaatgggtgaatgaggttcgcagtggcgatgcggataatctggaggcgcgtgcagcggtttattattggagcaacctcttccccaatttcaaacgggatcgcgagggagaaccgcccaataatttgttgaattatggttatgccattctgcgggcaattgtagcccgaggtttggttgtcagcggtctgttgcccactctgggtatccatcaccacaaccgctacaatgcttactgtctggccgatgacattatggaaccctatcggccctatgtggatcgtttggtggtcgagctgtttgatcgaggagaggtcaccctggataaagcggctaagattgcacttttgggaattccggtgcttgaggtcaggatcggcggtcaacgaagccctttgatgattgccgtcgggtggaccaccgcatctttatataaatgttttagtggtgaaagtcgtaaaattatctatccagaaatataatggatcgtttttcggaatatagaattatgtgggtattagtatttttcgatctgccgacagagaccaagaaggagcgcaagttgtatgcgacgtttcgtaagcagttgatggcagacggatttacgatgttccagttttcgatctatttgcgccattgcccctcgcgtgaaaatgcggaggttcatatcaaacgggtcaaagcgtccctacctccggctggtcaggttggaattttgtgtatcacggataaacaatttgggcagatggaactgttttccggtcgcaaggagatctatgaaaaagatacaccacaacagctggagctattttagggcggcacaagtcatcggtttataaaaagaaaaacgcacgagcaagtgcgtttttctttttgaaacaccctatttttgcgattgtaaatgtcgttgtaacttattgatttttattatgtttgacaggttctggtgtttcagacctatcaaagatacaattttgaaagcaaatcacaacaacaacgtggttgcccatgcctaccggcttggtgtttcagacctatcaaagatacaattttgaaagcaaatcacaacagtaatccagctgcggccccagtaaactttggtgtttcagacctatcaaagatacaattttgaaagcaaatcacaacgaacgacgagagtatcaaatcgggctaacgggtgtttcagacctatcaaagatacaattttgaaagcaaatcacaacattcacaatgccacttcggatattgttacgggtgtttcagacctatcaaagatacaattttgaaagcaaatcacaaccgtatgactctttctcatcttgatatatttggtgtttcagacctatcaaagatacaattttgaaagcaaatcacaactggcataggataacaaacgctgtaaaaccgttgggaaggttttaatcatcgttgatgcagattgattacatctctttgagtaattgccttacttcggcaagacgattctcaatcattgtgatgacctgatcgtccgccttgtactcgcgggccacttctatgtacttttcaagtactgcaatccgatattctttttgcaaaaaatcggcaatccgataaatggatacagttgctggattcggcagatccacctcatattctttcggctgattttgctgctgttcttttgctttatgaatctcttcatccattttacgctgtttgattttatgttggcgtttttcgtaagtagcaaaaatccaaatcacaaggaagagacttattataaacccaatcataatatttacttttatatttcagtacttacacatattgtacccctgtataggtcttatccatgatatactgatatccttcaacaattattgtttgataaacggtctgggccaatggtgtcaaactgtgagatttctgatctggtattttgtatttgtcaaagtacagttttgcgaaggaagcacgacagtcgacgttgctttgttgtcacaggtatgggtcacattcattctgattgattgaggtgagaggataatgtgccttttcgtaggctatgaccacctccgaaaatatggtcagctctatggcggatggatccgttgcaggtgttgtttcctgcactacctgcaaaagctcttcgatcctcttgcaggcatattcgtattgagcttggttgatatgaatcatatagcaaagtttattggtgcgcagtatgtagatcaatctgtatctgtgccgatccgtgaatcgtgattcaactaagtgtatagtttatcctaaatttagaaaacagataatccatggagggaattgaagcggtttttggtgatgctttctctaattgggttatgcgtttttctgtcaatcgaaggggcttatgcagtgcttggtattcgcgggcaatttctatattgcgctgcagcactacaaggctgttttcgctttcaagatatgcgatgatgcggtcaagggatgatgtagcggggttcggaaaagaaatggttaactcaatgtcactctcttcagatgatggggtggtctgtgtccggttgcgagccattttacgacgacgatttatatcggtatgtcttgcgctcatgaaaccccgtgtaaaccatatgattataacaataagtccgaaaattatgataagccataaagtgttcatggttaaattgttatatgttatataattagaaaattacggaagtgaatgtacctgtaaacaagatcgatcatgctgagtacaagatacaaaaaagagttgtgacaaataatgtcgcaactctttttttgtggtgggcccagaggggcatgatcccacgaccttcggattatgagtccgctgctctgaccaactgagctatgggccctgccttattgatagacaatcagagtcaaataacaagttatcaccatttgtctctaattgtcggacacaaaagtagtgcatttttaccaatctatcaatagctcaaatccaaaggttgtgaaactccatatataattgaatataggacgaagtgtagccctgtatgtcagcatagggcgtgaaatagaacgatgtttggttgggtgattggggtgttatgtgggtaatatctgttgctcagatctattttagagattatttgtggagtattcagattggcagtgctaatcaataacgatcccgaacgtaaacacgttcgggatcgtacaatcgattatgttgagtttatttgcctgcagcgtaaaactggtctcgtcccgtttgtagaaatttgacgaactgatcgatgtcgagattgtatccgcgacctggaaccagttgtttccctgtcgtatcgagaatcatgtagtagggctgcgaattgatgccgaactgtttatgggcgaaatgtgcgtttattttccctaaacctttcaaaactttgccattttcagttgtcacccaatcctcttgcggtaactcttttttatcgtctgagtagagtgctacaattacgaaatcattgcgtaacaactccaatacctgcgggtcagaccaaacgcgggcttccatttcgcgacaattgacacagccatgcccagtgtaatccacaaacagcggtttgtggactttgcgggcgtattccaacgcttcgttgtagtcgaagaatccgttcaggccgtgtggaagacttaaaaaatcactgtatttcggtgcaggagatccagccgatgcggtggaagatggggctgaaggggttggagtttcagctccgagtacgaagtcttgtgtgtgcatcgggggcaaataaccggataacccttttagtggtgcaccccacatgccaggcagcatgtagatgacaaaagcaaaggtaatgatcgccaacagaagcctcggaactccaattttttgtgtgtcgctgtcgtgtgcgaatcggatcttgcccagtaggtatagacctaacagagagaagatagtgatccacaaagccagatagatctcccgatcgaggatgccccaatggtaggtttggtcagcaacactgaggaatttcaggccgagagccagttccaaaaatccgagtacgactttgacagaattgagccatccgccgctcttgggcaggtttttcaaaagagaggggaatagagcaaaaagggtgaaaggcagggcaaaagctgccgagaaggccagcatggtaactacgggagcccatacctctcctgaggtagatttaattagaacggagccgacaatcggtccggtgcaggagaaggagaccagtaccagggtcaatgccatgaaaaagacaccgaccaagcctcctttgtctgctttgctgtcacttttgttgatgagccaactgggcatcgtgatttcgaaggcaccgaaaaatgaggctgcgaaaaccatgaagaccaggaagaagatgatattgggcagccaatgggtcgccagccaattgaaaatatcggcggtgacggcttctcctccaatgatctgggtgatcaggataatgacagcaatcgggacggtgtacagcaggatgatgcagagtccatacaatgcggccatggtgcgtccgcgggtcttgttttcactccctttgaggaagaatgagactgtcatggggaccattgggaagacgcaaggggtaagcagtgccgcaaatccccacaaaatggcctcaataatcgcactccaaagtgaacctccacgacttgacgaagtggatccttctgtgccatcagttgaagttaattcagttgcagccgaagagattgtttcggatatggaattttcggttgttgaagaatttccattgagtgttgaaatcgctgcgttttgggtgtcagttcctgcaccctcggttgtagaggtattggaatctgtcgcttgtccagttgttgagttggtgttaccggaggtggatttacccgtgtttgtgggtgtagcaacttcctgctgggcatccgaattttctacgcggatgatcaactcttgatcggacggcggaagacaactgctctcatcgcaagccatccattcaactgttgctaagatgcgggcttcggaaactgagggggccaatttgacctgctgtgtaaacgtggcctctcctgcaaaggtgccgatctccatttcgaaaagaggatcgtatttttttgtaggggtgcttacctgttttacagagccgaccagcgaatagcttttgtctggagtaaaggtgatggttgttgcattcggcccaccttcatatggccccatgtcatacatatgccatggagcgtctatgcgagcggtgaaacgaatcgtatagactccattagaacccttttcgaccgaagttttccaatgtacgggattttcttgtgcactcaagttccctatgctggccaaaacaaccaacaaaagcagtccgatttttttgaaaggtgccatctcgttgaacttttatatatgtcgagcgggctggtacctgcttcgtctttgaccatatatataattatggtcagaaacggaatcaataggctcgctcgtttcggttttcgtaaaaattaataaatgctttattggctactacgtttccaccgggggtgggatagttgcctgtaaaataccagtcgccattgtgaaccggaatagctcggtgcaggttctcaacactttggtaaataacctctaccttggcgttgatgtcgggtgtagtgacaatttgtgcaaccttatccgaaatctcctgatcggtaaatggttcgtaaattttctttacgcaattgaccacttcgctgcgctcgagccccatctgaattttggcccggtgatatacatcgtcgatgacatgattcatgccacgctctttaagtagagcgatggccgctttgaaggcgacgaaatcacccaagcgtgacatatcaatgccataacaatccggatagcgaatctgtggcgcggacgagcagataatgattttcttgggtttgaggcggtcaaggatgcggataatgctgcgtcgcagtgtggtgcctcgcacgatcgagtcatcgatcacaaccaaattatcttgtccgggatgtacggttccatacgtaatgtcatatacgtgggttaccaagtcgtcccgttcgtcatcctgcgtaatgaatgtgcgcatcttgacatccttgatggctaccttttcaatccggggccgataatgtaaaatttcgtgcagacgttcttcggtcaggtgctctttctcggccatgatctttttgacccgggtttcagcacaagtggcatccaacccctccgtcaatccgaaaaaggcactttccgcggtgttgggaatgtacgaaaagacggtgtgttcgatgtcgtcatcgatacttttcagaatttgcggtatcaagagtcgtcctaacgctttccgttctttgtaaatatcttgatcgctgcctcgggagaaatagatacgttcgaaagagcaaggacgaacctcttgaggggcaatgaagcgctcgatggagtagttggcatcccgacgtaccattaaagcatgacctggggtgagttccagtacactgtcgtagctgacattgaaggttgtttggattacggcccgctcagaagcagcgacgattacctcatcatctatataataataggcaggacgaatgccgcacgggtcacgcatcacgaacgcatctccgtgaccgatcatgcctccgattacatatccgccatcccagcggcgtgccgatagggacagaatctccttgaggtcgatgtgttgggccagcagatcggtgatttcacgtttggagtagcccttctctttaaagtagcggtatttgtcttcgttttcgcggtcgaggaaatgaccgatgcgttccagaatagttacggtatctgtttttgccgaggggtattgtcccaaatcgaccaaacggccgtacagttcgtcgatgtttgtaaggttaaagtttccagctacaactaagctgcgggtcatccagttgttttcccgagagaccgggtggacattttcgatgttgttttttccgaacgtgccgtaacgcaggtggccaagaaagacctcccctgtgaattccatgtgctctttgagccaggtcggattcttcaagatcgaaggatctgctgcgaccgctgtttcgatcttctgatgaatacgttggaaaatatctttaatgggggtcgcatcgtttgagcggatgcggttgatgtaaacatgtcctggcttggggtaaagtttgatgttcgccagaccggcaccatcttgcccgcggttgtgttgcttctccatcaggatctgcatcttgttgaggccgtaaaacggggtgccgtacttctttagatagaaatccaacggcttgagcagccggacgaatgcaatgccgcattcgtgtttaatcgaatcgctcataatgatctcaaatatggccaaagatacgtctttttcatgggatgtgataaaagatacacattttttctttaagagaatttgcacgaattttgcgttaaaccttgttttgcagagaagttttaataccgtattggattcgcttatcagactatcaaaattaccgattggaaatatttggaaatcggaaacgaatcacctttctttgtgatgtaagaaaaatcagttagacaaccatttaataaaattgaaactatgggaaagagtgttaaagggactagaacggagcagaatctgttaaagtcattcgctggagaatcacaggcacgttcacgttacaccttttttgccagtgtggccaagaaagagggttatgagcagatttcaggcgtcttcatggaaactgcagagcaggagaaagagcatgcaaaacgtttcttcaaattcctcgaggggggtatggtagagattactgccagctatcctgccggcaagatcggtaccacgatggaaaatttggccgctgcagcagcaggcgagaacgaagagtgggctgaaatgtatccggaattcgcagctattgcagaggaggagggtttccccgcaatcgcagccgttttccgcaatgtagctaccgttgaggagcagcacgagattcgttatcgtaaattgttggctcacgttgaggctggtgatgtcttctctcgtgatgaggagatcttctggcagtgccgcaactgtggttatgtacacaaaggcaagaccgctcctgagagctgcccggcatgtgcacatccgcaggcattcttcgagccgatgaaacaaaactattaataatctgcgggtctgtttttgcagatcgtatgattggtaaagaaaagggatggcattcatgccatccctttattgtttatgtaaattacctttacaaattactgaagaaccctttgatgaggactctgcaatttgtaaaagtagatccgtgttgcaatatccctaattgcagatttctatatagttcggtgtctcccgtagcgcaattttttttgatttggttaactcgattttgagaactgtcccgattatcgagcccataataacaaatctatcttgcgatagcttcgcattgcagtgtgcactgggtcgtatcggtaaaatcggattgcgctttggtgggtacttgttataaacctatgcggcttcggccggatttttaccgttgaggtgaaaacccggcgaagcagtagggtttagtcgtcatagctactgccgtcgaaacagtgcgtacagatacactctttcgggagtccaatcgctttaaccaaggtttcaaccggattgaatttcagagagtttacattcatctgttgacgaatgctctcgacgagatcgcaatactgttttgaaccggttgtggcgtacaacggtaaatttttgtttgcatcaccctccaatttgaggatcatgcggcgggtaattaactccatttcagattttgatgcactgaaattgagaaatttacaggggtagatcagcggtggacagctgatgcggatatggatctccttaacgccataatcatataactcagctacgtggtcccgtaattgagtgcctcgtacaatcgagtcgtcgcagaatactacacgttttccacgaagcatttgtttgttggggatcaatttcattttagcaaccagctcacgcatctgttggttggatggggtgaagctgcggggccatgtcggtgtatatttgacaaaaccgcgtttgtatgggatgcctttcccggcagcatatccgagggccatgccaattccagagtccggaatacccgaaacgaaatcggcttcaatttcatcgtttttacccatctcgacaccgcagtcgtaacgcatctggtcaacattgttgccttcgtatttgcaaacggggtaaccgtaatagacccacaggaatgagcagatctgcatcttcttgcccggtttgcgtagttgggtatatccgtcggcgttgactaacagaatctctccaggaccgacaaaatagtcgatgttgtaacctaggttgtcgaatgcacagctttcagaggagagtgcatagccatcggctcctttgcctaagataatcggtgtacgtccatatttgtcccgtgctgcaatgatgccgttctcggtcaataacagcatggagca

SEQ ID NO: 4123 - DNA, 23426 bp, synthetic construct
  misc_feature 1..23426: note = Synthetic
  source 1..23426: mol_type = other DNA
aaattgcgaggctgaccgggacgtgccttaatgactcctgttatacctccgtacgtttccatatcccgcaaaaccgtgtcgtaaaacgtcgagaaatctctatcatactcactccacacatcggtaaacgtcttggtctcatcgtggaataccgtatagctcggaacaacttcttcccaataacccaacctattgttactgtcgaaatccatacggaactccttattcgcattcacaaccctcataatcacataaagcatcgtaggaaagaatttcaaaccacgatgcttgcgatatgccgccaattcggttatatcgatattcgcatttaacgtgtaccggcacttgatacgattatagtaataatcgaaataaatatctcgttcccactttgtccggtctataagatgaaaagtattattcattgctatctccatttatattcttacacccttccgaatatccgttcgcctccagaaaagcgccccgtcgattttcccgcaggtatcgttcaacataacaagacggccgctctcatataggaaattgaatatcgggcctccgccattcgccacaagctgccataccacggcatcgacatcgtcgggagtaccccgttgtgtataccggcgtcccgaataagacggcagcgactcgtccgctctatcgacaggagaaagcgtaaaaacaccatcaccgctatatatcctgctttttagggtcaaaatgtaacaaaaggtgtcgggataaagaggtccttcataggtacacacccgaaaagcgcccaaagacgaatcgttttcccgagaatcccccacaacgataccggtgatgccatcggcaccgccgattttctcgacacctctattttccgtccgggacatacaaccgcacaaaagcaaacacagcgtaaacgccaaaggcaacattcttttcatgaacgactttcaagttcttcacaaatatatatctatccatgtattttatcaatttttcggtcattaatcgtccaacaatctgtccgacatttccatcggaataaccgtaacatctcagtcattaccaattaatcgttatctttgcaaagtcttacgacttactgctctgtcatgataaaaacactcatcttcgatttcggcggcgtcattgccaccataagccgcgacaaggctgtcgccgcatttacccgcataggattgaatgacgccgatgcccggctcgacaaataccaccaatcgggaatatatcaagcactggaagaagggaaactcgacgaaatcggattccgcaccgaattgggtcgcctttgcaatcgggaactctctttcgaagaggtaaaaaaagcttggttgggatttttcgtagaagtacctccggccattctcaaatacctcgaagagttgaaaaaggagtatcgcattctgatattgagcaacaccaatccctatgtgatgtcatgggcatgcagcacggaattttcgtccgaaaggaaaccactcacccactatgccgatcggctatatctgtcttatcaaatcgggtataccaaaccggctcccgagattttccgacatctcatcgacgatagcggaatatgccccgaagaggctctctttgtcgatgacggcgcatcgaatgtaaaaaaaggagaagaattcggtttccatacattttgtccggcaaacggcagcgactggcgttccgacctctcggctcttctgcaacgactcgggtaaagactcgtttcgacagcaaacctcgaaaagcattatttcccgacaaaacccaggaatcatctcgcgcgcatgcacggcccgatatgacaagtatttctatcgctgctcatcatcgggagaagtcgggatttcctcctctttaccgccaagaataggcagacatattttatatttcacggccaagatacgcgtaacgaacacacccgatccaccgacaagctggcatacatacgactccatacccaaccgatagcatacccagtaaaacacaccaccgacaacacatgccattgcatatatctctttcctgaatatcagcggtatttcattgatgaagacatcgcgtatcacacctccggccgcaccggtaatacttcccatgataactgccacccagaaaggataacccaatgcaaggcttttaccagcaccgacgaccgtaaaaagagccagacctatggtatcgaaaataaaaaaggtattgtcgagacgcaccagtcttttctcgaaaacgataacccataccaacgccaaccccgtgcaaataaggtacatgggatcggtcatccatgccggagtaacatcgagcaaaagatcgcgtatcgtcccaccgccgatagcggtaacaaaacccacgacatacgcaccgaaccaatcgaaacgtttggccgacgccaagcgtatcccgctgatagcaaaagcaaacgtaccgataaaatcgagtatctgaacaaatgtcggcatacggaaaagattctaaatatcttttgcataagcgcgacggcgcttatgcaactgttgctcgaaatattgccactgttgttgtaccttattgttggttaccatctccggattggtttcggtatatttcacgccattcttgatgaagtaaggtaaaatatcatcgaaaagtaacgcgttagcccccatattctgataatcgggatgtatggcaacaagcaacagatctacgatgtcgtttttccctttcaacgctttcagcaagtgaacaaacccgaatgggaacatttttccatgcgctttctgcaacgcacggctcatcgacggcatggcgatacccacacccaccaattcatctttctcattaacaatgagcgacaaatattccaacggaaccatcggcacatacatttttacataatgatcgatctgtcgtggagtaagcgtagaatatccgtatagatctttatacgcctcgttgataagctcgaatatctgccgaccataatcacgagccacatcattgatattcgtatactcacgaatcacgctacgcaaatgatatttctgtcggacaatctcggctatccgcgcatgtttttccgacataacaggaggaaccgtgagcttgaactctacccattcgcattccgtttcaaatcctcttcgtaaaatatggtcgacataataaggataattataaatagtcgccatcgtccccaactggtcgtaaccctcgataagcaatccctccggatccatatcagtaaatcccataggcccgaccagatgattcatacccttcgaacgagcccattcctcaaccgcatcgaaaagcgcatcgctcactcgcgcatcatcgacaaaatccacaaacccgaaacgagcctcttttttcccagtcttttcgttgagattccgattgatgattccggtaatgcgacccaccggtttctttccttcataagccataaaatgcaccgcttcgcagaagtcaaaagcaggattctttgccggagtaaatgtattcaattcatcggccaccaaaggtggtactttatatggatttcctttgtaaagatcgatattgaattgcacatattttttcaaggcgcgacgtcccgatatttctcgaatagttataggctccatgcttaatcattttagggtggcaaaaataatgaaaaaggcaaacataatatcagaaaccctaataaaattaaaaaccggaacatcataccgccatacggcaaaaatattccgtacaggacccaccaccggccggagaagaaaaatttttccggaaatattacagtctcaacttcaagccggccaaaatcgtatcgggacggaaattgaataccgcattcatttctccggccatacacaaaccgcaatcacggcagataccgagctcctcacccgcacagttggcccgcttatggtcggcatatatgaaattcgttacccaacaacgacgtttgaaacgattatgcttcatcaatctaagacctgatatcgaattcatgatcggatagccttcccgtttcatgcgaatgaccgtatcgattacctcctcccgctgctccctcgttatcataagattctcggcatcgggaaaaggggtataaaaattgatggaaatactttcgatagccgggttgttcttgacatattgtattgtctcggcaaccgattcccagttatatttattcacaaccatatttacactgagatgcggatgtccgcattcggcgatatttttttcaagtcgagcaaaagtcccctccccccgaatcatttcgtgatatttcccataaccgtcgagacttacccatatactatcggcatggcttccccgaaacggcaactgggcgttggtcgtgatcgtcgccgagaaaaagccaacttcacgagcaagatctattacatcatcgatacggtaatcgccatcgcgccatatcatcacttcgcctccttcgaaatcgacaaaacgggagcccagccgataggcatattccaactcgccgcgaatctcttcgtaggtcatgatgtgaggatcggctttggcataaaccgaacaatgtttgcatttaagattgcatttatcggatataaacaagaccgtctgcaaaggtcttttgcgccccagtaccctcgcgccgaaaaaccaatttgccaaatagaacatctgtgataacttcatcgtcaagcggctattttaagaactacatttaccaataggagaataagggcaaaaaaggaaatcagattccttgccattagccaccgatacatgaaccaatcgattcctgcctcccgataggccgggaaattactcatgggtccgaaccattttttaagaacgatttcttcggggagtccgttgacaaaacggcgaagcgaacgccacaaaaaaaccgctatcggcaacaaaacaagcacgcaaagataagctgccggcaacataccgaccgataccccggcgataatcaacaggaacggaacaaaattgaataccgcagaagcagccaaaaccgcatttctgcctttcaacaaacgagccagcgtaagcttttccatttgagcgtcggcctgagtatcgagaaccgaatgcgaataaaggatattcgttaccaaaagacctaccgcaatacccaccaaaacgattctcccgtcgagaacaccgcatgccgcatactgtacgccgatcatcaacaacgggccgaacataagaccgataagcaactctccgtatccgtaataacccaaacgaagcggctttcccgaataagaaattcccaaaatcgctccgacgacggttatataaaacggtacgactccccgaaaataaataacgacgctcccggcaacagctgccagcaacaaaaacagacttatcgcaacgacaagatcccccaccgtagcctgtcccgatgtcagatacggatacttggccacacgagcccttacccctccggctgccaatttcacccgtttttctccacttccctgtcggtaatcgtaataatcatcgagaagattcatacccaaatgcgcacacgccacaccacataaagcgaccaaagacaatccccacgagaacgatccgtaatccaacgacattcctatggccaaaaacccgggcaataaactttgtggtaaagagatgtgccgggcgttttttatccagaaacctattttactcataagggcggcgaatttacaaaaaagaatcgactcattgtcacgccacagtagaaagataaaaagacaaacctctgcaaaatgagaaataaactccttttacggaacaaaatagcccattatttgtcatataaagagagcaaacaaagacagtaaaataaaaaatatcattgattagagaaaaatttccttaaggtatcggaaaatgtattacctttgtaagcgatttagaagagaatcattaaaaaattttcataggtcaaattaattttaaaaacaatgacgaagttagacttaactaagtatggaattgaaggggtaaaagagatccttcataatccttcgtacgacgaactcttcgcagaagagaccaaaccgggcctcgaaggttttgaaaaaggccaagttaccgaactgggcgccgtaaacgtgatgacgggtatctacacaggacgttcgcccaaagataaattcctcgttatggacgaaaccagcaaaaacacagtatggtggacttcggacgaatataaaaacgacaataaacctgtaaccgaaaatgcatggaaagtgctgaaagaccttgcagtcaaagaactttccaacaaaagacttttcgttgtagactgctactgcggagccaacgaagcaacccgtctgaaagtacgcttcatcatggaagtagcttggcaggcacacttcgtaaccaatatgtttatccgtccttcgaaagaagagttgaaagatttcgaacccgatttcgttgtttacaacgcttccaaagcgaaagtcgaaaattacaaagaactcggactgaactccgaaacggctgttgtcttcaaccttaccaccaaagaacaagttatcctcaatacctggtatggtggtgaaatgaagaaaggtatgttctcgatgatgaactacttcaaccccctgcgcggcatcgcttcgatgcactgctcggccaacaccgacatggaagaaaaaagctcggctatcttcttcggtctctcgggaacgggtaaaaccactctctcgaccgaccccaaacgtaaactcatcggcgacgacgaacacggctgggacaacgaaggtgtcttcaactacgaaggtggttgctatgccaaagtcatcaatctcgacaaagatagcgaacccgatatttacaacgccatcaaacgtgatgcattgctcgaaaatgtaacggtcgacgctaacggaaaaatcgatttcgccgacaagagtgtaaccgaaaacacccgtgtttcgtatcctatctaccatatcgagaacatcgttaaaccggtatcgaaaggtcctcacgcaaaacaagtgattttcctctcggccgatgctttcggtgtgctgcctcccgtttcgattctgacccccgaacaggctcaatactatttcctctcgggcttcaccgccaaattggccggaaccgaacgcggcatcactgaaccgactcctactttctcggcttgcttcggagcagcattcctctctctgcaccccactaaatatgcagaagaactcgtgaagaaaatgaacatgaccggtgctaaggcttacctcgtaaacaccggctggaacggcacaggaaaacgtatttcgatccgcgatacccgcggtatcatcgatgctattctcgacggttcgatcgaaaaagctcctaccaaaacgattccttacttcgacttcaccgtacctaccgctctgccgggtgtagatcccaaaatcctcgatccgcgcgatacttacgccgatgcttccgagtgggacgttaaagccaaagatttggcaggtcgcttcatcaagaacttcgccaaattcaccggaaacgaagcgggtaaagccctcgttgccgccggtcctaaactctaataagagaactcttcatactcaaagggggctgtcggtcttgacaagcccccttttttcttactccactaagattgcggatttcacgtaacagctattcatttaccacacacataatctccggacacgattgtaccggtatcccaaatccggcttatcaaacaaaacaagtactttaaacgttatattaaaatcacaaaataacaaacgttatgaaaattcagaaaatcaaaagccgggaaattctcgattctcggggcaatcccactgtcgaagtagaagtcttcggcgaaaacggtataatgggtcgggcctcggttccctccggagcttcgaccggaacgaatgaagccctcgaactgcgcgacggagacaaacaacgttacggcggtaaaggcgtacaacaagccgtcgacaacgtaaacgacgaaatagcaaatgctctcgaaggcatgtgcctcttcgaccaaatcgccatagacaaccgcatgatagagctcgacgggactccgaacaaatcccgattgggagcaaacgccattctgggcgtatcgcttgctaccgcccatgctgccgcagcagctcttaaccgtcctctctacgcctatatcggaggcatcgacagccacatcttgccggttcccatgatgaatatcatcaacggcggcgcacactccgatgcccccatcgctttccaggaattcatgattcggcccgtaggtgctacatcgatacgggaaggcatacgtatgggtgcagaaacattccacgcattgaaagcaacgctccatgacagagggctaagtaccgctgttggagatgaaggcggattcgccccatcgttcaagggtacagaagacgctatagaaacaatactggccgccatagaacgcgcgggatatcgtccgggtaccgacatcaagctggctctcgattgcgcgtcctcggaattttaccgcgacggcgtttacgactacactctattcgaaggcgccaaaggggtgaaacgctcgccgcaagaacaagccgaatatctgcgcacccttatcgatcgttatcctatcgactccatcgaagacggtatgggcgaaaatgactgggaaggatggaaacatctcaccgaactgatcggagaccgttgccaactggtaggcgacgaccttttcgtaaccaatgtaacctacctcgaacgcggcatacgagaaaattgcggaaatgccattctcgtaaaagtaaaccaaataggaactcttaccgaaactttgcgtgccgtagagatggctcagcgcaacggttacaacgccgtcatttcgcaccgttcgggtgaaacggaagatacgacaatcgccgacattgccgtagcgacaaacgccggacaaataaaaaccggttcgctctcccgcaccgaccgtctggcaaaatacaaccgattattgcgcatcgaagaggaattgcggagtgcagccgtttatggctacaaacgtccgtaaacccgctatataacaataaaaaacgcaacgcttcgaggagaagcgttgcgttttttacatcatctcatcacaatatcattttccagccgttttcgatacggcatacgcttcggctgcccgcaagctatattcgcagccgcaataagtctgattataaaaacaatactcggcgatcagttcacgccgacgctcttgcaaaccacccttccgccaattctgttcccaaaaatcgacacccggaacctctatggctgccgcacggcctgcctcattgatttgattcaaatctttccaccgcgatgaggccagcgttgtcgtaaagaggctgaaaccttgctcgccggcataacgagccgtacggcgcaaccgagatgtaaaacaacgcaagcaacgcgctccgcgctcgggttcattctccaatccgcgcatctctgccacccaaccgtcatggtcataatcggcatcgacaaaatcgagtcccaaacgcccagcatgacgtatacactctgctttccggcgttcatactcctcccgaggataaatattcggattgcaaaaaaacagcgtaggacacacgccgttatcaagcaagcactctacaatagccgatgaacacggggcacagcaacaatgcagaagtacgtttttcaccccacccggcacgtctaaatgtatttcaggtttcataccgcaaaagtaatcattttataccaaatccgtccggagaaacagatgtctcgcccttttcctaaaaaagcgagaacgcctctgtgagacgttccctctcaaaatgttttcacaacggaataatccttattgtgaattgcttcaaaattgttctcaaatttacacatattatttatataaaccaataaattaacaaaaaaaattgtttttcgattcattttcgatatatttgagaagaaaaccattcgatatcgaaccatgaaaaacatattaggcttggacttaggctccggaagcataggctggagcgtcatacaagagggagaaaataaccgtactattttgggaatgggatcccgtatcatacccttatcgcccgacgacaccacacaattcacacaaggaaaaagcattacgaaaaatgccgaccgcacagccttccggacacagagaaagggctacgaccgctaccagttgcgacgacattaccttacccaatatctgcataaattaggtatgctgcccgacgaaaggctcatcaaattaccgcaaacggagttgtgggaaatacgggccaaagccgtaaatgaaaaaatcgaactacccgagctgggaagggtactctatcacctcaatcagaaacgaggctacaaatcgggaaagtctgatttccaagacaaaaaaagttcgaaatatctgtcggaagtaagcgaaagatacaaggagttgcaagagagagacatcaccataggacagaagttctacgcagaactcaaagccgacccgacatacaggtgcaaagacagggtatatccccgtatcgcctatatcgaagagttcgatcgcatcatggaatgtcagcgtacacaccacgatatcctcaccgacgagcatatcgcccacctgcgcaatcatatcatctattaccaacgcccccttaaatcgtgcaaacatctggtcggagaatgttcgctggctcaaatgacctaccggttacccgacggctcgataaaatcccgaccaataaaagtagctcccaaaagctcgcccctgtttcaagtatgtaaaatatgggaaagtatcaaccacatcaatctgcaacgcgaccgcgagagatttgagataactccggcacaccggcaagccctatttacccatatgaacagtaaagaaaaactgaaaatcaacgacctttataaaattctgggtataaaaaaacacgacggctggtggggcggaaaagccatagggaacggattgcaaggcaataccacggtcatcgcattgcaaaatgccctaaccggatattcccgtgccgacgagctactgcgttttgaattgaagacttgtgaaatagagatagccgaccccgaaacgggagaaattgccacccaactcatcatcgaccccgccttcgagcaagaaccgctctaccggctatggcacacgctctactccatcagcgacaccgatgtactcgaccgcattttggagcgtaaattcggaataaaagaccctaaaatgcgagagaaactcacacagatcgacttcaccaagtccggttacggcaacctgtcgagcatcgccatgcggcgcatcttaccctatctccggcagggatatgtctactccgaggcctgtttcatggccggatacaaccacagcaactcgatcacccgggaagaaaacctcgcccgcgaactggccgaacacttacgaccgataaccaaaggcgaattgcgacaacccatcgtcgagaagattctcaatcagatggtcaatctcgtcaatgctctgatagaccgttacggacgtttcgacgaaatacgggtagaactggcgcgggaactccaacaaagccgggaagagcgcgacaagacttacaaaaaacaactcgacaaccagaaacggaacgaagaaatcagacatcatatcgaggaaatggatctcacccctacccgttcacgcatacagaaatatcgtatgtatgaggagagccaccatttgtgcatctattgcgggcaacccgtcggcctcgccgctttcctgcaaggctacgataccgaagtagagcatatcattccgcgttcgctctatttcgacgacagttacaacaacaaggtgtgcgcctgccgggcatgcaaccaagccaagaacaaccgcaccgcctacgactacatgagcagcctgcccgaggaaacgttccatcgttacctcgaccggataaaaaacatgcacgacaacaaagaaatatccgacaccaaatacaaatacctgctcaccaaaggagatgaaataccgcaggacttcctcaaccgtcaaatgcgggaaagccagtatatctcgcgcaaagctatcgccatgttgcaggaagtatgccaccatgtctacgccacgagcggatcggttacggcatatctgcgccacgtgtggggctgggacaacgtcctgcacgacctcaaccgggaacgctaccgcgctggaggactcaccgagatgcgggaaatcgacaaccgtaccgtcgaatgcataaaagactggaacaagcggctcgaccatcgccaccacgccatagatgcccttgccatagcctgcacccgacaaggatatatacaacgcatcaatacactctctaaacaagccgaagagggcgatcttgtttcactcgaacgatatatccggcagcaaccacacttttcttatgccgaagtgtgtgcagccgccgagaaaatactcgtctccttcaaggccggcaaacgggtggcaacaaaagggaagcgctacatctaccggggtggtaaacgcatcttggcccaagaagacatcaccgtaccccgaggcacactgagcgaacaaagcgtttacggacaaatagcccaatatcggaaagacaagaaagggaaaatctctttctcttacgaatctgtcctcaaataccccatcgaaagcatcgataccaaaacattacccgatgtggtcgacgccggtatacgtaggattttacaacaacggctcgatgaacacggcggcaacgccaagaaagcctttgccacaccggtctatacggcaagcggacacctcattcgtaccatgcgttgctttacccgtctcaaagcgatcgttccggtaaaatacgacgcatcgggcaaagcggtcggatttgtcaagccgggcaacaatcaccatgtcgccatctacatcgatcgcgacggcaaaccgcaggaacatatcgtaaccttttggcatgccgtagaacgaaaaaaatacggtctccccgtcattatcgagcgtccaggagaagcatgggacgctgcaaccgatgccatgcccgattcgtttctggaacaacttcccgacgcgacttggcaattccggctctccatgcaacaaaatgagatgtttatcctcggtatgcccgacgagctctatgccgacgctctcgaaaatcgcgactacgcgttgctggggaaattcctctaccgggtgcagaaaatttcaacaaaatattactgtttcagacaccatatcgaaacctcggtcgatgacaaatacaacgggaagaaaaatgaaaaactttccacacaaatggggaaatataaacttataagtagtataagtgctttatattcccaacaccctcacaaagtgaaaatatccctcacgggagaaatctgcgaaatatgataaaaaagaccctctatttcggaaacccggcctacctgagtttcaacaacggacaactcgtgctacggcttcccgaggtagaaaagaacgactcggtgccgacagcgttcaagcagaaagccgaacgcaccattcccgtcgaagacatcggcgtactgctgctcgaccatcggcaaatcaccattacccacgcattgttggcagccctgctcgacaacaactgcgccgtcatcacttgcgacgacagccacctccccaccggactcatgcttccgctgtgcggcaatgccacgcaaagcgagcgattccgcgatcaaatagaggcctctcttcccttgcggaaacaactgtggcaacacaaaccgtacaggccaaaatcgccaaccaagttgctctactgcaccgcctcggagtcgaaaaccgcaatatgttgaagtgggtaaacgaggtacgcagcggcgataccgacaatatggaagcccgggcggccgtctactattgggacaacctcttccccgggataccttacttccggcgcaaacgcgacggtgtaccgcccaacaacctgctcaactacggctacgccattctgcgcgccgtcgtggcctaggctctcgtaaccagcgggctgctgcccacgttgggcattcaccaccacaaccgctacaacgcctactgcctcgccgacgacatcatggaaccgtaccgtccctacgtcgaccatatggtgtgcgaactgctcgatgaaagaatcgatataagccgactatctacatcgaccaaagcccgcctactcgccctgccgactaccgaagtctgcatcggcggacaacgcagcccgctcatgattgctgtcgcccaaacgaccgcatctctatataaatgtttctcgggcgaattacgcaaaattatctaacccgaaatgtgaacaacgaactcgaccgtttcagtgaatatcgtatcatgtgggtacttgtttttttcgacctgccgaccgataccaagaaagagcgaaaggcatacgccgacttccgcaaaaagcttatgcgcgacggattcaccatgtttcaattttccatttatgtgcgccactgccccagtcgcgaaaatgctcaagtacacataaaaagagtaaaaatgtttctgccaccgttgggcgacgtagggattctttgtatcaccgataaacaattcggtatgatggaaatattttccgcccgcaaaacgattccgcccaacgccccgggacaacaactcgaacttttctaaaaacaaaaaaggactccgcactatacttggagtcctttttattcgaatactttttctattctaatcttcgattcaaattcctgaaatacagcatactgtatatatccgctgtattcgatatgtcaaagatacaattttgaaagcaatttacaactagaaacaccatttttacaaaaggctgggggctgtattcgatatgtcaaagatacaatattagaagcaaattcacaacatgtgtacatgcatgtgtatattttggaatgaaatataccgttttatttaaaaacaaatcaattttaaatttcatttttaactataatttaggcattcccaagaattcaattgtaaaagaagttttttcgacccaatcctttgagattatattctacaaattctgatttcagacagaaaagccgatttcctacgtcaaaaaacacaagcaaaatatttttcatttccaagttatcctttcggacgataagttatatatttgcaagcaatccatagcagtattcaaacctctataagaacggctattaccatatagcaaatttcaaaaaacggacaaaatcatggaaaccgtcaacaaaaatacatatacgtttcccgataggaaatataaaaacaggttcaaaaattatagcatcaacgggaaatctcttttgatacttttgtgtttcatattcagctcacaagtttgtttaggattgaccatccacgaccaaaccaaatactatacaatcaccgtcggacgcagtataaccctctactattacagcatcagtggggcggaatctttctcggcaacaccgtggggaatgggaaccgaatgtataaaggtaacttcggggaaaaacggacaaaccggttggtgcaccataaaagcggcggaaaaaacgacaaatattccggtcgtaaccgtgagttacgcctacaaaaatgcaaaaggagagataagagatatttacaacttctacaacaacatcaaaatcgtcgaactcgaagccgtaagtattcccgggacactcacactaggaatcggagaaagttattctttttctcccaccttgacaccgagcgatgcaagcacgacctataaatgggactcgagcgacgaatccgtagccaaaatagaaaacggaacaatcaccgcctcaaaagccggaaatacgatcatcacctgcacaacacacaacggaaaaacagcagaatgcaaaataacggtaaaaccgacattggcagaaaatataacgatagaacccagcgaactaaaaatggatcccggagaacggaaacaactcatcgccacgttctcgcctgaaaatgtctcatcgaagaaactgacgtgggaaagttccgatcgagatgttgccatcgtaaccaacgaaggtctggtcgttgctctttcgccaggctggacaattatctccgccaatacgaccgacggcagcgaaatttcggccagctgcatattacaagtagaaaaatcgggagcgtcgggtttgaagaatattcccagcccggaaatgcacatatataccaaagaaggaaaaatacacattacccatatagatgaaaatgaagaaatcaaaatctacaacccgctcggccaaatcatttatacaggcagtccgcaagatattcccgtgctcgaagggaaaggactatatatcatatatataggaaaatctgccgttaaaatattattataatctgcaagaatttccctctaaatgcggcaaacagggaacggtaacttaaaagaaatcttcgtctcctgaatcaaggacaaaataactgtcgggaaaatcccttcaaaaaaaagttcgtaaaaaaaagggactgtaatctaataatagatttacagtcccttctatgtactcccgccgggaatcgaacccggatttaaagtttaggaaactttcgttctatccattgaactacaagagcaattgatttccgagggacaaaattacaactttcacgacacatctgcaaattcccacaaagatatgatcgccttctcttttttgacaactttttcccatgacacccaatcgcctgtcgagaaaaagactttctgtccaaacacaatctttgcaaaaaacatcatgcatcaaatattcccttactacgacaaggatcaatcaaaaagttcgtgcatgatttcgagggaacgtatttcggacaactcgggttgatgcagacgataatacgtaatcatttgctcgagaatcgtccggcgttcatctctcgtaaaacggaaacggctcagattatgcgtattcatgcgcatgaggcgagcaaacacgccggcctctgcgggcaacaacacatgacgatgtgccggtgtcgccggcacaaacaccccttcgagcatatcgaaaaaacaatcttcgccatactgttcggtattgggcagaaatccgagaaaacccgacaagcgcaacaaaaaccacaaatgaaaattggcctttccctcttccatcatatcgaaaagacgtatcgattgcacaaggaaatcgaaaaatgcgggattggactccgactcccgaaacagccgggacaacatttcagagagaaacaatgcgaccgatgttttcaccggatcgccatagatatgactccacacctcgacctgacgcacatcgcgtatgcggaaaatatcctgccccgcctgcatttccgaatcgatttcgagaaaagcgaacggagaaaaaagcgggcgcaacatacgggaacgttttccctgcgactgcggcaacaaataggccgcccgcccgaaacgttcggtataaacctgtacgatcgacaccttatcgctgtatgcaatcgtatgcaatacgatacctcgtgttttttccaacatatatggcgaaaacaagctatttaagggtacaaaaatccgacaaataacggagaaagacaattttttatctaaatattttgccaattcaaaaaacagctctatatttgcactcgcattttcggagaccctctctctttcattgatagggaattacggaaaacggcccattcgtctatcggttaggacgcaagattttcattcttgaaagaggggttcgattcccctatgggctacaagcgtcgaggttctcctcgacgctttttgtgcatctgtcctttactcggctatccataacacagcatacaccgagtcccgctgcaatctccacataaagcagtagacaccacacaaaaacaccttgcacaaagcatcgaaaagattgctaaaaatttcccgatacagagatttttcattatctttgtcgagaggtttttgttgcgcaaaacctctcgacaaagtataaaaattctttattctgaaaaaaaatcgaggagcaaccgagcactcgaacagaattaacacaacaaagatatgtcagaagaaaacaacaaacagaatgccagttactccgctgatagcatacaggtactcgaaggcctcgaagccgtaagaaaacgccctgccatgtatatcggcgacatcagcgtcaaaggtctgcatcatttggtatatgaagtagtcgataactctatcgatgaagcactggccggctactgtaaccgcatcaacgttttcatcaacgaagacaactccataaccgtaaccgataacggccggggtattcccgtcgacatgcacgagaaagaacacaaatcggcactcgaagtagtactcacggttttacatgccggaggtaaattcgacaaaggttcttacaaagtgtcgggcggtctgcacggtgtcggcgtatcctgcgtcaatgccttatcgacctatttgcgagccgagatacaccgcaacggaaaaatctatatgcaggaatattcttgcggcaaaccgctgcacgacgtcgaggttataggagatacccatgaaacgggaactaccatcactttcaaacccgacggcagtatattcacagacacaatctatcaatacgaaatacttcaaaatcgtttacgggaactggcttatctcaataaaggcattaccattacttttaccgatctccgggaaaaagacgaggaaggcaatcccaaacaagaagtattccactccgaagaaggtgtcaaagaattcgtcagatttctcaaccgaaacaacgaacctctcatcaacgacgtcatctacctcaataccgagaaacaaagcattcccatcgaatgcgctatcatgtacaacacgggataccgcgaaaacctgcactcttacgtgaacaacatcaacacgatcgaaggaggaacgcatgaggcgggtttccgtacggctctcacgcgggtcctgaaaaaatatgccgaagacacaagtgccaaagcactcgaaaaggcaaaagtagaaatatcgggagaagatttccgggaaggactcatcgccgtcatttcggtaaaagttgccgagccccagttcgaaggccagaccaagaccaaattgggcaacaatgaagtaagcggcgccgtgaaccaagccgtgggcgaagctctcaccaactatctcgaagagcaccccaaagaggccaaactcatcgtagataaagtcattctcgctgctaccgcacgtatcgccgcccgcaaagcgagggaatcggtacaacgcaaaagtcccatgagcggaggcggactgccgggaaaactggcggactgctcgtctcgaaaccccgaagaatgcgaaatattcctcgtcgagggagattcggccggcgggtcggccaagcaaggacgcagccgcgccacacaggccatattgccgttgcggggtaaaattctcaatgtagaaaaagccatgtggcacaaagcgttcgaaagcgatgaagtgaacaacatcatcacggctttgggtgtacgattcggcgttgacggtgaagaaaacagcaaaaaagcgaacatcgagaaactccgttatcacaaaatcatcatcatgaccgatgccgatgtcgatggcagccacatcgacaccctcatcatgacccttttctatcgctacatgcccgaaatcatcgaggcagggcatctctatatcgccaacccgccactctacctttgtgccaaaggaaatatcaaagagtattgctataccgaagaagcacggcaggctttcatacagaaatacggagaaggttcggaatcgggaatccatacccaacgttacaaaggtttgggagaaatgaatcccgaacaactttgggaaacgaccatgaatcccgaaacacggatactcaaacaagtaaccatcaacaatgcggccgatgtcgattacatattctcgatgcttatgggagaagacgtagggcctcgtcgagaatttatcgagaaaaacgccacatacgccaatatcgacgcataggtcgggcgcaccccaatcacgccccacaaaatcgaggcaaaaaaaagacagcccggccgccccttgcgacgaccgggctattctctaaaaagagacaaccaaaccaaataccgcaacagctatggcaaaacaccgcaaattacgccccgaagaaaaacaacaaaagtctttcgccggacatatacgggaatttttcaatgaaaatttccgggctttctacaatccccggcagattgcccgcaaagtgggtgcaaaaaacgagatgcagaaaagagaagtcgtcgagctgttggacggtatggtaaaagaaggattcctactgcaagaatcgcccggacgttatcgccgcaacgccgccgatctgttcctttccggcacattcgtccgcgaccacagccgtctctccatcgttcccgataacggcggcgacgctctttatgtgagtgaaaacaacgcccgtcatgccctatcaggcgacagagtcgagtatctgcttatttcccggggaaaataccggggagaggccgaagtaaccgacatcaccaaacgatgctctgcccaacaaattgtcggaacagtcgaaaaagccggtataaaagaaacaacccttcgcgtcgacagccgggcattcgacttccgtgtatatgtcccgaccgaccagaccctcggagccaaagaaggagaaaaagtcgtcgcccgacttaccgactggcctccgtacaataccagtccttcgggcgcagtcattgaaatactcgggaaaagcggagaaaacgataccgagatgcacgccatactcgcagagttcggattgcccactcactatcccgaagaactcgaaaaactcgccgatgaaatcgacgaccgcatatccgctgacgaaatcgcccgccgtgaagattttcgcgacataacgacatttaccatcgacccggccgatgccaaagactttgacgacgccctttccctgcgccgattgtccgacgggaaatgggaagtcggcgtgcatatagccgacgtaacacattatgtcaagccgggaagtcctatcgaccgggaagcctaccagcgcggtacatcggtctatctggtcgaccggacggttcccatgcttcccgagcgactttgcaatcaaatctgttccttgcgaccgaacgaagaaaagctctgtttctcggtcgtttttgaactcgatgataacgggaaagtactgaaatcgcatatcgcccgcaccgtcatacgctccgaccgccgttttgcttatgaagaagcccagcagataatcgaaagcgggaaaggagactgtgcaaacgaaatcctcacactcaatcgcttggctatggctctgcgcaagcaacgtttcgcacacggagccatcgacttcgaccgtcaggaaatgaaattcgtcatcgacgaaaaaggccgtcccatcagtgtatacaccaaagaatcgaaagaagccaacaaactcatcgaagaattcatgctgctggccaaccgcacggtagccgagaccataggacgtgtacccaagaaccgtacccccaaaccttttgtgtaccgcgtacacgacaatcccgacccggagaaaatggcaacactctcggaatttgtccaccggttaggattgaaactgaaagcaaccggaacccgatcggagataaccgactctatcaaccaactgcttacacaagtacacaacacacccgaagaaaatctcatatcgactctgaccatacgcacgatggccaaagccgtatacacaacagagaatatcggacattacgggttggcattcgattactatacccatttcacatctcccatacgccgatatcccgacatgatggtccaccggttgctcgaacgctatctcgacaaaggccgcgcagtcgacagcgaagaactcgaagaccggtgcaaacactcctcggatatggaacaaattgccgccaatgccgaacgggcatcgatcaaatataaacaagccgagttcttgtccgagcgattgggacaggtctacgacggtactatttcgggaatcgctgaccggggactctacgtcgaaatcgacgagaacaaatgcgaaggtcttatccccatgcgggatctcgacgacgactattacgagttcgacgagaaaaactatcgtttggtaggacatcgtacccaccggcaatattgcctcggcgatcctttgcgcatcgttatcgcccgtgtcgacatggaacgtcgccaaatcgacttcgccctcgaaggaaaatctatttcatccgtgcccgccctttcttccaaaaaacaaaagaatccgggcaaaaacctttctccaaaagacttcggcctgaaaaaagcccgtcggaaacatcgtaaataattctatccaaccataaatgcacaccctatggcagaagatataaaacaagacatcgaatacggatcggacagcatacgcaccctcgactggaaagagcacatacgccgacgtcccggtatgtacatcggcaagttgggcgacggcacccatgccgacgatggtatctatgtgttgctcaaagaagtcatagacaatgctatcgacgaatttatgatgggatacggaaaacaagtcatcatcgacatcgaagacggacgggtatcggtacgcgactacggacggggaatccctctcgacaaagtcgtcgacgtctcttctaaaatgaacaccggtgccaaatacgactcaaaggcatttaaaaaatcggtcggcctcaacggtgtaggtatcaaagccgtaaatgccctttcttctgaatttcgtatcgaagcctaccgagagggcgaatgcaaaagcgtaacttacacctgcggaaacaaaaccgaagaaagcgctatcaccccgaccgatcaaagtaacggaacgtgggtgagcttcaagcccgacaatacgatttttgtcgattacaaatatcgagaagaattcgtcgtagccctcatcaaaaattatacctacctcaattcgggtctcacgtttatctacaacggcgtgcgctatgcgtccaaaaacggactcgtcgacctgctcaacgaaaagatgaccgctacgccgctctacccgatgatacatctcaaaggcgacgacatcgaggtcgttatcacccacaatgaccaatatggagaagaattttattcgttcgtcaacgggcagcacaccatactcggggggacgcatctctcggcattcaaagaatccgtctcgcgtaccatcaaagaattttactccaaaaacttcgaatatgccgacattcgcaacggcatggtggcggctatcagcatcaaggtggaagaacccgtattcgagtcccaaaccaaaaccaaactcagctc

SEQ ID NO: 4124 - DNA, 23420 bp, synthetic construct
  misc_feature 1..23420: note = Synthetic
  source 1..23420: mol_type = other DNA
caaatcgacaatgtcgttcttccctttcatggctttgagcagatggataaatccgaaggggaacaagcggcctttggccttctgcaatgcccggctcatcgagggcatggcaatgcccacacctatcaactcgtctttctcgttgacgatgagcgagaggtgtttaaggctcacaatcgggatatacatcttcacatagtgctcgatttgccggggcgtgagcgtcgagtaaccatacaggttcttgtaagcctcgttgatgagctcgaaaatctggcggccataatcgcgggccaacttatggatattggtatattccttgatgatgctgcgcagatgatatttctggcgcacgatttcggcaatgcgggcatgcttttccgacatggtagggggaaccgtgagcttgaactccacccattcgcattcgggggtgaaaccgcggcgctcgatgtggtcgacatagtagggatagttgtagatggtcaccatggtacccaactggtcatatccctcgacgagcagcccttcggggtccatgtcggtaaatcccagcgggcccaccagccgattcatgcctttgccgcgcgcccacgcctccacggcatcgaaaagggcatcgctcacacgggcatcgtcgacaaaatcgacaaagccgaaacgggcttcggactttccggtattcttattgaggttgtgattgatgatacccgttatgcgacccaccggtttctttccttcataggccatgtaatgcaccgcttcgcaaaaatcgtaggccggattcttggccggtgtaaaagtatcgagttcatcgacaatcaacggtggaaccttgtagggattgtttttatagaggtcgatattgaactgcacatattttttcagggcgcgacgtcccgttatttcacgaatcgttatgggttccatgcatacattattttaggctggcaaaaatagcaaaaaaagcaaacataatgtcaaaaaacctaataaaatttaaaaagtgaaggccaaagtacaaagcgacagatgccggacgtccaagcctcgatttcctgaatcaagcagacacccttgctcgggtcacaagcgaagtttgagcccggccaagaccgtatcgggacgcaggttgaagacggcgttcatctcgccggccatgcagagcccgcaatcgtcgcaaatgccgagttcttcgccggcacagttcgcgcgccgatggtcggcatagataaagttggtcacccagcaacgccgcttgaagcggttgtgcttcatcagccgcaggcccgagaccgagttcatgacaggataaccctgccgcttcatggcgatgacggtgtcgatgacggcctcgcgctgtgcctgcgtaatcatgagattctcggcgtcggggaaaggggtatagaaattgatggagatgctctctatggcgggattctccttgacatagcgtatcgtgtcggcaaccgactcccagttgtacttgttcaccaccatgttcacgctcagatgcgggtgaccgcaggccgcgatatttttttcgagacgggcaaaagtgccctcgccgcgtatcatctcatgatatttgccatacccgtcgagactcacccaaatgctgtcggcccgcacaccggcgaaaggcaactgggcattggtggtaatcgtggccgagaaaaagcccacctcacgggccaggtcgagaaggtcgttgatgcgataatcgccatcgcgccacaacatcacctcgcccccctcgaagtcgacaaaacgggaacccaaaccgtaggcatattccaattcgcgacgcacttcctcataggacatggtgtgcggattggaacgggcatagaccgagcagtgcttgcacgccaggttgcaacggtcggtaatgaaaagcacggtttgcaacggccgtttccggcccaagaacctggcgccgaaaaaccaccgggccaaatagaacatctgcgagagtttcatcatcaagcggttatttgaagaattacatttgcaagcaacagaagcaacgcgaaaaaagaaatcaggttacgagccatcagccagcggtacataaaccagtcgatgccggctgcacgataggcatcgaaacgccccatgggaccataccaccagcgcagtcgcagagcgtcgtgacggccggccgtgaaacggcaaatcgagcgccacagggtaacggccatcggcaacaggagaaggacgcaaaggtatgcccacggcaggacgcccgccgccacgccggccagcaccagcacaaagggaaagaagttgaagaccgccgatgcgactcggcgagcccggggggtcttcaacaacgcggccaaggtcgtctttcccatgcgggtatcggcttgcaggtcgagcaccgaatgcgaatagaggatattggtcaccaaaaagcccacggccacacctaccaacacgagctcgacatcgacgacaccacatgcggcacattgcatgccggccatgaggagcgggccaaagatgagcccgatgagcaattcgccatatccgtaatagcccaactgtaaaggctttcccgaataagagatgcccaaaaccgccgcaatcaaagcaatgacaaggggcgtttcgccccgcatggccacgatgaccactcccgcggcaacagcacaagcaaagaatacggcaatggctcccacgagctccctcaccgaagccagccccaaggtaagataggggtacttcgccacccgggcccgtacgccgtcggccgccaatcggaggcgtttttccccgctcccctcccggtaatcgaaataatcgtcgagaagattcatgcccaggtgcacgcatatcacaccaaataaagcgacacaggagagcccccacgaaaacgactcatggatccacgacatactcacggccaaaagtgcaggcaggagactctgcggcaaggagatgtgccgcgcgttttttatccagaaagcgactttgttcataaggggggcgaatgtacaaaaaaagtatcgtatccccaccatcggctcacaaagtttcacacagcccgcctcgggcaaggagacgcgacaggcgattgtcgcccccgaaaggaggcggattttggcaggtaaagagagcaattcgtgacaacaaaaacaaaaaatatccttgattagagaaaaatttccttaatatgacgattccgtattggaaaatagattacctttgtagccgatttagaagaaagaaatcgaatttaaaattttcataggtcaaattaattttaacagcaatgaaattggacttaacaaagtatggaattgaaggtgtaaaagagattatccacaacccttcgtatgacgaacttttcgccgaagagaccaaaccgggtcttgaaggttatgaaaaaggacaggttaccgaactgggcgcagtaaacgtaatgaccggtatctacaccggacgttcgcccaaagacaaattcctcgttatggacgaaaccagcaaaaataccgtttggtggacgtctgacgaatacaaaaacgacaacaaacccgttaccgaaaaggcttgggctaccctgaaagaactcgccgtaaaagaactctccaacaaaaaactctatgtggtagactgctattgcggcgccaacgaagctacccgcctgaaagtgcgcttcatcatggaagtagcatggcaggctcacttcgtgaccaacatgtttatccgtcccgccaaagaagagttggaaaacttcgagcccgatttcgttgtttacaacgcatcgaaagccaaagtagagaactataaagaactcggcctcaactccgagaccgccgttgtcttcaacctcaccaccaaagagcaggtaatcctcaacacctggtacggcggcgaaatgaagaaaggcatgttctcgatgatgaactacttcaaccccctgcgcggcatcgcctcgatgcactgctcggccaacaccgacatggaagagaagagctcggccatcttcttcggtctctcgggaaccggtaaaaccactctttcgaccgaccccaaacgtaaactcatcggcgacgacgagcacggctgggacaacgaaggcgtgttcaactacgaaggcggttgctatgccaaggtcatcaacctcgacaaagagagcgagcccgatatctacaacgccatcaaacgtgacgccctcctcgaaaacgttacggtcgatgccaacggcaaaatcgatttcgccgacaagagcgtaaccgagaacacccgcgtttcctaccccatctaccacatcgaaaacatcgttaagcccgtatcgaaaggcccgcacgccaaacaagtcatcttcctctcggccgatgccttcggcgtactgccccccgtttcgattctgactcccgaacaagctcaatactacttcctctcgggcttcaccgccaaactggccggtaccgagcgtggtatcaccgagcctacccccaccttctcggcttgcttcggtgccgccttcctttcgctgcaccccaccaaatatgccgaagaactcgtgaagaagatgaacatgaccggtgccaaggcttacctcgtgaacaccggctggaacggtaccgggaaacgtatctcgattcgcgacacccgcggtatcatcgacgctatcctcgacggttccatcgaaaaggctccgaccaaaacgattccctacttcgacttcaccgtacccaccgaattgccgggtgttgaccccaaaatcctcgacccgcgcgacacctatgccaacgcatcggattgggacgttaaagctcaggatttggccggacgcttcatcaagaacttcgccaaattcaccggaaacgaagccggaaaagctctcgtggctgccggcccgaaactctgataaaagagattccccataccgagggctgtgctacaaagcacagccctttttatttctgccaagaggagaaagctcggtcgccaaagggcacaacacccctcaacttcactgccgggaacaaacattcgggggcgccgactgttatatcggtaagcgataaattttttatgtcatgaaaatccaaaaaatcaagagccgggaaatactcgattcccggggaaacccgaccgtcgaggtcgaggtgtatggcgaaaatggggtgatggggcgtgcatcggtgccctcaggagcttcgaccggcagcaacgaagccctcgaactgcgcgacggagacaaccgccgttacggagggaaaggggtggaacaggccgtggccaacgtcaacggagagattgccgatgccctcgaagggtgttgcctcttcgaccaaatgggtatcgaccagcgcatggtcgagctcgacggcacccccaacaaatcgcgactgggtgccaacgccatattgggcgtttcactggccacagcccgtgctgcagccgcagcctgcggacgtccgctctatgcctacatcggaggcatcgacagccatgtgctgccggtacccatgatgaacatcgtcaacgggggctcccactccgacgcccccatcgcctttcaggagtttatgataaggccggtcggagccccgaccttgcgcgagggggtgcgcatgggagccgagaccttccacgcgctgaaatcgacgctccacgaccgcggtctgagcacggccgtaggcgatgaaggcggattcgccccggcattccggagtaccgaagatgccatcgaaacaatcctggacgccatagagcgcgccggataccgtcccggcaccgacatgaagttggccctcgactgtgccgcgacagaattttaccacgacggggtctacgactacacgcgcttcgaaggcaagaagggcgccaaacgcaccccgcaagaacaggccgaatacctgcacacgctcatctcacactaccccatcgactccatcgaagatggcatgagcgagaacgactggaaaggctggcaactcctcaccggcctcatcggcgaccgctgccaactggtgggcgacgacctgtttgtcaccaacgtcacctatctcgaacgcggcatacgcgagcattgcggcaacgccattctcgtgaaggtaaaccagataggcacgctcaccgagaccttgcgcgccgtggagatggcacagcgcaacggctataacgcggtcatctctcaccgctcgggcgagaccgaagacaccaccatcgccgacatcgccgtcgccaccaacgcgggacaaataaaaaccggttcgctctcgcgcaccgaccggctggccaagtacaaccgcctgctgcgcatcgaagaagagttgcaaggcaatgccacctacggataccgccggttgtaaaagcgggaacggcgtgcctccgcacaggagacaggggtcgcggcggtcccgaatttgagacctccccggccgcaaccctcccgacattccttccacacaataagaagaagatgagccgaaaaattcctatttcggctcatcttcttattgtaataaaacgggagagattacttcttgtcgggtgagattgtcgggtgatgctccgccgcgctgcgcatgctgtattcgcagccgcaataggtctgattgtagaagtcataggcggcaatcaactcgcgacgccgctcctgcaaaccgccccggcgccagttctgctcccagaacacgacgcccggcacctcgccggccgccacgcggccaaccatgttgatttggttcaggtctttccagcgcgacgaagccagggtcgtcgtaaagagcgcgaacccgtggtcggccgcatatcgggccgcccgacgcagacgggtggtaaaacaacgcagacagcgggctccccgctcgggttccccttcgagaccgcacatctcggccacccaaccgtcgtggtcgtagtcgtcgtcgacaaaatcgagccccagccgccgggcatgacgtatgcactcggtcttgcgccgctcatactcctcgcgcggatagatgttggggttgcagaaaaagagggtggggcgcaccccgttgtcgagcaggcactcgacaatcgccgacgaacacggcgcgcaacagcagtgcagcagcacctcccgggcatcgcccggcacttcgagatgaatcacaggtttcatgccgcaaaagtaatcatttctttgctcggttgtcattgaaaagcagaactactgtccacagaagcggcgccatggggccaccgctcactcgcagcagccgggcacgccgtcggacgaaagggtctcggccgagattctcagacgggtctcggaactgttgttgtagaacgatacccaggcacggcccgtcgagtcggtcttcacgtcagggtcccaataaagggtgcggcggaagtcgctctcgtcgggcaaaacacccacaccgtaatcgacatggaaaaattctttcgggacggagtatccctgcaacgtcgtggcccgatacccttttttatagttcttgcgctcttggggcggataggcatacagacgaatcgccacgtttgtggcatgctcgacaatctccatcttcttcacgtcatcgagcgaaatcttgtccaagtcccaataatccttatcgaaataataatatccgtcactcccgtactgataaaaagcgaagtaggctcttttgcctttgtaccaatactggggagttgccgtgtagccgtctttggaccattcatacgaaatggtgaaaaacggatttatctgttcgaggaaagccgggaaatcatcggtatagtggcgcacctgcgagtcgatgagtttgtcttcttcctccgcaacgacatattcgacagacgcgcgacggtcaagcccccgcacacgcaaggcattcacgtcgacctcggagagttgatacacgatagcatcatcatcaaggtcgctattgtcgacggtatcgacagggaaggatctcacctgaatctcttcgagcgggttcatcaccgtatcgggcagcgtcgtcatcagcggcggataggccaaggcgggaggcgagaaactccggtcgagctctatgccatagggtttgttctttttcttgccccgacgatttgttatttgggtttgcagcaccaggttactgctttcccatatatcgctgtcggagaggaaaacaaatccgccgtcctcatcggtaaaggcttttccatgccgactggttacgggcgaatagatccacaccgatacctctacgccggccttggcttttgccccgaaaaggtggtaatcgtatacatttcccttgaccacgataccttcctcgacaaaatgctcaggctcgaaaggttccactccggcctgctggcgccactcgtagcggcgccagccctgcaccagcatgagcaggtcgaggtcttcgcgatggcggcggtcgtcggcctcgaaatagtagggaatgtcttcgatgtagcctttgaggtccgactccaacaggagattgctcaccacctggctctggtaataggtgggcacctcggtggcataatcgcgcaccgacagggagaagtcgccctcgacgggattgcctcgctcgtcgctcatcgtaaaaccgaggttcacgcgctccatcggagcataaagaggtttcagcgaatcgaccgtaatgacgatttgccggtcgccccggtggaaggccagccgctcggccaggacttcgccctgcgaggtgaaaagggtgatttgttgtaccccgggctggaaattcgccttcgggagcgcgagcgacacgagcgtgtcgcgccgcatgtcgaccagctcaaacgtatgcgccagtccgcggcaagccaccatcagtcccacaaactccccctcgaccgcggcactgcggcgcagggtgagcgacatctcttcgccattcaggttatcgaccgtcatcgtatatccttggggcttggctgccggcaaggtaaactgtttctgcgaacggccatcggaaatcttcacgttacagggctcgttgccgggagtgacgacaaaacgtcccatgccgttgtgttgcgtggtaaacgtcgtcagcacacggtcattgctgtcgtaaacgccgcccgagagagccacgccccgccccagcttgtcggtcgccttgaaggcaaccaccgagggcagcccctctaccagcacgcctccctcgggatagaacgagaggttgaggtcgtccatgccggactgcttcgcacgatagttgggaagcctgaacgaacgggcatactgggtgattctgtggttatactcgccgtctgtctccggacggtcaaaaacgggaaagacccgcgaaaataccgtaccttcccagttgagcatggcccgtgtataggcccgcacctcatagaatccgccgatgagcgtcgacccggcgagcaggaactcaccgtggcacttgccatcgacaattttcagcttcttggtctcgacaacgcgcccttcgggggtcagcagctcgacatagagcacccggctcatctcggtaggacgcaactggggcgccgccaccacataagccttgaaccacatggtctcaccgagaaaataacccgtgttgtcgaagtgcagatagaccttctcctgcacattatagcgaccgaagtgattatacgcctcgaccagtcgggccatggccgacagcacactgtcgggaaaagccgactgtgccgaagccgacaaggacgaaataacaagtaacgtcagaatccaagaaaaacgccgaaaattcataagcgaacttttttctttaaagaaaagaaaaaattgtgacatttcataccccaaaccccacggatttatcaaatattaagagtggccgtccccacaaaaagcgagggcactgcaagcagcgcccccactcaaaatgttttcacaacggaataatccttattgtgaattgcttcaaaattgttctcaaatatacatctatttgtccatatctccaaataaatggaactaaaattttgtatttcacgctattctcgatatatttgagaagaatatttatcaataaaaaccatgaaaaacatattaggactggacctcggctctggcagtatcgggtgggccgttatcaaagaagacgaaaacaaccgtgtcattatgggattaggctcccgcatcatacccctgtcggtcgacgatgccacccaatttacccaaggaaaaagcattaccaagaatgccgaccggacggctatccgcacccaaagaaagggatacgaccgccgccagctacgtcggcaagcactcacacaatacctgcacatgctgggcatgaccccagatgagaccctcataaaacttccccggcaggagttgtgggctctgcgggccaaagcggtaacagagaacataagcctccccgagttgggaagggtgctttaccacctcaaccagaaacgcggatacaaatcggggaaggccgattttcaggacaagaaaagctcggcatatctctcggccgtgagcgaccgctacaaagagttgcaggagtgcggcctcaccatcggacagaaattccacgccgaactgaaagccgaccccacttatcgctgcaaagacagggtctatccccgacaagcctacatcgaagagtttgaccgcatcatggcctgccagcgccactaccacgacacactcaccgacgagcacatcgacaacctgcgcaaccgcatcatatactaccagcgtcccctgaaatcgtgcaagcacctggtgggcaaatgcaccctggcacagatggtctatacattgcccgacggctcgacaaaatcccgaccggtaaaagtcgcccctaaaagttcgccgctcttccagatctgcaagatatgggagagcatcaaccacctcacgctgcaacgcggacgggaaaccttggaaataaccccggcacagcgacaagccatcttctcgcacatgaacaacaacgagaagttgaaacttaccgacctgcaaaagatactgggcatcaccaaacgcgacggctggtgggccggcgagtcgatgaaggccggtctgcaaggcaacaccacggtcgtcgccctgcaaaagattctgaaaacccaccccgatgccgaagcattgctgcgcttcgacctgcatatccgcacggtagagatggccgaccccgacaccggcgaaatagcctcgcaactcgtcgtcgacccggccttcgagcaagagcccctgtaccagctttggcacacgctctactcggtgagcgacatcgataccctcgaccgcatcttggaaaagaaatttcacatcgacgacgccgccatacgcggagagctgataaaactcgattttaccaaagccggctacggcaacctgtcgagtcttgccatgcgccgcatactgccctacctgcggcaaggctatgtctactccgatgcctgtttcatggccggctacaatcacagccggtcgctcacccgcgaagagaacctggcccgggagttgtcgacacacctggcgcctctgtccaaaggcgaactgcgccagcccatcgtcgagaagattctcaaccagatggtcaacgtcgtcaacgctctcgtcgaccgatacgggcctttcgacgaaatacgcgtagagctggcccgggaactgcaacagagccgggaaatacgggaaaaaacttacaaaaacaatctgaaccgccaaaaagagaacgaaaaagccgcacagcgaatcatcgaggagggagtaacccccacacgcaccggcatacagaaataccggctatacgaggagagtcatcaccgatgcatctactgcggtaaagacatcagcctgaaagctttcctgtcgggctacgacaccgaggtcgaacacatcattccccgttcgctctacttcgacgacagtttcaacaacaaagtgtgcgcctgccgtgcctgcaaccaggcgaaaaacaaccgcaccgcctacgactacatgagcagtctgcccgacgagaagttccaagattatctctcgcgcataaaagagatgctcgaaaagcaggaaatctccaaagataaatacaagtatctgctcatgcctgaaaaggaaatcccacaagactttctcaaccggcagatgcgcgagagccagtacatctcgcgcaaagccctcgccatgctgcacgagatatgccaccatgcctatgccaccagcggctcggtaaccgccttcctgcgccgggtatgggggtgggacacggtcctgcacgacctcaacatagagcgataccgtgccggcaacctcaccgagatgcgcaccatcaacaaccgacctacggagtgcatcaaagattggaccaagcggctcgaccaccggcaccacgccatcgacgccctggccgtggcctgcacccgacagggatacatacaacgcatcaacacccttgccaatcacaaagacgaggagttgtcgctcgaacgctacatacagcagcaaccccacttctcccacgccgaagtctctgccgccgtcgcgaaaatactcgtctcgttcaaagccggcaaacgggtagctacccccgggaaacgctacatctaccgcggaggccggcgcattttggtacaagaaggcatcgtcgtgccccgtggcgccctgagcgaacaaagcatctacggggaaatatcgcaatacaccaaaaacaaaaaagggaaggtctccttccgcgaagaatatgtcctgaaatatcccgtcgaaggcatcgacgccaaaacggtgggcagcgtggtcgacgccggcatacggcggctcctgcaacaacggctcgacgagtacggaggcaacgccaaaaaagctttcgccacccccgtgtacacaaccaacggatttcctatccgcaccgtacgctgctttaccggcctcaaagccgtcgccccggtacgatacaatgcgtcgggagaggccatcggtttcgtcaagccgggcaacaaccaccacgtcgccatctatgccgaccgcgacggcaacctgcacgagcatgttgttaccttctggcacgctgtcgagcgcaagatacatcggctgcctgtcgtcatcgaacaccccgatgccgtgtgggattcactgcccgacggactgtcggaggagttcatgcaacagctgcccgacgccacctggcaactgcaactctcgatgcaacagaacgaaatgtttatactcggtatgcccgacgacctctatgccgacgccatggaaaaccgtgaccatgccctgctgagccgctacctctaccgggtacagaaactcgccatgaaaaattacgctttccgtcttcacatcgagacttctgtcgatgataaatacgacggagtaaaaaatgaaatgctatctagacaaatggggaaattaaaactcatacaaagcattggtgctttatatgcgcagaatccccacaaagtacacatctcctccaccggcgaaattgacgaagcatgataaagaagaccctctactttggaaacccggcctacctgagcctccaaaacggccaactggtgctgcgcctgcccgaggtcgagaagaacggctcgataccctcagcttggaaacagcgtgccgagcgcaccattcccgtagaagacatcggggtggtgctgctcgaccaccggcacatcaccatcacccaggccctgctcgccgccctgctcgacaacaactgcgccctcatcacctgcgacgacagccacttgcccaccggcctcatgctcccactgtgcggcaatgccactcagaacgaacgcttccgcgaccagatagaggcttcaatccccctgcgcaagcagttgtggcaacagaccatacaggcaaaaatcgccaatcaggctgcactcctgcaccgccgcggcgtcgaaaaccgcaacatgctgcgatgggttaccgaggtgcgcagcggcgatgccgacaacctcgaagcccgtgccgccgtctattactgggccaacctgttcccgcagatacccgccttccgacgcaagcgcgacggagtgccgcccaacaacctgctcaactacggatatgccatactgcgcgccgtcgtagcccggtcgctggtaggcagcgggctgttgcccaccctgggcattcatcaccacaaccgctacaacgcctactgcctggccgacgacattatggagccttaccgtccctacgtcgacgacacgatatgccggctgctcgacgagcggacagcgatcgaccacctgtcgaccgcagccaaaacccgactgctcacactccccaccaccgaagtaaccataggcgggcaacgcagcccgctcatgattgccgtagcccaaacgaccgcatcgctctacaaatgcttctcgggcgaatgccgtaaaatcatctaccccgaaatgtgaaccgagaactcgaccgtttcagcgaataccgtatcatgtgggtacttgtgttttttgacctgccgaccgataccaagaaagagcggaaagcctacgccgacttccgcaagaaacttctgcgcgacggcttcaccatgtttcagttctccatttatgtgcgccactgccccagccgtgaaaatgccgaggtgcatataaaacgggtaaagatgtttctcccaccgcaaggcgaggtgggcatactgtgcattaccgacaaacagtttggcatgatggagatattctcggcccgaagagttataccccccaatgccccggggcaacaactcgaacttttctgaaaacaaaaagagactttcccccgagggaaggtctctttttatcgaatactttttcttttctaaatcactacacaaatagctgataaataacgtcctatacacatcgagctgtattcggtagaacaaagatacaattttgaaagcaatttacaactcgaaaataattggtataaatacctcataagctgtattcggtagaacaaagatacaattttgaaagcaatttacaacatatggaggctcaatataggcacgcgataggctgtattcggtagaacaaagatacaattttgaaagcaatttacaacctgcgtgtggaacattaaattcataactttgctgtattcggtagaacaaagatacaattttgaaagcaatttacaacactttgcattaaacagtaaagttaattgctgctgtattcggtagaacaaagatacaattttgaaagcaatttacaactcttatattccaagtcttcgttttcgtccggctgtattcggtagaacaaagatacaattttgaaagcaatttacaacgtaatgtcgcaaacagtattgccggattctgctgtattcggtagaacaaagatacaattttgaaagcaatttacaactaaatccccaattgccccttaattggcattgctgtattcggtagaacaaagatacaattttgaaagcaatttacaactggtataaagtttcatattctgtctcttcgctgtattcggtagaacaaagatacaattttgaaagcaatttacaacgagagcaagaggtcaaggaaaaagaactttgctgtattcggtagaacaaagatacaattttgaaagcaatttacaaccttccatacggcaaataactcttttaattgctgtattcggtagaacaaagatacaattttgaaagcaatttacaacccaagaatggtttgatacatctggtattgagctgtattcggtagaacaaagatacaattttgaaagcaatttacaacaaacccatcaagtaaagctaccaactggggctgtattcggtagaacaaagatacaattttgaaagcaatttacaacattctgctgccattaaatggttgcaagaagctgtattcggtagaacaaagatacaattttgaaagcaatttacaacctcttgataccgaaggttctgagccgacaagctgtattcggtagaacaaagatacaattttgaaagcaatttacaactcattttcgtccgtctcttccatcaatgagctgtattcggtagaacaaagatacaattttgaaagcaatttacaacataatatcatacatcaatgcaaaggaatcggctgtattcggtagaacaaagatacaattttgaaagcaatttacaacagaaagtttttcccatgtataatcatattgctgtattcggtagaacaaagatacaattttgaaagcaatttacaacggcgtcgtatgcgtcaagtaatgattgtctgctgtattcggtagaacaaagatacaattttgaaagcaatttacaacagcggcgttcgctatacccatgttttgtgagctgtattcggtagaacaaagatacaattttgaaagcaatttacaacaggcaataatgtctactcttggtggttttcgctgtattcggtagaacaaagatacaattttgaaagcaatttacaaccaaaacaaagattatatttttggtaattagctgtattcggtagaacaaagatacaattttgaaagcaatttacaacgccggaaatcatctttctttggaactctgcgctgtattcggtagaacaaagatacaattttgaaagcaatttacaactcggacttgtaacacctgcaagaatacagtgctgtattcggtagaacaaagatacaattttgaaagcaatttacaacgacttgacggtgcaatttgcgaagagccaagctgtattcggtagaacaaagatacaattttgaaagcaatttacaacccgcagtggtcgatgtgcctacgttgtctgctgtattcggtagaacaaagatacaattttgaaagcaatttacaacattaccccagttacgcaaatcgtcggaggggctgtattcggtagaacaaagatacaattttgaaagcaatttacaacccatctatatctcgttttaccgcaaagagagctgtattcggtagaacaaagatacaattttgaaagcaatttacaactatgtagacactgtcttcgtcgttgttgcagctgtattcggtagaacaaagatacaattttgaaagcaatttacaacgggtggcaagcataaacatggcttgcgagtgctgtattcggtagaacaaagatacaatttcgggaagcaatttacaacggtcacacacctgtgatttttgaaaatcggtgcttcacttgtatgcgttggcgtccgcccggcacaccgcttcctgcaccaacatcgtgccggttcccgtgcaggagggcccgggagtcatttttgccataaaatatttgtttataagaaaatatcattatatttgcaatacaactcgcgatcgggccgctggccgggacatttgagttgggcaaagaggcgttcggcctctttgtttgtatcgcaaaacccggagaataaacctcggccatcaaattacctcagatcgataaatagacaagataccatgggcggcttcaaaatgtgcgaatacgcaagtcaagatggcacttatcggattccttttatacaaaaggacccggcttaccaatttttttcgataatgtctccttttttctaccggcagtacgaggttgtcaaaataatttgcaacgagggagaaacctcggtaaaaggttttgaatttgaattgcacatgataggaaccatagacgcctatggacaaaacaagatattcgcaggcatatacaaggtaggagagcgaaatcccatctggcaccgggtcgtaaaagggggtgatgaatataaagatgttttagaattcaagctgggaggtttggaacttccttgcggcctctatttcatactcctcgggaacgtccttcccaataagaagtttacccctttcatcaaggaatttgcggggtgctatcggttcgatttttcccttctgccccatggtcaatcgttgccacgcccccgtttgtcggattgcgcgattcgttacatcgctccgcacgaacggaaaagcggatttcggcgtcactatcccagctatctgatgatggtgggcgacttcccgctctatgaattgaccgtgagcctcgaccacaggcccaaccccgacacggagaagtttgacctgcgcatcttcgatgaagggttgttgctgatggaaaccatcgaagacatatgccaacagcagtccgaacagttgtcgttcgtgccccctcacggcataccccacggaaagagccatttcgtcttgtaccataacgaccgcccctttgtccacctgcaatgcaacggcgcgaaaaagatgaaagcgccactggtcgaatatatttcgggcgactcgatttattatcacctacacaagcacaagtcgctccaattatatggctgcaaggccatcaagaagaagattctctcctcactgaacaaccccgacgtggcaacgcccgaccgcctgtgcctaatcgacgattcagaacggagtgttcacattctgtcccacatcatgcatgatctgtacccgggaatgcctcttgtggacctgttcgacagtgacttgaagcggtcggcaagagatttccgtgcccataaagtgaaatctcgacccagcgtcatcatttgggatttgtaccgaacttcaagaaacctttggaacaagtgggtaccgtttctcgataaaaacatcacgccgccccacaaactggtcatctacggagcggcaaacgacgtcgacgccctctttgaaaaattcggcgacttatcgcgactcttcccggcccgtaacagatggaagacccaacccctgacaaagatggaaagtctttattgcatggtcgacgcatttcaacacccctgctttaaggagtatgaacgattatatcaagaagtgatgcgcccgcgcagacaataaaattgcctgccgacacgccgcatcgacaggcaaggaagtactctcgccgggaatcgaacccggatttaaagtttaggaaacttccgttctatccattgaactacaagagcagaagcaattcaagcgacaaaggtaggacttttgacatacttttccaaatttcggccggccgacttgctcacggcaaaacgcagggaaaagaccggcacggcagaggcgactccggcacgagaaggggagtgtggaccccgcacgaccgatgggcagcgggccggcgtcagtcgaagagctgctgcatgacttcgagcgagcgtatctcgggcaggtcgggctgatgcaggcggtagtagtcgatgatgtgttggagcacggcacgccgctcgtcgcgcgagaaacggaagaggctcatgttgtgcgtgttcatgcgcatgagccgggcaaacgccgaagcctcgtcgggcagcaggaaatgggggtgcgcaggagcccgggtgacgaaaacgccgtcgagcatgtcgaaaaaagccccttcggcatattgctcggtgttgggcaggaaacccaaaaagcccgaaaggcggagcaggaaccaaaggtggaaattggccttcccctcttccatcaagtcgaaaaggcgtatcgactgggtgaggaagtcgaaaaacgggggattggcctcgggctcccgaaacaggcgggtgagcacctcggagaggaacaaagccacggccgtcttcaccgggtcgccgtagatgtggttccacacctcgacgggacgcacgtcgcgcaaacggaatatatcctggccggggcgcgcctcggagtcgatttcgagataagagaatggagcgaaaagagggcgcagggcccgcgaccgccggccgtgcgactggggcaagagataagcggcgcgcccgaactgcgcggtatagacctgcacgatcgacatcttgtcgttgtaggcgaccgtgtgcaacacgataccccgggtttttacttgcatattggcgtaaaaaagtgccgttagaagacacaaatttgggacaaaaaaaggagaaaggcaatttttcctccaaatattttgccaattcaaaaaacagctctatatttgcactcgcattttcggaaaccctcctctttcattgatagggatttacggaaaacggcccattcgtctatcggctaggacgcaagattttcattcttgaaagaggggttcgattcccctatgggctaccaatcagaaacaaaaaaaaattaaaggagatttattgaatggcaaatcatcaatcatccatcaagagaatcagacagacgcaaaccagaaacttgcgcaacagatactacgctaaaaccgcccgcaacgccgtgcgcaaactccgcgccatgaccgtgaaggacgatgccaccgcattgtaccgccaagtttcgtcgatgctcgacaagttggctaagagaaatgtgattcacaaaaacaaagccagcaacttgaagtcgaaactggctttgcacatcaacaagctctgataccgcaggcacctccgtggtgaggttgcacgccgaccgcttcgcaccgaggcggtaatcatggcccattcgtctatcggctaggacgcaagattttcattcttgaaagaggggttcgattcccctatgggctacccagcgttgaggaaatcctcaacgcttttttcgtatcggcacctcggcacaataccccgcctccccgcacacggccgcacacggcacaatctgtcacgccacccggctttttcccggcaatcctccctcatcgacacatcgaaaagattgctaaaaatttccccacaccgagtttttttattatctttgtcgtgaggttttccgcctttgcggcccgactccgccaccctgcaagagacggccgttgccaaccttgcaggacaggaaaacaccattcaaacagaattaacacagcaaatatatgtcagaagaaaacaacaagcagaatgccagctactcggccgacagcatacaggtgctcgaagggctcgaagccgtaagaaaacgtcccgccatgtatatcggcgacatcagcatcaaaggactgcaccacctggtatatgaggtggtcgacaactccatcgacgaggcattggccggctactgtacccacatcgaagttttcatcaaccccgacaactccatcaccgtcaccgacaacggccgcggcataccggtcgacatgcacgagaaagagcacaagtcggcactcgaagttgtcctgacggtattgcacgccggtggaaaattcgacaaaggctcctacaaggtatcgggaggtctgcacggtgtaggcgtatcgtgcgtcaacgccttgtcgacctatctgcgcgccgaggtgcaccgcaacgggaaaatctacatgcaggaatactcgtgcggcaaacccctccacggggtcgaggtcatcggcgaagcgaacaacaccggcacgaccatcaccttcaaacccgacggcagcatcttcaccgacacgacctatcaatacgaaatcctgcaaaaccgtctgcgcgagctggcctacctcaacaagggtatcaccatcaccttcaccgacctgcgcgagcaagacgagaacggcaatccgcggaaagagacattccactccgacgaaggggtgaaagagtttgtgcgtttcctcaaccgcaacaacgacccgctcatcaacgacgtcatctatctcaacaccgagaaacagggcgttcccatcgaatgcgccatcatgtataacacgggttaccgcgaaaacctgcactcctacgtcaacaacatcaacaccatcgagggaggaacgcacgaagccggcttccgcaccgccctcacccgcgtgctgaaaaaatatgccgaagacacgagcgccaaagccctcgaaaaagccaaggtagagatttcgggcgaagatttcagagaaggactcatcgccgtcatctcggtcaaagtcgccgagccgcaattcgaagggcagaccaagaccaaattgggcaacaacgaagtgagcggtgccgtgaaccaagccgtgggcgaagccctcaccaactacctcgaagagcaccccaaagaggccaagctcatcgtcgacaaagtgattctcgccgcaaccgcgcgcatcgccgcccgcaaagcccgcgagtcggtgcaacgcaagaaccccatgagtggcggcggactgcccggcaaactggccgactgctcatcgcgcaaccccgaagagtgcgaaatattcctcgtcgagggagactcggccggcggatcggccaagcaaggacgcagccgtgccacccaagccatcttgcccttgcgaggaaaaatcctcaacgtagagaaagccatgtggcacaaggcttttgagagcgacgaagtaaacaacatcatcaccgcattgggcgtgcgcttcggcgtcgacggcgaagacaacagcaaaaaggccaacatcgaaaaactccgttatcacaaaatcatcatcatgaccgatgccgatgtcgatggcagccacatcgacaccctcatcatgaccctcttctaccgctatatgcccgaaatcatcgaagccggacacctctacatcgccaacccgcccctctacctgtgcagcaaaggcaacatcaaggagtattgctacaccgaagaggcccgtcaggcattcatacaaaaatatggcgaagggtcggagtcgggaatccacacccaacgctacaaaggtctgggtgaaatgaaccccgaacagttgtgggaaacgacgatgaatcccgaaacccgcatactcaaacaggtgaccatcaacaacgccgccgacgtcgactacatcttctcgatgctcatgggcgaagatgtcgggccacgccgggaatttatcgaaaagaacgccacatacgccaatatcgacgcataggtcgggcgcgcaaaacccttcacgccccactatcgaggcagaaacgagcagcccggccgccttgcgacgaccgggctgtctgctaaaaagagaccccgcacgccgcacacggtgcaagcacgacggccaagccccggaaacagaaaccgggcttctacccccgaagaggtttgcgccaagcgctacaaagcacaccgatgccaaaaacataaagccaagaatattcccggaaagggaaatttgcacaaccaaccaccaacaacgccaacagccatggtcaaacatcgcaaactacgccccgaagtcaaagccaccaagccctttgccgagcacatcagggacctgttcaacgaaaacttccgcacggtctacaacccccgacagatagcccgacgggtgggcgccaaaaacgagatgcagaaacgcgaagtcgtcgtgctgttggacaacatggcaaaggaaggattcctcctgcaagaagggccgggacgctaccgccgcaacgtggccgacctcttcctcaccggcacgttcgtgcgcaaccaccaccggctctcaatcacccccgacaacggaggcgaccccgtcgccgtgagcgagagcaacgcccgccacgccctctcgggcgacacggtcgagtatctgctcatcaaccgcggcaaatacagcggcgaagccgaagtcaccgacatcacc

SEQ ID NO: 4125 - DNA, 18493 bp, synthetic construct
  source 1..18493: mol_type = other DNA
  misc_feature 1..18493: note = Synthetic
gatgttgggggtagcgctgtggcatacggttacggtggcgttgcccgggtaggctttctgcatcatcagagtagctacgggtttacccacgatgttgctgcggcccagcaccacgcagtgtttgcctttggtctcgatgttgtagcgggccagcagctccatgattccggccggggtagccgatacgaagcagggcagtccgatagacatgcgtcccacgtttacggggtggaatccgtctacatccttgcggtagtcgatggcctcgattaccttctgttccgagatgtgtttgggcagaggcagttgcacgatgaaaccgtcgatgtcggggtcgttgttcagctcgtcgacccggcgcagcagctcctcttcggtcacgtcgttctcatagcgaatcagggtcgatttgaatccgcactgttcgcaggcttttaccttgtgggctacataggtttcactaccgccgtcgtgtcctaccaggacggctgccaggtggggacgtttgccgccggcattgcagatgtcggcaacctcctgggcgatttcttgtttgatgcggtcggccaccgcttttccgtcgattagttgcataagcattagagattatataaaaaactgccggacacactctctatttgcctcgggggcaatcggtcgttggggtgagagtatatccggcagtttcatggttgataatgtatgttttcttatttccgtctgaatcctttcatcatggcgcccttgttctgggtaaccattcgcatcatcttgcgcgtctggtcaaactgcttgatgagtcggttcacctcctggatggaggtgccgctaccggcggcgatgcgctggcggcggctgccgttgagcagctcggggttgctgcgctctttgggggtcatcgagtagatgatggcttcgatgctcttgaaggcgttgtcgtcgatgtccatatccttgatggctttgcccacacccggaatcatcgaggccaggtctttgaggttacccatctttttgatttgctgtatctggctgaggaagtcgttgaagtcgaactggttcttggcaatcttcttctgcagccgtttggcctcctcttcgtcgtattgctcctgagcccgctcaaccagcgaaacgatatcgcccatgcccaggatacggtcggccatacgggcggggtggaagtagtcgatggcttcgagcttctcgcccgtaccgataaacttgatgggcttgtcgaccaccgtgcggatggagagggcggcaccaccgcgggtatcgccgtcgagtttggtcagaaccacgccgttgaagtcgaggcggtcgttgaactccttggcggtgttgacggcatcctgaccggtcatggcatcgaccacgaacagaatttcggtggggtttatcttctttttgatagcctcgatctcgttcatcatctgctcgtcgatggccaaccggccggcggtatcgacgatgaccaggtcgaagtggttctccttggcatatttcacggcgttggcggcgatgctcacggcatccttgctgtcgggttcggtatagaccggtacgtcaatctgctcgcccagcaccttcaactgctcgatagcggcgggacggtacacgtcgcaagctacaagcaagggtcgtttggcctttttcgatttcagcatcttagccagtttgcccgagaatgtggtcttacccgaaccctgcaaacccgacatgaggataatcgacggattttgcgacaggttgaggtcggccgtttcgcctcccatcagggcagccagttcgtcgtgtacgatcttcaccatcaactgccccggctttacggcggtgagtacatcctgtcccagcgccttcgcctttacggtatcggtgaattgcttggcgactttgtagtttacgtcggcatcgagcagggcgcggcgcacatctttcagcgtctcggccacgttgatttcggtgattttgccttcacctttcaatattttaaaagaccgttcgagtctttcactcaggttttcaaacatagttttagaacaaaaatattttacactgatggataaatcggtgcaaaattactcaaaatcggcggaatatgcgaataaaaaccgaagaataacacaccagtctctttgaaatcttgcacaatgtgctgcagatttgaaaaaatttgctattattgtgattgatttatattgttgcggataccttgggcgtgtcgaggtaatcgggcgtggccgtgtggggacgtgacaaaagaacataaccggattttaatcgattgtataatgaaaaaattcttgacatttctcctggctttcgtgcttgtgctgttgtgtattcggattgtccgttcgatgatgacggactttgatgataagagtgaggccccggagtttgtcgaggctgttgagttcgacgaggctgccgattcggtagctatggagcagagcacccatttgaaattcaagggcgtgcctatcgacgggccgctggaacagtttgtggcacgcatggtgcgcaagggcttcgaggtgacctcggctcgtgaggaagaggtggtgcggttggagggcgactttgccggcttcaagcagtgcgaggtctatgtctctacgctcgacaaccagaacctggtctcccggataaccgtctgtttccccattcaggatcagtggaaaaatctgtatggcgactacaagaccttgaaggagatgctcaccgaaaaatacggcaagcccacctcgtgtgtcgagcgatttacaggatatttgggcaatagtggtgacgacttttaccgcatgcatgcggtaagcaatgacaggtgtaaatatgtgacccgattctcgggcgacgagggcgatataatcctcagtatagaacatcgcggatattcttcctgtttcgtacaactggtctatcaggataaggagaacggccgggaggtgcgcaatacggcgatagacgatttgtagaaataaagagccggagctgtctgttggggcggctccggctgtatacgtccgtttccttatatcttcttgtttctccagttcgtctttttgaagaagagaatcgagagaatcagtttgaaaccccagtagacatactcgacgctccagcagagcgagatgtctacgcggttgcgtacgataatcacatagatggccagggtgtagaagacgatggttaccatctcgatgaggaaggcggtgcgggtgtcgcctgtgcccgataccgattgaaacagcaggttacccggcagggccagcatgtagtagatggtcatcacgaagatcgaggccgtacagctttctatgaggatgctgtcgttggtatagatgcgcagaatccactcggggaagatgcacagcaagacgatgaggggtaccacaatggcgtagcacatcttgatgatgcgcttgacgataggtatcacgtcgtcggtacggtgagcacccatggcgttgctcacgagggtgcaggcggtcgcgccgaaggcgttgaccggcatgaacagcagggtagaggtgctgcgtatgatgttcgagatggccaggggctgttcgcccagatgctctacggctatgaagaagaggaaccatgtggcaatggtgaggaagtagagaatcatgctccataccgacacgttgagtatctcgcgaatgagtgcgaagttttcgaagcgtatgcgtgaaagctggtatttctcgcgatcgatgcagaagagggtgtagaggaagaagtgcagcgctgccgaggcttcggccaggaccgaacccagagcggcaccggcgatgcccatctggggagctccgaagttaccgaacacaaagatgtagttgaacacgacgttggccacggtcatgatgatggcgttgaccatgagcacgcgggtgcgggtgatggccacgaagaaggcgcggaacatgacccctatcgaggtgaatatcagtccgaagatgcggtactccatgtaatcttcgccggctttgcatacggcaggcgaagagatgagcaggtcgagcagccgcggggtccacaccagcgaggccgccaccagcacgaccgagaagagtaccagaaagagggtgccttgtcccatgatggggcccagagcctgatatttcgcctcgccgttgcgccgggccatgagtatctgggccccggtgctgaagccgaaggtgaccatgtagaaggccagatagaagactccggccagagccgaagcccccagttcgacctgacccacgcgccccatgaaggcggtgtcggtgatgttgatgaggttttggacaaatagactgactaagatggggagtgcgatgctccagatatctttgcggctgtacatacgataaggcaggtcgtttggttgttatcggtcgggttacatagcgaaaatgcccactcgacgaatcgggcaggcattcgcaagcaggttattcggttatatcagtttgttggtagcggtgtcggggaatacgacggccggtgtaaactcgcgagcctcttcgggagtcatcagggcataggccatgatgatgacgatgtcgccgggttgtaccttgcgggcggcggctccgttgaggcatacgacgcccgaaccccgttcgcccttgatgacgtaggtctcgaatcgttcgccgttgttgttgttgacgatagagaccttttcgttggcaatgatgtttgccgcgtccatcaaatcctcgtcgatcgtgatgctaccgatgtaattcaaatcggcttgagtaacggttactctgtgaatttttgattttacaacctctataagcatggttctgatgtgttatttttcgggacgtcgataagcgatgttgtcgatcagtctcacctctccgttgtatacggtaatgcaacccacgatatagtccgagtcgttccagtcggcaacgggttgcaacgtgtttccgtcgacgatttcgtagtattctacgcgcatctcggggatagcgttgagggtggcgaccacttcatcgatagtctctttcaccgaatgatcggctgcaaaggtacgacttttaaataaagtctcggctattttgggggcatttcttcgctgcgactcggtgagccgcgtgttgcggctgctcagagccaggccgtcggcctcgcgcacgatgggcacggccacgatgttgaaggtgtatcccaactgggcagtcatggcgcggatgacggcaatctgctggaagtctttttctccgaaataggcattgtcggggcgcacgatgtcaaagagtttgctcacgatttgggccacgccgttgaagtgtcccggacgatatttgccctccatcacctcggctacgggacccaggttgaatacacgggtatcttcggtcgggtacatctcctcgaccgagggggcgaaggcataggtgcagcctaccgactcgagcagctgacaatccttgtcgagcgtgcgggggtagagccgcaaatcgtttttatcgttgaattgggtagggttgacaaatatactcaccaccgtcacgtcgttgttggcgacgctggtctttaccagttgcaaatgtccgttgtgcaaggcgcccattgtcggtacaagtcctatcgttttaccggcattcctgtccgaatcgagctgttggcgcaattcggcgattgttgtgaatactttcataattgaactttggttaaaaaatcgtgcaaaagaagcaaataaaacccaattgacgaaatcaaagagagcttttttatggactgtggccttaaatattttgggttgaggggaaaatatgagaagtctgacgattttttgttgttaatacttctaatatttcgtggttcccgccgttttttttattatctttgcaaaactaatcgagtttaaagaggtagaatgaaagaagccaaagttctatttattgcccaggagatcactccttatttgccggaatcggagattgcccatgtatgtcgccatttgccgcaaggtattcaggatagagggcacgagattcgtacgtttatgcctaagtacgggtctattaacgagcgtcgtaatcagttgcacgaggtcattcggttgtcgggtatgaacttgatcatcgacgacaccgatcacccccttatcatcaaggtagcttctattcaatcggctcgtatgcaggtctattttatcgacaacgacgactattttcagcgtagtgccgacggggtggccgaagaggccatgcgccccgataacgacgagcgcagcatcttctttgtgcgtggtgtgatggagacggtgaagaagttgcggtggacccccgacattatccactgtcacggttggattacggccttggctccgttgtacatcaagaagagttatgccgaggatccctcgttccgggatgccaaggtgatttactcgttgtacgacaatgattttaaagttccgttcgatcctcgatttgccgaaaaattgaaactcgagggtattcaggatagcgatctccccttcgccgtaggcgattcggtagacccggttacgctcaacaagctggccgtgcagtattgcgatggtgtcattcaggccagccagcacatcgactctcaagttaccgattacgttcagcaactgaatatccccttcttgggatatcaggaccccgaaaattatattgatgcctataacgacttttacagtaaaattgtagggaacgaataacgtcagttactaaatagaaatgaaagtttttaaatttttgccggttgctcttgtctttgctttaggcatcggcatctcttcctgtggcgacgaaaacagcatgataggctcgtcgatagtcgatacggatctcgaaatcgtggtggattcctctttccaaaagatggtaacagccgagtctattcccaacgatagtgtggtggggcgcacgataacccagttgatcgggcgcatttcgatacccggatacggaaagttggagaccgatttcctcacgcagtttatgtcggcctctactttcgatacggtaggtgtcgatcgtctcgactcgctggttctttacttgagctacaacaccgagtcgtttacaggcgattcgctggcgcccatgcagttgagtgtctatccgctcgagaaacagctcaaatcgccggtatacagcagtatcgatccggccgaatattacaatgcacagagcgctcccatcgctttgaagagttacaacgcttcgttcctgggcttgcccgattcgctggttgagttgggttacaagaccatacgggtgaagttgcccgatgccatggccgagcagctcttcgagaagtacaaaaccgatccgctcgtattctcttcgcccagccggtttacccaatatttccccggtttctatgtgaagacctcgtacggcagcggttgcgtagtgaatgtgcaaaactcggtgatgaacctgcactacaccaaaaccacggtcattaacgataaagactctacctacgcctcgacccagacccttatggctgtaacgcccgaaattagcacaggcaaccatatccggttagagatagaccctacattgcagagcaatatagatgccggtcgggtctatttgcaggctccggcgggcttgaacgtactgttgcatttccccacacgcgaaattgtccgctcgttcgaagagtcggtaggggctggcggttctaccatacagggcctcatcaattcactcattttggaagtcccgttgaaagagctgcccaagagcagttacaaactcgagccgccgcaattcctgctcttcgtgcggaagagcgagctccagagtttcttcgaaaagaaagaactggccgacaacgtacgctcgttctatgccgaatacaacagcgataagcgtaaatacagctttaccgggttgcgtaccttcctgaacgatgtcatcgagaagaagcgccagggtaccgaaattaccgatgccgacgaggagattgtgctcgtacccgtatcggtatacagcgagaccgtatcgtcgggcagcagctactactattactcgtacaacgagaaagaggtagtaaccgatattgttccctacatctcggctccggctctggccgaaatcgacatggaccatatccgattgcagttgacttatagccggcagaaaaccaaatagccgggcaaagatataggcaagacaagaggcggggcgatgcagttcgttccgcctctttttttcagcaaggggtattggctgtgtaaggagcgtagagtaagccgattagctctcttcgatgagagggtggaccggccgattcggaaaccgtcgggcgagtcgggcgaaaaaaatatgtggttgcagcgaaaaaaataggccaaagagtttgtcggtattctcaaaagcattacctttgcaccgcaatcgccacaatagctcagtcggtagagcatttcattcgtaacgaaaaggtcccgggttcgagtcccggtcgtggctcagcaaagaggttcaagtttcttgaacctctttttttatgcctcggctccggttaagtttggcctgctctattcgtaggccagaaataccgattgttgcttctacaccacggggattcaccggagagagtaccggacgaagttgtagaaaagcacggctcgtgcatcctgccagtaacctttactcgcaaaggtctatgttctcgtttctccttttcttttcccgatggaggtgatgcgattgggtatatttcgtgtatctttacagaaaataagagctatgaatatttcgcatatacgacttcttaaccagcaattggtaagttcccgatttaccgatgtccacgacttggttgcgtggatgggtatggtgcaggcgcaggagtataagatgatgcgctgggcggtgggcatgaggttgcgcgagccttcgatgcgtgcttttcgggaggcgtatgatgcgggccggattgtgcgcactcacctgtttcggtgtacctggcaactggtggcggccgaggatttgggctggatgttgcctttgtgtgccgagaggaacaaggtgtcgattcggggttacttggcttatcacggaaggcagattgaagagcgagagtatgaacgtgccaacaggcttatttgcgatgcgctgtctggggagaaatcggtgcggaaggagattcttttggcccggttggccgagtgcggtcttgaagatgatgcccatacgatgtcgatttatctgcgccgagccgaggcggatggcattatttgcagcggtgagctggatagcctgcagaacacgtatgccttggtcgaggagcggataccccgattgcgtgagctgcggcgtgacgaagcgattgccgagttggcccgcaggtatttccaaagccattcgcctgctacactcgaggactttgtatggtggtccaatctgggcgtgggcgagtgtcgggcagccatcgagtcgatttgcagcgagttgattaccgagtcgtatgccggggagacttattttatacatcgcgattgccgggtgaggggataccgtcggcagacgattctgttgccgtcgtatgatgaatatctgattggttacaaaagtcggcaccatgcttttgaagaggagtttcgccatcggatacatagtagtaacggcttgttctatccggtgattcttcacgatgggcaggtggtgggtaactggcaccccacgagggagccctctttcttcagggacgagatgcagcccgatgtggccgaagcctttctacgctatcggcaattctgggatagcgatagataagatctcttctggtaaataaaagggggggatataaaaaagacgaggagcaagatgctccccctctcaaatgttttcacaacggaataatccttattgtgatttgctttcaaatttgtagagcaaatataggaattcttttttaataatattgtatatagataaaaatttttacatttacaaaaaaatagagaataccataaacacacgatgatatgaaaaatatattggggctggatttaggctcttcgagtataggatgggctgttgttcgtgaagatgaggataatcgtgaactggtgtcaatgggaagccgtattgtgcagctttcggccgaggagttgtcgtcgtttacccaaggtaacggggagtcggtgaatgctcaacgtacccagacgcgcggacagcgtagggggtatgaccgttaccagttgcgccggtcggcgctgatagagaagttgcgggctttgggtatgctgcccgatgcttcgttgcgaggattgcccaaattgcagttgtggggattgcgttcgcgtgcggtgaccgaacagattgccttgcccgaattggggcgggtgttgctgcatctgaatcaaaaacggggatacaagtcgaccaagagcgatttttcgggcgataagaagacgaccgattatgtgaagacgattctcaatcggtacgaccagttgacggccgaggggttgaccattggccagcatctgttcaaggcgttgagtgccgatcccttttatcgctgtaaagagcaggtctatccacgtaaggcgtatgtcgaggagttcgaccgcgtgatggcctgtcagcgacagttctatccgcaggttctgaccgatgagaatatccgcagcatacgcgacgaaatcatatactaccaacgtccgctgaagtcgtgcaagcatctggtttcgctctgcgagtttgagaagcgcgcttatgtgaatgcggccggcgaaaaggtgttttccggtccccgggttgcaccccgcacctctccgctgttccagctttgccggttgtgggagagcataaaccacattgaaatcagagaccgccggaacgaggtgttagtgatttcgctggaacagaagaagagaattctggagtttatgaatacgcatgaaaagctcaagataggcgatttgatgaagctgttggggttgcccaagtcgggcggcttccggtttggcgaccagttcaaggccggtatcccgggcaacaagacccgtatcgatatagccaaggcattgggcgattaccccgatcaggagcatttgttgcagttcaacgtccgtgagacgacctctacgctggtcgacgaggagacgggcgagattctgcccatcatcgacacctcgttcgagcaggagccgctgtacaggctttggcatgtactctattcgatcgacgaccgcgagcagttgcaggctgtgttgcgccggcagttcggtatcgacgacgaagaggtgcttgcccgcttgagcaagctcgatttcgtgaaggccggttttggcaataagtctagcaaggcgatgcgccgcatcttgcctttcctgcaactggggctgaactatgccgatgcgtgtgctgctgccggatacaaccacagtcgcagcgagaccaaggccgagagcgaggcgcgccaactgctcgaccgtttgccggctattcgcaaaaacgagttgcggcagcctgtggtggagaagattctcaaccagatggtcaatgtggtaaatgcgttgatggcccgctatggccgtttcgacgagatacgggtagagctggctcgtgagctgaagcagagcaaggaggagcgggagaagagttacaagtctatcctgcgcacccagcgtgagaacgagcggattgccgcccgcatagccgagtatggcaccgccacccgctcgcgcatccagaagtataagatgtgggaggagaccgagcaccgctgcatctattgcggacagccggtcgatgtgagcgactttttgcggggcttcggcgtagaggtcgagcacatcataccccggtcgttgtatttcgacaacagctttatgaacaaggtttgttcgtgtcgccgctgcaacagcgagaagggaaacagaaccgcctacgattatatggcgtcgaaagatgcggagagctttcagaactatctcggtcgggtaaacgacctgctggaccgaggcaagatattgaaacccaagtggcgcaatctgcttacccccggcaaagatattcccaaggattttatagacagacagttgcgcgagagccagtatattgcccgcaaggctcgcgagctgctctcgatggtgtgtcgccaggtaacggcaaccagcggtacggtgaccgattttctgagacatacgtggggatgggataccgtgttgcacgacctgaacctgacccgttaccaatcggtagggctcaccgagataaaggaggtgcagcacaacggcagtgtgatgaaacaagagcagatagtcgggtggaccaagcgtctcgaccatcgtcaccatgctatcgatgccctcacgatagcctgtaccaagcaggggtacatccagcggttgaacagcatgaacgctcaaagcaaggtagaaggagaagagggagaagaagatgtgcgctctcaaaatctggaacggtatatccagtcgcagccccatttcacggtagcccaggtgcgtgaggctgccgacaagatattgatttcgttcaagtcgggcaagaagtcggtaacccccggcaagcgctacattcgcaagaagggcaagcgggtggtggctcagcgtgggttgctggtgcctcgcggagccttgagcgaagagagtgtatatggcgtaatacatcgatgggagaaagacaagcagggtagtcccgtgcaagtgccgtatgccgtgctcaaatatcccgttgcgtcgatcgatcccaagtctctcgacaaagtggtagacgagggtatccgccagatactctccgaccgtttggcccagtacggcgatgatcccaaaaaggcctttgccacccccgtatatagcgatgccgaggggcgtgtcgccattcgcaccgtgcggtgcctggcccggcctgcggtcgatacgctggtcccgctcaggtacgacgaggaggggaatcccatagcctgggccaacccgggaaacaaccatcatgtggccatctatcgcgacgagtcgggcaaataccaggaacaggtggtgaccttctggagtgcggttgaccgccggcgtgcgggattaccggccatcatcacacagccgcgagccgtgtgggacagtgtgttgcagcgaaccgacctctcagaggccttcctgaaaaccctccccgatgtgaagtggcagtttgtgctatcgttgcagcagaacgagatgtttattctgggcatgagcgaggaggattatcgctatgccatggaccatcgcgactatgccttgctgaacaagtacctctatcgggtgcagaatatatcatccatgtattattgtttcagataccacattgaaactacggtagacgataagtacaacgggaagcggaatgatgcgttgtctatccgtatgggaaaattgaaaaggattgttagctttacctcattcttctctcaaaatccccataaggtgcatttgtcggtgttgggcgaaatagatgaagcattatgattaaacgcacactatatttcggcaatccttcatacttgagcttgcgcaacggtcagttggtcttgcgcttgcccgaggtgtcgaaaaacgatgcgttgcccgataccttcaagcgggaagcagagtggacaattcctatcgaagatataggtgtcgtggtacttgatcactcacaaattacagttacccatggactgcttgaggctctactcgagaataattgtgctgtaattacctgtgataagaaccggatgcccgtagggttgatgctacccctttgcggtaatacgacacaaaccgagcggtttcgccatcaactcacagcatcgcaaccgctgaagaagcaactgtggcagcagacagtacagcagaaaatagccaatcaggcggctgttctggagtcgagaggcattgtagcaaaaaatatgcgagcctgggtaggcgaggtacgcagtggcgatgccgacaatatggaggctcgcgcagcagcctactattggtcggttctctttcccgaacttgggtatttccgtcgtgatcgcgaaggagacccacccaacaatctgctcaactatggctatgccattgtgcgagcggtggtggcacgtgcattggttgttagtggcttgttgccaacgtgtggtatccatcatcacaatcgttacaatgcctattgcctggccgatgatataatggaaccctatcgtccttatgtcgaccgtgaggtatgcaacatcctgacgagtggcctcgattataccatactgacaaccgagttgaaggccaaactcttgtctctacctaccgtagaggtaagtgtacaagggcgtcgtagccctttgatggtggccgtagcccaaactacggcatcgctctataaatgttttagtggagaactgcgtaaaattgtttatcctgagatgtgatgaatctcgaccgttttagcgaatatcgcattatgtgggtcttggtgtttttcgatttgccgacagagacgaagcgtgagcgcaagttttatgccgaatttcgtaaaaaacttttacaagatggttttaccatgtttcaattctccatttatgtgcggcattgccccagccgggagaatgccgaggtgcatattcgtcgggtaaaactttcattacctcctctggggaaagtgggaattttgtgcatcaccgataaacaattcgggatgatggagatattttaccaggccaaggagacaaagtcgcaagtgcctcctcaacaactcgaacttttttagaaagcaaaaagccggtagctaagccggctttttaacaaaatacagcttcagttttttaattctgattgttgttttaattgtttgacttataaggtgctatgcagattgtgctgtatttaataagtcaaagatacaaatttgaaagcgaatcacaacaccaatttctcaatacagagcaacgagacggctgtatttaataagtcaaagatacaaatttgaaagcgaatcacaactcgtcgtcgatttcacgataacgggcaaatgctgtatttaataagtcaaagatacaaatttgaaagcgaatcacaacagtcggcaaactttttcaacggccaagtcgctgtatttaataagtcaaagatacaaatttgaaagcgaatcacaaccggcgaaacattatgcctctgaattcttggctgtatttaataagtcaaagatacaaatttgaaagcgaatcacaactttcgtggaggaagaacgaagttcgacgacgctgtatttaataagtcaaagatacaaatttgaaagcgaatcacaacacattcatgtcactgcctacaagattgtacggctgtatttaataagtcaaagatagagcaaggagagcgcaaaacaaacaagtttatctctgctttttgctgagccgcattcttatcctttccctttgcactttggtgtgttgggagcggggtaaccttagcctctatacttgtttgaccgatgtcgatagcggtggcttgacgacgatgtggggattgatgcgcagcaggtggtcgatgaaggcctgttgttgccggggcgagaggatgagcgtttggcgtttgtccagacgcaggcagatgcggttcaacgaggcggccggggcgctctccaaactggtggtacgggcaatttcggtgatgcggtcgatgtcgaattgccgtttatcgaagagtccgctttgtacccgcagggttttgtggtcgatggtgtaccgggtattgaccagggtatcgacgataagggcggtgaggatgaccagcagggcgagccctatccacaccgacaggtatatcatgagggcatagacgggtaacaggacgagggcgataacggtgaccagcccccggctgatgcctgagcgatagatggttgccataggagaccttgagagttagaggatgccgccgccgaagatgagccgcagcaggcctacgatgatggagacgatgcagagggtcttgccggtgtcggacttgaggatggcacagataatgaggaagatgatggacacgggtatggtgatccagttgagtatccccagcagggggatgaaggcgaccagggtgatgagcagggctatgatgcctaagaatgttcccattgtaaaagttggtttttaaggtgtaacaaatcgaggggcgcaagggttgacccttgtggggtcaatccatgcggctcttgtagtcgttgtagtcgtattcgcgccacatctctacggtgccgtcgctcctgaggcaggcgatagagggatggggtatgccgttgaacatggtggttttgacggtggtgtagtgtatcatgtcttcgaagatgatgcgctcgcccacggtgagctcgtggtcgaagtaccagtcgcccatgtagtcgccgctcaggcacgagttgccacccatgcggtaggcgtgcaggccgggggccggtgtggtgacggcgccgcggatggcgggctggtagggcatctcgagacagtcgggcatgtggcaggcaaaggatacgtcgagtatggcggtgcgtatgccgtggttctcgacgatgtcgacgatggtcgataccagcggccccgtctgccagccgaatgcgctgccgggctcgagtatgagttcgaggttggggtggcgttgcttgaagtcgcgcaggagccgtaccaggtggtcggtgtcgtagccctggcgggtcatcaggtggccgccgcccatgttgagccatttgacttgcggcagcaggtggccgaatcgctcttcgacctgcacgagggtcttctcgaggtcgtaggaggtcgactcgcacagcgtgtggaagtgcagcccctcgacgccttgcggcaggtgtgccagcttgtcggccgtgatgcccagccgcgaaccgggggcacaggggttgtagaggtcggtctcgacctcggagtattcggggttgatgcgcaatccgcacgacacgcggttgccgtcggccacgacctgggggtagaagtgctcgaactggctcagcgagttgaaggtgatgtggctgctgtagcgcaggatggcggggaaatcgcgctcggtgtaggccggcgaataggtgtgggcggggctgcccatctcttcgaaggcgagccgggcctcgtgtatggagctggcggtagagcaggggatgtattcccggatgatggggaacgacttccacagggcgtaggccttgaatgccagtatgatgttgaccccggcggcctccttgaccgagcggatgagttgcaggttgcggcgcaggcgtgcctcctcgagcacgtagcagggcgatggtatttgcgatagcatgtcgttgtgcatggcgggtatcggtttgagtggtttatgattttatagaatggtgaatttggcaaacttgagcagcagttgtttgcggcctacgttgtcaaactcgacggtaatcttgctgttgtcgcccgagccttcgatggccgacacggtgccgttgccgaaccgggcgtggcagatgcggctgcctacagcaacggtgccggctgccgtcgtggtagaggcttgcgatgccgacggggttgtacccgagggtcgtgactcgatgcgggtgagccgcttggccggggccggagccgtgaaggggcggggtgccggggtgcggttgtcgtcgctctcgtcgcggcggaagggtttgcgtccccattcgccaccgaacgagctgcgccacgggactttctcctcgcgaggctcttcgagccgctcctgggcaggcaggtcgacatatcgggggtcgagctccttgatgaaccggctgggaggcgacgataccgtctggccgttgcggtagcgggtgagggcgtaggtgagggtgcagttctcttcggcccgggtaatggccacgtagagcaaccggcgctcctcctcgatttcgcgctcgctaccctgacacatggacgaggggaagaggttctcttcgacccctacgatgaatacctgcttgaactccagtcccttcgaggcgtgtacggtcatcagcgtcaccttgtcctgctcggcttcgtcgccgttgtcctggtcggaagccagcgatatttcggccaggaagtccgagagggtggtctccgtttcgcccgcctcctgccgcagggtgcagaattccatgacaccgttcagcagctcttcgatattctcctgccggctgatgttttcgggggtacgttcggcggtgatgtcgcgcagaatgcccgattgctggacgatggtctcggccgtgttctggcgggtggccgcctggcggaagctctcgatgagatctttgaagcccttcagtttgttcagcgttccgttgttgacctcgaggtggtggttcagcgggtcggaaatcacgctccacaggctgtcgccgctctcgtgtgcccggtctatgagcttggccagcgtggtgttgccgatgcctcgggcggggtagttgatgacccgcttgagggcctcctcgtcgttgggattgatggtgaggcggaagta

SEQ ID NO: 4126 - DNA, 14907 bp, synthetic construct
  misc_feature 1..14907: note = Synthetic
  source 1..14907: mol_type = other DNA
gaatgatatatgagcccaatcaatattctctgctttttccataatgaaaaatgtttattagaaaagttatagtttcggttaatttaaagcgctaccttttgtgtcacattgcctattttgacaatatatataccacgggcgttgattttgagggtggaggctccagggccgatggtggcttgagaaactaattggcctagaatggtgaaaatctttacttgtacacggtgtgtagaacgcactattatgcaaccatctttactgaatatctccactccatctgatacacgagggtcaacaagacttggtgtattaatatctggactgccatcgcgccattgcatttgcgcagaaatttgacttgcaaaactaatacttgcaagcaagatagcgaatgatattaaaaaacgtctcattttaagccccctttatattaaatacaaagatacatgaaatgataagaaagagaaagaaaactttctattttttaacttccagaagtcttctctggttttggactttttagtcttcatcaaaaggatagcggcgctttggatttcgaggaaaccatcctttacgaaccctctcttgttgctcaaaaatttcgataatagtccaaaatgatgaaaatccggctacgcccaaaagcgcagatgcaagaatgttttctactaatattgaagctcctacgcctattatgcctagaattaaaaacatccaccagcatcgcgtgccaaaatagtattcgcattttatcacaataggatgaaataccccaatgattagaaaggtggagatgcctattaataggccaagcaagtgatattgacttaaaaaatccattaattcattttttgtaaagatagtaaaatatttggattttattcaataatgacgcttatatgcaaaaagtgcgaagagctccttatcgaactcttcgcacccatcttttttattgaactaattttatttacgtccttgcaaatcgtcgttttcaattgtcttgtttgctttcttgacttgtgcgtttagtttaccaaatcgatatgatattgaaatattgaaagagcgggctaggtatttgttctcagaaaatgctcttgtatctccgttcacagtccaagaattccaattattgtatttgttgttgaacggattcattgcgcttaatcttacagtaagtctatcttcttttaggaaagatttcatgagggtaatgaagtagaaatacgaatgtcccccatattgatacaaactatatacaccaccatcgttgcgaccccctgctagagataatttaagtttataaggcagagtttgtgttgcattagcgtagaagtcaaatccccagcgattaagttctaaccctaagttcttatttctgaaatcagtataaaaggcacttccattaatcatgaaggatgtctttcttgaaatctgccattggaggtaagtatttaaattaactttatttacttttccaatattttcgtaagtactgtttattatattatcctttacgtaactatattctgttatatcattattattgaacgtatagtttaatgaagaattaattgtaattttttgcttcagtaatgaataagtaagtgataatgagttgttgcgagagcacttcagatttggattaccgtaagatatttcagtaggtgttttgttcactgctggattcaaatataaaataccaggacggttgatgcgggttgcaaaatttaattttaattggttttgatcatttatttgataactaaggctcaccgtaggcacaacatcatttagattcatgtggaagttatcctcaggtttgtcagcatatttggctgacaaatatgaatattcataacgtagtccagctcgtgctccccatcttttagtattatatgcgtattctccatatgctgccgctacctgggttaggtggttgaaatcagttggtatggtttgtccattgttgtattctttaatggctttgctatcattatttcgatttatgtatttaacgccaaattccaatttttgcttgtcagcgatagggcgcgtccagtcaaattggaatgtatgttcatagaatttcaatctgctatcggaattcatatctgtgtaagttacaggaaattgaaataaattactgtattgttcttcctcgatacgtgtttgattagtggtgcttaataggtatgaaaaaactaaagattcacctttgcgcttagtaagatgttggtagtcgagttgaccattgaaatcaaaatactgatatttagggcttgtgaaaaggaagtcataagaataaagggtatttcctttagcatctttcatatttagtgtttgattacttgtaacgttaagtttataaaaatatcccccgaaagagaatgttacaagattcaaagagtcaatatcatagcttgcttcaatattaccataatggatgttccctggatttactccgcgagaatagccataactcttgttgccgcttgatacatactctgtttcgtttgtgttataattctttgtcccgctttctgacatatgattatatccataatttatagacgttgtgaatttaccgatttgcgtcattaaataaatgttatcatttacacctcttgagcttacaccaagatttgccgtgcccattacgccttttattgaggaattttccatcataacaatgttaagaattccgtttacaccctctgcgtcatatttggctccaggttctgtgattacctcaatctttttaatcatattggcaggaattgccttcaacacatcttttgcattcccagaaagtgtattgtctggtcgcccgttcttatatatcttgaagttactgcttcctttcacttttatattgtcttgaccatccacggtcaccattggtaccttgcggagcatttcaagtgctgtgttggttttactttcttcgtcactttgaacatcatatgtgagacgatctatttgggatgtaacaagtggcttctgtgccgttacctctactgcggcgagggtagttgcactattttttattattaatgtgccaaaatcttttgtcttagcatcgtttgttagttcaaattttttgataattgggcttttccctacagaagttattgaaagacgatatttcccagccattggaagttcttgtttaaaacgtccatctgcatcagttacgcctagttttatagctttaatactatctttttgattgtagattcttacggttgcataaggttcacttactccagctgaatcagctactaacccttgcactttaaattgagcagttgctgttagacctaacatcgcaaagatcaataccagcaatgaaatttttcccatataagttatttatttaaacattctattcattagacgtaacatgtactagaatcgttgcacaaatttgtaattatttttacaaaattctaataaatttaattaaacgtctgaactacagtgtcgtaatgattacttgttgaactcatgaacctctcataaatcatctttaatatttttcgtttaaaaatctcatttcgaatttagataatatgttatacaagaattaaggacttatctcgtaatttctcttattgtgtatttaggaggattaacatttgggtggttgtgtaattactttattggaaaaggtgtgcttaaaatcgcacaaagcattttcaatataatataaaaaaagaggatatcctaataggaatatcctcaaatttcttaaagaaacgtttcagaaaattattttctgatacctagctctttcttagcaataatagcacggtaacgttcgatatcaaccttgattaggtaatcaagaaggcgacgacgcttacctactagtttcttaagggcacgagctgtgttataatctttatgatttgactttaagtgttcagtcaaatgggagatacggatagagaataatgcaatctgcgcctctggagacccagtatcagtattacttgctccgtacgttccaaagatgtctttctttttttcagaatctaaatacattcttttaattattatagttagtacaattcggtgtgcaaagatactgattatttttgatttacaacacttatctcataaaatattcaaatatatataagtgattttccaataaatcactacctttgcaagcgaaataggtataatatgcagaaaattaggaatattgccataatcgctcacgttgaccacggcaaaactactttggtagataaaatgttgctcgcaggaaatcttttccgcgacaaccaaaatacaggtgaattaattctcgacaacaatgatttggagcgggaaagaggtattacgattctttccaagaacgtttcaattaattataacggctataaaatcaatattattgatactccagggcacagtgacttcggtggagaagtggaacgtgttcttaatatggctgatggttgtcttcttcttgtagatgcttttgagggtccaatgcctcaaactcgtttcgtattacaaaaagcccttcagattggtctaaagccaatcgtagtaattaataaagtcgataagccaaactgccgtcctgatgaagttcaggaaatggtgtttgatcttatgtgtaacttggaagcaactgaggaacagttagatttcccaacaatatatggttctgccaagcagaattggatgagtactgattggaacaacccaacagacaatatcattcctcttcttgatgctattatcgaatacattccagaaccaaagactcttgaaggtgatgctcaaatgctaattacttcacttgactattcttcatatgttggtcgtatagctattggccgtgttcaccgtggagaaattcgtgaaaacatggatgtagttctttgcaaaaaggatggctcaatggttaagcaacgtatcaaggagcttcacacttttgaaggtatgggccgcaagaaagtagctagtgtagcttctggcgatatatgtgcgttagtaggtattgagggatttgaaattggcgatacagttgcagatgcagctaatccagaaccacttcctcgtatagctattgatgagcctacaatgtcgatgacgtttaccataaacgattctccattctttggtaaggatggtaaatatgttacttcgcgtcacattgcagaccgtcttgctaaggaacttgataagaaccttgcattgaaggttcaaagaactgatagagacgatgcttgggtcgtatttggacgtggtgtccttcacttggctgtacttattgagacaatgcgtcgcgagggatatgagctacaagtaggccagcctcaggtaattattaaagaaatagacggacagaaatgtgagccggttgagttactttctataaatgtacctgaagaatattcaagtaagattatcgatatggttactcgccgtcgtggtgatttagtatcaatgtcaaatcaaaatgaccgcatacatctagaatttaatattccttctcgtggtattataggattgcgcacaaatgtgcttactggatctgctggtgaagctattatgtcgcaccgtttccttgaatatcaaccttggaagggcgaaatagagcgtagaactaatggctctcttatcgctatggaagcaggtactgcttatgcttatgcaatcgacaaacttcaagatcgcggacgtttcttcatcttcccacaagaagatgtttatgcaggtcaagttgtgggagagaatgcaaaggacaatgatattgtagtgaatgttactaagtcaaagaaacttactaatatgcgtgcctctggagctgatgataaagctcgtatcattcctcctgtagtattcagcttggaagaagctcttgaatatatcaaagctgacgaatatgtagaagttacacctaatcacctacgtatgcgtaagattatacttgacgaaactgaacgcaagcgtgctaataagagctaaacttgctccaaataatgaatattaagtgcgattcattaatttgacgtcgcaattaaataaagaattcatttcataattttattttttcttcggatgcaatagatttctattgtgtccgaagttttttatatacctaaggcaatcgagcctcaattcttgttcaacaaaaatatataccaagtgttataaacaaaaacgcaaataacactttgtattatgaagtcattattatctaaaatcgcaattgttgcacttattatagcaacaagtatgaatgtaaatgctgattcaaagaaacaaaataataagtgtgataatagggctgaaatgtctttaggccctggcccagttacagctatttcttataattattcccagctaccatcccaagttaggaattttgtttcttcaaattatagagggcagaagattgaaaagattacgttttttactcttgcaggaaaatataaaattgagtttaagaatgatgctgagataatgctgaataaggattgtaaaatcttcgatattgatgctgctaagaaaggctcaatttcgaaaaatcttcttcaaagagcattacctgataacgcagtaagattccttgtagataaaaaattgataaatcacgtggaggagtttaagttgatgcgcaatggttcttataagatacaaacggataaatcctcatttttcggattagataaaaaagaacgtactatctattttgataggaatggtaataaagttataaacgttaagaaaagacgataacgactagcaacgtctgattgattattactgagctttattatgaagttcgtttagaagttaagggattagtaccactcaactccatttgaggcagaacttctcttgtcatatttcaaatcgctcaagagtgatgatttaactgcgatatggaagttgtatgatttatatgggccaactggtacaaaacttgcagacattgtaaaacagtgtaaatcacgagaaatcgagcagttcatgtatgcaattttcccagtatcgaaattgtagctagccgagaagttgaatgaccagtttttggtagggcgcacgttcccggagaagcttaaattctgtgtgaaccgtccattatattccattttctttttattgaaagtcccataggaataattcacagaatagttaaaagtcaaactccacgggaagtcccattgcgcatatccatccgggttaagtgtataatcggcttttttcgtatttttagacttgtcagtgctctcctcatcatcttgcttggtggcctcaggttttggcaagtttggattcggattatcttctttactattctcgtcagttttctttttcttcttgaatgtgtcgttgttgagtgtataagaaaaagatgtaccagtacttgaaagtttgcctagacctttgcctgcttcaagacgagtggtgtttacacgcacagggttacccgccgaattaagtttataggtatatacatcccatgttgcattaagatttaaattgaaattcttcatcaaacgcaataatattgacgtgttgatgttgctccatcgcattgaatcggctgcaaagttatatgattggcttacagtaaaattctcaatcagagatattttcttttctccaatactatcttggtcgcttttaactttcatctcaaggttgttggcaagagagaagctaactattccatttttgccttgcggagcagttccaaaaattccatgagagaaataagaatatttctttcttactatttcaccattagggtcgctataagcataggtgccataatatccccaccctggggtactgaagtctggtgctgccgagaatgaaacggttggggtcatgacatggcgtatcattttcaccttatcacccaagaatttcatcggacggaagaacccgtatacttttgtatcgaaagatatagctccagagaagtcaaatacattatagaagttgtaggtagtatcttgtacttcagcagatgatgctggatcccacattcttctaattttcgaggtgtacatacggtcattaagtgtaatgctcggtgttaggttgatgtatttgaatatattgaatgttgcagagacaggcagtgtgtgtcgcataccgttacgccagtctttaacaagactcttcttgaagaattggtcttgatttgccgttaattggttttgaagatagcctgtgtatgacaattttatcttttcataccatttctcatcaccaacggctcttttacgcttaaatggagcaatctgagcaagtgtaagagtgatattagggaaagatactgtcaatgttgagtcggctgtacgttgtgatatatttgccgttgtcgataaactccatttagaatttggaaaacgataagtcatattcaccgtgctactcttagtattctcagtgaaattgctgttgtaataactatttaagtcgttacgagtatatccgcttgtagagaagtttacgcttgctgagaaggtcatattaggattggcctttgcatcttgcgagtgagtccatgccacacggaagtttttctgtttagagtaatcagcctcgcctttatccccagtaattgtagtgataaaacttatattaaaattaccagagaatttgtagcgcttattgtatgtggattgtgctgtgagtccccaagaaccgcgggtgtatatttctccagttagtgccatgtccacattgtcatttattgcaaaatagtaacctccgtcgcgaagatagaatcctcgattatagtcttctccaaatgtaggcattataatacctgaggcatattttgtgctaaaaggaaaataaccgaatggaactgctatggggagcggcacacccgctagcaccatatatgcagggccagtaacaatattttttttcggtttcaccttaccctttgtaagctgaaggtagaagtgaggacattcgtgatcgtcacaagtggtgtatctaccattttgaatgtaatactcgtcattaggcattttctttgttgcgcccccggttagatagccttctccctgctgagtgataacatctgtgataaaaccttttttagacttgaaattatatttcatcgtctttgactcgtattctccactaggatctttgaatataggttttccttcaagttctccaacgctatcaagacgtcccacagcatcgacagtgctcgtattcatatccatttggatattcatggcagaaagatcaatgtcgccatatttaatcttgctgtcgccgtacatacgtgcatcattcttgccatagagaattactgagtccttggcttgaaattccactacattgtccaaatccaccatttgatgtttgaactttgaaacagtatcttggcgatgtatagaatcgagtttggttagagctgtggagtcggtttctttctttaaagaatcagcaatagacttaacagaatcaagaatatctttattgatattgataacaggagctactacatcagtagtgtgccgaagctttcctttctgggaattgcctcggatttctaaattcgattgcccgttttgtttatttatagctagagcatcatgcgataatgaagcaataaagcaaagtatagctgtagcaataaacgcaactatgtatatatgagtatgtctcaattgatgtactatcaaaaattgtacaaaaatacataattaggttcatatctgcgtaagatatcgcagaatttcatctttccaataagcataaaaacatttaaaatgtccctttcaatcaatcatgcaacccacgattttataaaaaaggatataaaaaaagcgagagagtaaactctccccctttaaatgttttcacaacggataaaatcctttttgtgatttgcttcaaaattgtaatgccaaatttagaatttatatatgataagtgcaaataatttgcataaaattattatgtttacaaaaaaatagataatatcatgaaatataatttaggattagatttaggatcaggtagtattggatgggctataatatcaaaggatgaagccactaaagaaattaaaatcgttgatttaggatgcaggatagttccaatagagggcccggatataaccaaattcaatcaaggtcaagcttatacgaagaatgccgaaaggacaataaaacgtacaataaggaaaggatattttagatttaaaatgaggcgtgatagattaacgcagctcttaagaaaattaaatatgcttcccgatgaagatttgataaagttgccacaattaaaattatgggaacttcgatctaaatctgtaaaagaaaaaatttcgctacaagaacttggcagagtcctttatcatctaaaccaaaaacgtggatataaggcatcaaaatcagatttatctaactctgataaaaagataggcgaatacgtgaaatctattaaaaataggtatgacttattgcatgagaggaatgaaactataggagaatatttttatagtaaattgaaagaaaatgagtatttcaggtgtaaggataatattttccctcgtgcagcttatttggaagaatttgatgcgataatgaattgccaaaggaaattttatccagagattctgacacaggaagtatttggcaccttcagaaatgaaataatttattatcaaaggaatttgaaatcctgcaagcatttagtttcaatatgtgaatttgaaaagaaagaatatataaacaaatataatggagaaattgtaatttcagggcctaaagtggctccaaaaagttctcccatatatcaagtatgtaaactttgggaatcaattaataatattatactaaagaataaaacaaacgctagttataatatatctctagaatataaaaaagatatttttgattttttgcaaacgcatgaaagtctaaaagtaaatgatctatataaaattcttgggataaaaaagaacgaaggttggtggggtggtaaagcaataggtaaaggtataaaagggaatactactcttttacaaatatcaaatgccctatgtaataaatatcctgaattgttgagatatgatctaactattgatagcacatcatgctatgaccgtgaaactggtgaagtctatgatgttatttcaccgagttgtgaagaagaacctcttaatcaactatggcatactctatactcaattagcgagaaagatgagcttgaaaacgtgctaagaaaaaagttcggaataaaggaagattatatattaaataatttatttgcattagattttgtgaaagcaggatatggaaataaatctaccaaatgcattaggcgcatattgccatatttgcaattggggtcgaattattctgatgcttgtgctaaagctggatttagacacagtgaaagtttgacaagtgaggaaaatctcagccgtatattgtctgatagattagagtatatacagaaaaactctttgaggcagccaattgtagagaagatattaaatcaattggtaaatgtagtcaatgccttgatggagaagtatggtcagtttgatgaaattagagttgagttagcaagggagttgaagcaaagtcgagaggagagaaaattgacatttaaagaaatgaataagaatcaaaaacaaaatgatgagttcgcaaaattaatccaggaagatgagaaattaactccgactcgaacaagaatccagaagtataaattatatagagaaagtggttataaatgtatgtattgcggggcgcaattatcacttcatgattttctccaaggatttgatgctgaagttgaacacataataccaaaaactcttttgtttgacgatagtttttcaaataaagtgtgctcatgtaggaaatgtaatcaggaaaagaacgaccgaactgcatacgattttatgaaatcaaaaggagatgtaatttttgatgattatattagacgggttaatgaattgttcaaaataggtaaaattactaagcctaagtttgaaagacttatgactccaaaagataaaataccaacagattttatcaatcgacagttgagagaaagccaatatatatctagaaaagccatggagcttctacgtggcgtgtgtagaaatgtatatgcaactagtggcagtgttacagatttcttaagacacacgtggggatgggataatgtcttgcatagtcttaactttgatagatataaagctggtggactaaccgaagttgtagaagttaaccataatggatgtaaatatcaagaagaaagaattattgcttggagcaaacgcttagatcatcgtcaccatgcaatagatgcgttagttatagcttgtactactcaaggatatatccaaagaattaataatctaagtactttaaaggataatgaatttaaatcattggaataccaaagtgatgatcaaaagcaaaggcattcatctttagaaaaatatattttatcgatgccccattttacaactgcagaggttagctccgctgtttcaagaatattaatatctttaaagccagggaagaaagttgtgacaaaagggaaacgttatatctttaaaggtggcaagagaaaactcgtacaggaaaatatacttatacccagaggggctttatgcaatgaaactatttatggtaggataaagcgatataaaaagaataaatcaaatgttaattttgaggataaatatgttacaaaatatcaattagccgaaatcgatagaaaaaaaatagattcagtgatagattctaaagtgaagaagattatagagaacagactaaaagaatatggatatgatgttcataaagcatatgccgagcctttatattatgatgatgtccacaaacaacctataaagagcgtaagatgcattactgggctatctgcagttgtacctcttaggtataatgataatggcgaaccaatatcatttgtaaagcctgataataatcatcatattgctttttatattgatgaagatggtaactatcaagagcatgttgttacattttgggaagctgtggaaagaagaaaatatggaatgccctctattattgataatccacaaagattgtgggatgaaattcaacagtcggatatcatatatccagatccatttttaatcagtctgccagaccaaaaatggtcttttaaaatgtcgttgcaacagaatgaaatgtttgttcttggattaagtgaagatgagtttaaggatgcaattaaaacgaatgatctgagtaccttaagctcccatttatataaagtacagaatatttcgaataaaacttatcgttttaatcttcatacacaaactcagtttgacctttaccaggctggtaaaccagataagagatattataatttctcaagtattaaatcattgtttggcatgaatccacataaggttaggattaatgttctgggtgagataaaagattcctgatgattaaaagaacactatattttggaaatccggcatatttaagtttacgcaattcccaacttgtagtgaaactaccagaagttgagaaaaatggaacaataagtgtgatctttaagaaaaatgccgagcgtactatccctattgaagatataggaatagtagttcttgacaataaacaaattacaataacgcaaggccttcttgaatttttattggaaaataattgtgctgtattaagttgtgatagttctagattaccagttggtatgtttctacctctatgcggacattcggtgcaatgcgaaagatttagaaagcaaataggtatgtccttgcctttaaagaaacaactctggcagcaaacaatacaaatgaaaattgctaatcaagcagccgtactgaaaaaatatagaggaatgaaaactggtaatatggatgcatgggttaatgaagttaaaagtgatgatgctaataatcttgaggctagggctgcagtatattattggaaaaatgtatttcaatctattccagattttatccgagatagagatggcgattcgccaaacccaatactgaattatggttatgcgatattaagagcaattgttgcaaggagtttggtatgtactggactccttcctacatttgggatccatcatcataataaatataatgcgtattgcttagctgatgatattatggagccatatcgaccaattgttgatgaaatggttattggtattgttattagagaaggggttagcattggtttatcgcaagaggttaaagttgaacttctttcattgcctgttaaggaagttaaaattgatggtaaaagaagtccattgatagttgcaataaatattaccactacatcactctataaatgtattacaggtgaacttagaagaataatttatccagtattatagatttttaaatggatagatttagcgaatatagaattatgtggattcttgtattttttgatcttcctactgaaacgaagcgtgaccgaaaactctactcacaattcagaaaaagtttgcttcaagatggatttacaatgtttcaattctcaatttatttgagacattgcccaagtagagagaatgcggatgtccatataaagcgtgtgaaggcaattttgccacctgcaggagaagtgggaattttatgtatcactgataaacaatttggacttatggaaatattcagtgtcgcgaaaataaaagctaaagaaaagccgattcaacaattagaacttttttagaataaaataaatcccgtcttgtagcgggatttattttaaaatacaactaaattttaaatcctaatcattgtgataagtatctaatacacaattaattattaagaatctgctgtatgattaaatacaaaaatacaattttgaaagcaaatcacaa

SEQ ID NO: 4127 - DNA, 14206 bp, synthetic construct
  source 1..14206: mol_type = other DNA
  misc_feature 1..14206: note = Synthetic
cgcccctaaagtcacatcgtttccatgattatccctctcccctgtaccggaatgctgaacaggagagaaggacaaacacgatatataagaaagtattaccctcctcctttaccgtgtcccgtaacacggcagaggagaaaggcgaatacagttatctcgtttgttaaaacgatgtaacaagggcgttaaaccacctcccctatattttgctacgcaaaacacaggggagctgtccaaaggacggaggggttgatacaagccaaagtttctaagacaaaaaatatcttggatttgcacagcggattaaaccccacccctcagaaactcccgtccctgagagctcgccccgtcgtccccgacgccgctccatacccctgattttcggctcataaccctttgataatatctaatatatagattaatatcctttttacactattaaaggaaatcgtttggagaaggatatgacagcagtgattataattttacgaatgggattttgggttggagacagagaaatattcttaaaaagtttttgataaaatagatatatataaaaaagaacgaggagtataaatactcccccttccaaatgttttcacaacggaataatccttattgtgatttgctttcaaatttgtgttgacaaatatacatataattttttaatactattgtatttttcgataaatttttttatatttacacattaaatataataataccataaaatatatagtaggcatgaaaaacatcttaggattagatttaggtttatcgagtataggttggtctgttataagagaaaattcagaagaacaggagttggtagctatgggtagccgagttgtatcgcttacagccgcagaactatcttcttttacacaaggaaatggggtgtctataaattcacagaggactcaaaaaaggactcaacgtaaaggatatgacagatatcaattgcgtcgcacattgttaaggaataagttggatacattaggaatgttacccgatgactctttatcttatttgcctaaactccaattatggggattaagagcaaaggctgttacgcaacgaatcgagttgaacgagttggggagagttttgttacatttgaattaaaaacgtggatataagtcaataaaaagtgatttttcgggtgataagaaaataaccgattatgtaaaaactgttaaaacccgttatgatgaattgaaagagatgagattgactattggggaattattttttcgaagactgacagaaaatgctttttttcgttgtaaagaacaagtatatccccgtcaggcttatgtcgaggagtttgattgtattatgaattgtcaaagaaaattttatcccgatatattgactgatgagacaatcagatgtattagagatgagattatatattaccaacgaccgttaaagtcgtgcaaatacttggtgtcgcgctgtgaatttgaaaagcgtttctatctgaatgcggccggtaaaaagaccgaagctggtcctaaggtatcaccacgcacttctccattgtttcaagtatgccgtttgtgggagagtatcaataatattgtagtcaaggaccgtcggaatgaaattgtttttatttcggcggagcaaagagcagctttgtttgattttttgaatactcacgagaaactcaaaggtagcgatctcttgaaactgttgggtttgtccaagacgtatggttaccggttgggtgagcagtttaagactggaatacaggggaacaaaacccgagtggaaatcgaacgagctttgggcaattatcctgataagaaaagattgttgcaatttaatcttcaagaggaatcttcgtcgatggtcaatactgaaacgggtgagattattcccatgattagcctgtcgtttgagcaggaaccgctttatcggctgtggcatgtattgtattcgattgacgatcgggagcagttacagtcggtgttgcgacagaaattcggaattgatgatgacgaggttttagaacggctgagcgccatcgatttggtgaaagccggttttggaaataaatcgagcaaggctatacgtcgcatattgccatttttgcagttgggtatgaactatgcagaggcttgtgaggctgctgggtataaccatagcaataactatacaaaggctgaaaatgaggcgcgcgctttgctggatagattaccggcgattaaaaagaacgagcttcggcaaccagtggttgagaagatcctcaatcaaatggttaatgtggtgaatgcgcttatggaaaaatatggacgattcgatgagatccgtgtggagttggcgcgtgaattgaaacaaagtaaagaagaacgttctaatacatataaaagtataaataagaatcaaagggaaaatgagcaaattgctaaacgtatagttgaatatggtgtgccaactcgatctcgcatacagaaatataaaatgtgggaggaatcgaaacactgttgtatctattgcgggcaaccggtagatgtgggggattttttgcgaggatttgatgtcgaggtagaacatattattcctaaatcattgtatttcgacgatagttttgcaaataaagtttgttcttgtcgtagctgtaataaagagaaaaataatcgcactgcatatgattatatgaaatcaaaaggcgaaaaagctctgtccgactatgtcgaacgagttaacacaatgtacacaaataaccaaattagcaagaccaagtggcaaaacttattaaccccagtcgataaaatttctatcgatttcatagatcgacaattacgagagagtcagtatatagcaaggaaagccaaagagattctgacatcgatttgttataatgtgacggctacgagtggttcggttaccagtttcttgcgacatgtttggggctgggataccgtattacacgatctcaattttgaccgatataagaaagtgggtttaaccgaggtaatagaggtaaaccataggggcagtgtcattaggagagagcaaataaaggattggagtaagagattcgatcatcgccaccatgccattgatgcacttacgattgcctgtaccaaacaggcgtatattcagcgcttgaataatttgagagcagaagaaggaccggatttcaacaaaatgagtttggaacgttatatacagtcacaacctcatttctcagttgcacaagtccgtgaggctgttgatagaatattagtgtcgtttagagccggtaagcgtgcggtgactcccggcaagcgatatattcgtaagaaccgaaaacgtatttccgtccagtcagttttaattccacgaggtgcgttgagcgaagagagtgtatatggcgtaattcatgtgtgggagaaagatgagcaaggtcatgttatacaaaagcagcgtgctgtaatgaagtatccgataacctcgattaatcgggaaatgttggataaggaaaaagttgtggacaagcgtattcatagaatcctttccggtaggcttgctcaatataatgataatcccaaagaggcgtttgctaaacctgtatatatagataaggagtgtcgtattccaattcgcacggttcgttgttttgcgaagccggcgattaatacgttagttccactcaaaaaagatgataagggaaatcctgttgcttgggtcaatccggggaacaatcatcatgttgctatttatagagatgaagatggcaagtataaggaacgaaccgttacattttgggaagcagtggatcgctgtcgggtaggtataccggctattgtcactcaaccagatactatttgggataatatacttcagcgaaacgatatatctgaaaacgttttagaatccttacctgatgtaaaatggcaatttgttctttcattgcagcaaaatgagatgtttattttaggaatgaatgaggaagattatcgttatgctatggatcaacaagactatgcattgttgaacaaatatctttatcgagtacaaaaattaagtaagagtgattatagttttaggtatcatacagaaacttctgtcgaagataagtacgatggaaagcccaatttgaaattgtctatgcagatgggaaaactaaaaagggtgagtataaagtcgttattgggattaaatcctcataaggtgcatatctcagttttgggtgaaataaaggaaatatcatgatcaaacgcacattatattttgggaatccctcgtatctgagtttgcgcaatgcacagctagtactgcgtctgccagaagtgtcgaataacgacacattacccgatactttcaaaaaagaggcggagcggacgattcctatcgaagatataggagtggtcgtactcgatcattcgcagataacaatcacacaaggattgctcgaagcccttctcgaaaataattgtgctattatcacttgcgataaaagtcgtttgcctgtgggactcatactacccctttgtgggaacacgacacaaaacgaacggttccgagaccaacttaatgcttcgttacctttgaaaaagcaactttggcaacagacagtgcagcaaaagattgccaatcaagctgcaattttggagagccagggaattatagccaaaaatatgcgggcatgggtgggcgaagtccgtagtggagacatcgataatatggaggcacgggctgccgcctattattggtcgagtatattccctcacctcgatagttttcgcagagacagagacggcgatcctcccaacaatctactcaattatggttatgccattcttcgggctgttgtcgctcggtcgctcgttattagcggattgttacctactttgggcatacatcatcataaccgttataatgcatattgtttggccgatgatgtgatggagccttatcgcccctatgtcgatggcttggtctgtgaaatcatggaaagtggaaaggactattcgatgttaacgaccgaattgaaagcaaagttattgtctttaccggtggtagaggtaggtattcaagggcggcgtagtcctttgatggtcgctgtcgcccaaactaccgcctctttatacaaatgttttaacggggagttacgtaaaatcatctatccagaattataattaatatggatagattcagcgaatatcgtattatgtgggtattggtatttttcgatttgccaacagagacgaaacgagaacgtaaattgtatgccgacttccgtaagaaactgttgcaagatggatttactatgtttcaattttccatttatgtgcggcattgtcctagtagggagaatgccgatgtacatatccgccgggtgaagctttctttaccgccgtttggaaaagtaggtattctctgtgttactgataaacaattcggtatgatggaaattttctatgggaagaaagaggtaaagccacaggttctacctcaacagctcgaactcttttgaaaaacaaaaagccggttaaaaaaccggctttttgataaaatacagctttaatttttgatcctaattgattgtgtaattgtttgactattaaattgctatacaaattgtgctgtatttaatatgtcaaagatacaaatttgaaagcgaatcacaacatttgtcttccgattccatattaagtttcagctgtatttaatatgtcaaagatacaaatttgaaagcgaatcacaactcatatcgtttacggagataaaacagaagagctgtatttaatatgtcaaagatacaaatttgaaagcgaatcacaactgaccggctcgttgttgtaagccatcagaggctgtatttaatatgtcaaagatacaaatttgaaagcgaatcacaacccttcgtaccttgtgtggcactaagatttgctgtatttaatatgtcaaagatacaaatttgaaagcgaatcacaactctaaaatcagcgtatcaatgaacaacaccgctgtatttaatatgtcaaagatacaaatttgaaagcgaatcacaacgcaagtaaattcttgctttatttcagagcgctgtatttaatatgtcaaagatacaaatttgaaagcgaatcacaactcctcacttattaaggaatgctggaaagtgctgtatttaatatgtcaaagatacaaatttgaaagcgaatcacaactatccacgtttgatttgagagtagttcttcgctgtatttaatatgtcaaagatacaaatttgaaagcgaatcacaacggtgtcgctttctccttttcacgtagctccgctgtatttaatatgtcaaagatacaaatttgaaagcgaatcacaacgaatgctgttttcggttatcaacgcccgtggctgtatttaatatgtcaaagatacaaatttgaaagcgaatcacaacatcgtgtcgcaattccgagacttgactaaagctgtatttaatatgtcaaagatacaaatttgaaagcgaatcacaacgcttagcccgagtgcttgacttaatgcatgctgtatttaatatgtcaaagatacaaatttgaaagcgaatcacaacggaaacgaagtttccgccttatacattaaagctgtatttaatatgtcaaagatacaaatttgaaagcgaatcacaacctgcaaggaatacagcgagtaggcgccgccgctgtatttaatatgtcaaagatacaaatttgaaagcgaatcacaactcatttttgaagtacattaccatgataaatgctgtatttaatatgtcaaagatacaaatttgaaagcgaatcacaaccgctttgtccatacattaagccgatatttagctgtatttaatatgtcaaagatacaaatttgaaagcgaatcacaacagctgtcgaaccgtattggtcgacaatcggctgtatttaatatgtcaaagatacaaatttgaaagcgaatcacaacgggtgagtccgtatttatcattgaacattagctgtatttaatatgtcaaagatacaaatttgaaagcgaatcacaacatcgtgtgtttgatgtgaaaccggagctttgctgtatttaatatgtcaaagatacaaatttgaaagcgaatcacaacctacgaagtcccgtcttgtggataaatctgctgtatttaatatgtcaaagatacaaatttgaaagcgaatcacaacatcgtgtgtttgatgtgaaaccggagctttgctgtatttaatatgtcaaagatacaaatttgaaagcgaatcacaaccgggaaagcgttctttgacttcttggaatcgctgtatttaatatgtcaaagatacaaatttgaaagcgaatcacaacgagccgcacgcagggtctcctgtctttccagctgtatttaatatgtcaaagatacaaatttgaaagcgaatcacaacttggttcatagaaccgcagtttcgtcgagggctgtatttaatatgtcaaagatacaaatttgaaagcgaatcacaacctggtgcacctgctactccgcaagatatgtgctgtatttaatatgtcaaagatacaaatttgaaagcgaatcacaacgattaaatgcgaacggatttaacaactgtcgctgtatttaatatgtcaaagatacaaatttgaaagcgaatcacaaccaatgaggagttcaaaatcaacgctccttcgctgtatttaatatgtcaaagatacaaatttgaaagcgaatcacaacgtcgaaactggtagtgcaagtatggtacaagctgtatttaatatgtcaaagatacaaatttgaaagcgaatcacaacctggaacctgtcgagcgaggaaatggcgaggctgtatttaatatgtcaaagatacaaatttgaaagcgaatcacaactcgaatcgtacactttaacggccttgttgggctgtatttaatatgtcaaaggtacggatttgaaattaaatcataattaatttagttggattttaaactgttaatttcttatgtgttgagaataccacggataaatactattgaattacagtgttggtaggtgtgttttgtgtggaaaagcgtatctttgatagctcaatcaaagggataatgaatgtatggaaccgttaggtatttgtcgtacggctttttatgtgtctaaaaagatcatgtgtgccgtacttatcgtattttcattgagaggcagagcgcagagcagtgtaatgatggagaaggagacttgtgcgtttcttcaatctttgcctgcgggtttacaaaagacacaggccgatgccgtgcgtcgcgccataaacggggattgtaccgctttgatatctgtgcgtaattcgcgtaatacgaaccctgaatcgaaaagtggggtagtggcaacggatatcggagggtgttatcgtttgtatcgccctgccggattcgatactattccgttgcctgtgttgatttacttacatgggggtggctggtgtttcgggagtatcaatagttgcgctcatttttgtgcggggttatcgtatagggcaaagattgctgtgttggccgtggaatatcccttagcacccgaacatgcttatcctgccgccctcaatgcttgtaccgaggccgtcgcattcgctttcgagcatgccggggagtatggctttcttcccgatcggatatctatcggcggagatagttcgggcgggaatcttgctcttgctacggctcttaacctaattcttgcaaaggattctcactcttgccgcatggacagtggaacgatgtgctcttcactttgttcgctcgtgctgttttatccggtgacaaaagcttgggcagacggttcgtcttcgtggaaaaactatgccgagggatatggtctcgatgcccaattgatggaggctttcaatgccgcatacatcggtacaggagatgctcgacagcctcttgtctcgccgggtgtagccgatgacgagctactgaaacagctaccgccgacgcttatcgtcaatgccgagcgggatattcttttatgtcaggggaaggaattggcggccagactttccgggctcggcgttgccgtgagccatacggttttgcctcatacggtgcatctctttatcaccgtgccgggacagcctacggcattcggggagtctgttcgtttagccgccgactttctcacgttagagtaggggaatcattccgtatcagagaggtggctttacaactatatcgggattgagactccttagatgatcgatgaatgcttgcctctggttgggagacaagacgagagtctttttgtcggcgaagcggatttctatcctgtccatcgataaggccggtgcgcttaaacaactattggttttcgagattttcgttattcggtcgatcgggaaggaggacgacaagaatatgccgcatttgatgtgcagcgtgccgttgtctatggtgtagctcgtgttacagaatgggtcggcaatgaaagcggccgtgacgaccaataaggcgagggctatccaagagaattcgaacaggagcggcaggtaggacagaaggacaattgctataatggcgattagcaagcctttatcgacctttgatttgtaaacagttttcattgtctcgtaggagattagaatatccctccaccaagcataaggcgcagtatacccaaaacgatagatacgatgcagagggttttgccattgtctgatttgagaatggcacagatgatgaggaaaatgaccgatatgggtatggccacccagttgagaaatcccaataggggaataaatgcgacaagggtgatgagcagtgctacgatacctaagaatgttcccattgttttatgctttttgtcgattaacaaatgtattttgtgatttgttccgggggatcgatgtcttgtcaatccattcgggttttatagtcgtagtagtcgtattcccgccagatttccactttcccgtcgcttttgaggcaggctatggaggggtgggggattccgttgaacatggttgtcttgactgtcgtatagtgaatcatatcctcgaatatgattcggtctcctatttgcaattcgtggtcgaaatgccagtctcctatatagtcgccgctcagacaggagtttcctcccatgcgataggcgtatgtgccgggagcgggttctaccgagcctcgtatcgccggtttatagggcatttcgagacagtcgggcatgtgacaggcaaaagagacgtcgagaatggctgttttgataccgtggttctcgactatatcgactatggtggatactaatgtaccggtctgccaagcgaacgcactaccgggttcgagaatgatttcgaggctggggtgtctttgtttgaagccccggaggaggttaatcaaatgtgcggtatcgtaatccttgcgggtcatgaggtgaccgcctcccatattcagccatttgatatgggggagtagatgcccgaatcggtcttcgacctgtgccaaagtcttttcgaggtcgtaggaggtggactcgcagagggtgtggaaatgaagcccctccactccctgcggaagttcgggcagcttgtcggcggttattcctaatcgggaacccggtgcgcagggattgtagaggtcggtttctacctcggaatattcggggttgatacgcaacccgcacgatacccgattgccgtcggctactacttgggggtaaaaccgttcgaattgagtcagggagttgaaggtaatgtggctgctgtatttgagtattgtcgggaaatcccgctcggtataggccggtgagtaggtgtgtgccggactgcccatttcctcgaatgccagccgtgcttcgtgtatggagctggctgtggagtgcggaatatattcccgtatgacggggaatgatttccaaagggcataggctttgaacgccagtataatatttactccggcggcttctttgacggagcgaatgagagcgaggttgcggcgcaatagttcttcttcgagaacatagcagggcgatggtatttgcgatagcgtatcgtgcatgacgtatgaaaaattattctatgattgtgaacttggcgaatttgagcaggagctgtttgcgtccgacgttttcaaattcgacggttattttgcagttgtctcccgtatcttctatggctgtaacggttccgtttccgaagcgggcatggcagatgaatgttcctatttctacttgcccggcagcggttgcaactgtggattgtgtcgtagaatgggtttcacctgtgggtttagagtctatcttggtcaaccgtttgcccggagacggagcagtgaatggtctcggtgcaggtgtgcgatccgtatcttcttcgttccatcgggaagttttgcgcggtctttccgcatcgaatggaaatcggttccacgatatggtttctctgggagactcctgtttggtttgtaccggcatatcgacgtatcgagaatcgaggtctttgatgaaccggcttggaggggaggagaccgtttgtccgttacgatagcgggagagggcatacgtgagggtgcagttttcttctgcgcgggtgatggccacatagagcagacgtcgttcttcttcgatttcccgttcactgtttttactcatggccgaaggaaagaggtcttcttctactccaacaatgaaaacttgtttgaactccaatcctttcgatgcatggaccgtcatcaaggttactttgtcttgctcggtttcatcgccgttgtcttgatctgtcgccaaagaaatttcggctaagaagtcggatagggaggtttgttcttctccggcttcttcgcgcagggcgcaaaattcacggacaccgttcaaaagttcttcgatgttctcttgccggctgatgttttcgggagtacgatccgaggaaatctctccccaaatacccgaccgcttgataatcgtttccgccagttccggtgtgttctttttatcggcttcgtagcgtaattcgtctatgaggtccttgaaggttttcaacttgttcaatgtgccgttgttaacggccaagttgtagcctatggggtcggaaatcacattccatatactggattcctgcgagtgtgcccgttcgatgagtttcgagagagtggtatttccgattcctcgtgcgggatagttgatgactcgtttgagtgcttcttcgtcatcggggtttatcgtcaatctgaaataggcgatggcgtccttgatttctttcctttggtagaacgacatgcctccgtagatgcggtagggtatgttgcgcttgcgcagagcctcctccaatacacgggattgtgcgttcgtgcggtagaggacagcgaagtcgttgtaatcacagtgagtcgtgagacgcatttcggcaatacggttcgagacgataaagccttcttcgaaatcggaataggcacttattacttgtactttgttcccttgttctttttcggagaatacttgtttgggtatttgctccttgttcttggcgatgaggctgttggccgtattgacgatattttgtgtggaacggtagttccgttcgagtttgaatattttcaatcccgggtattctttactcagtccgagtatattgtggatattcgctccccggaatgagtaaatactctgggcatcgtcgcccaccacgcagatgtggttgtggtcttttcccaactgactgacgatgaggtgttgggcgaaattggtatcttgatactcgtctaccaagatgtaggcgaacaggtcgcgatagtgttgcagtacgtcggggtgatccctgaaaagtatattggtattgagcagcaggtcgtcgaaatccattgcccccgacacgaaacagcgttgtcggtagatacggtatatttcgtgaatgaggggccgtttcgaacgagtatccatctcgataagttcccggtttcgcgcataggcttgcggttcgataagggcgtttttcgcatgggaaataatcgcctgcacggttgtgggtttgtatgtcttatcgtcgagttgaagttctctgataatgctttttataagcgacagggaatcggaggaatcgtagatggtgaagtcgtgacgatagccgagccggtcggcattggctcgaagtatgcgggagaaaatggagtgaaacgtccctgcccacaagcgttgagctgtctctgtccctaccaatgcggcgatgcgttctttcatttcgttggccgctttgttggtgaaggtgagtgccagcagccggtagggtggatatcccatttgcagcaggtgtgctattttgtaggtaagtactcttgttttacccgacccggctccggcgataaccaattccggtccatcggtatagagcacagcttcgcgttgctggtcgttcagactgttcagaaaatcttgttccacttttcttttcctttgcttcgtgcaaagatagtgtaaagggttaatagaaacaagcctcggttttgtctgtgtgttatctatttttttgagaatcatactttcgtcattgcataactgagttttatttcttcttttcaaatactgtattggtggtggcggagttttattattggttcattcttctcagcagcaagaagaacgaaccgttcgggctgctgtttttattaacccctccgtccttgcggacacctcccctatattttgcgttgcataacgcaggggaggagggtgatagtaaccctccgctcattgcagtgcgatacccccgcatacggggcacggcaagggcggagtttagaagtagctctctattcatttgcgatttttctatttcaaccccctcgccctgcgggcactccccctatattccttgtaggaacaccccgcaatgctgcgggacacggcaaggggagaaggttgaatactaatgattttctttccctgcaaaagatagtctcggttgcattagattcgctttatttgttcattcttctcagcagcgagaagaacgaaccaagaagcgccgccgcggttatcgggcttttgggttcgtcgctacggtcgccgtcggggtctgcggaactcgctccgctcggacagtcctcgccctttttcctccgtcttccttgcgacttcaccgcccgataaaggcggggatttaattcgtgcttttgacggtcttgaatctttttgttgatacgacatgacgtttcgctccatattttgcattggcaaaacacagaggagatgagaaaatggctcgttatgttatgagg

SEQ ID NO: 4128 - DNA, 9830 bp, synthetic construct
  misc_feature 1..9830: note = Synthetic
  source 1..9830: mol_type = other DNA
gggcatgaagcagctcatgtccggcggcggtgtcattctcatcggcacccagctgatcccgctgctctctggtctgttcggctaatcaacaagcgataggaggaaaacccgccattgttcgataatattttcgcagcaatcgaaaaatggatgagggaacttctttccggcatggtggagtccaacctgagtacgatgttcacagcggtcaaccaacagaccagtgaaatcgctgctcaggtcgggcagacaccgcaagggtggaacagcagcattttcagcatgatccgtaacatttcggattcggtggtgattcccattgcaggaatcatcattacactgatcctctgctacgaactgatctcgatgctgacggaacggaacaatctgcacgatgtagacacttggatgttcttcaagtatttcgtgaagatgtggatcgcggtctatctcgtcagtcatacgttcgatattgcaatggcggtatttgacattggacagtcggtggtaaattcttcctccggcattatccgtggcaataccgccattgatattagttctctttccatgcagatgcaggcggcaatggcaacaatggcgattggcgaactggtgacgctggcattggaaacccttgttgtaagctggtgtctgaaaattctgtcggtggttatcacggtaattatgtacggcagaatgatagaaatatacctctacacttcgcttgctccgattccatttgcaaccatgagcaaccgtgaatggggtcatgtaggtacaaactacttccgggggctgttcgctctggcatttcaggcgttcttgatgatggtctgcgtggcaatctatgcagccctcatcggcagcatccgggtatcttcggatattcactcggcgttgttcggcacgatggcctacacggtgattctttgtttctcgctgctcaaaacgggaagtctgtccaaacagatctttggcagtcactaaatccgggaaaatccaatgaaaggaaaagacagcagacaacgccgtttcccggcggcggtcatgctgttctggtgataaatggcctatgtaacgattcccaaagacctttccaaagtgaaaaacaaggtctttctgaacctgacgaaacgccagcttgtgtgtatgggtttcgcggcaggaattggtgttccgttctactttctcatgcgcgatacgctgggaaccagcaatgcagcggcaggcatggtgcttctgatgctgccggaatttttctttgctctgtacgagaaaaacgggatgcaccttgaaaccatcctgacgaatttcatcagcgtccgcttcaaacgtcctgcggtacgccgctatgaggtcgaaaacctgtatgagcgggaactggaaaccgcagcaccgatccagaagaaaggaggcatcattggtaaaaagtgaaccgaagaagaaatcgcagtcgggcggcttcttccagaagttctttcggaaacccgaaaagagccagaaggaacagcggttgactgtgcagcgttccattccatatctggaaatggggcgcgatggtatctgccgggtggaggaacatctgtattccaaaaccgtccgattctacgacattaactaccagctggcacagaacgaggataagaacaccatctttgaaagctggtgcgacttcctcaactacttcgatgccagtatccgctttcagttgtcgttcatcaaccacaagagcgatatgagcgagtacaacagggtcatccagatcgagccgcagcacgaccagttcgatgatgtgcgtatggaatatgcgcagatgctgaaacagcagcttgccaagggcaacaacggtctggttcggacgaagtacatcacgttcagcattgaagccaaaagcgtgaaagaagcaaagccccggctggagcgtatcgaaaccgatattctcaacaatttcaaggtgctgggcgtgaaagcctacccgttgaacggcgtggaacggcttcagatcatgtacgaaacctttcatcaggaggaacagcagaagttcgatttcagctatgaccgcatcctgcagagcggcatgaccaccaaggacttcattgcgccgaccagtttcctgttcaaaagcggcaaggactttatgatgggggacacctatggtgctgcatcctatctgaacatccttgccccagaactgacggataaggtactggctgagtttctggacatggacaaaaatctggtcgtcagtatccatgtgcagtcggtagaccagctgaaagccatcaaactgatcaaaggcaaaattaccgacctggatcgtatgaaaatcgaggagcagaagaaagctgtgaggtctggttatgatatggaaattattccgagcgaccttgcaacttatggcggcgaggccaagaagattctggatgatctgcagagccgtaatgagcgtatgttccttgttacggtgcttttcctcaatacggccaagaccaagcaggagttggatagtgctgtgtttcagactgctggcatcgctcagaagttcaactgcactctgaaccgtctggattatttgcaggaacagggccttatgagcagcctgccgctggcaaataatctcgttcccatcaagcgcgcactgactaccacttctactgccatcttcgttcccttcaccacgcaagagctttttatggagggcgattccctctattacggcttaaacgcggtgtccaacaacatgattatggcagaccgcaaacagctcaaaaacccgaacggcctaatcctcggcacaccgggaagcggtaagtcgttcagtgcaaagcgtgaaattacaaacgtgtttttcaccacaacggacgatattatcgtcgcagatcctgaaggagagtattatccgctggtggaagcgttgggcggtcaggttatccatatctcgtccaccagtaaggactacatcaacccgatggacattaacctcaactatgccgacgatgataacccgctgggcatgaaatcggactttattctttccctgtgtgaactgatcatgggcgcacgggatggcatggagccggaagagaagtcggtcattgaccgctgcctgccgctggtctaccagaagtatctgaacgacccgaagccggagaatatgccgacgctcggtgatctgtacgactgcctgcgggagcagaaagaacggcaggcgcagcgtatcgccacggcactggaaatctacgtcaatggttcgctgcgtgtgttcaaccatcagacgaatgtggaactggataacagaattatctgtttcgacatcaaggagttgggcaaacagctgaaaaaactggggatgctcatcgtccaggatcaggtctggaaccgtgtcaccatcaaccgcaacagcaaaaagaacacccggtactatatagacgagttccacctcctgctgaaagaggaacagaccgctgcatacagcgtcgaaatctggaagcggttccgaaaatggggtggtgtaccgacaggaattacgcagaacatcaaggatttactcgccagccgggaaatcgagaatatcttcgagaacagcgattttatttatatgctcaaccaagcatcgggcgaccggcaaatccttgcaaagcagctgaatatctcgccgttccagctgtcctatgttacgaacagcaacgagggcgaagggctgctgttctacggcaatacgattatcccgttcaaggataagtttgatacttcgctgaaactgtatagcctgatgaccaccaagcccaatgagatgggaaaatacaaggagaaaaaagaagcatgaacacaccgaacatttttgaccgactgagccgtaagattcatcatcactctgacatggaaccgcacgaaagtgatgctggcccgcctttcgatgaggtggagccgctcaacttccacgatgaagaatcggtggtgcatacggtgctggaagatttctatgccgttggcacactagcagatgaactgactgacggctttcacatggaagcccacggttatcttgaccgtgaggaagtgaacgcccgtctgatcgcctttgcccggaagctggaacaggtgcttgacaagtgggaaacccacgcagctctgatcgcatgacggttccagccggaaggaggtgatttccatagcagacaaaaagttccggggcagagataaaatcgtacagaaaatgaccaaggatggtctggtggatgaaaacctccgcaccggggaacagaagtccgcaaccgtagcagaaaagccggagcaggaagattcggcagaagaaactgcggaaaaagaaacagatgaaaaacctatcgtggaagaagaacggtgcatggaagccgaggatagggaggatgcaccccggcatcacagcaccgccaagcagagcgcagactattataaagcccatcaggaggatgggaagccgaaagatgcgtctgcggaatcggatgcagagccgcccacaaagaaaggccgactttcttttgaggatgaaaaaggcggcattgtccgtggcatggggatgggcgttaagaaggtggcaaagaaaggagtagataccgccaccgggttcgcccatcagaaagtacatcaggtagaaaaggacaattccggcgtggaagctgctcacaagtcggaagaagccgccgaacgcctgcaccactttgtcaaaggcagaaaaaagcccaaagataaatctgccagagcggagaaaagaggtggggaggatcagaaatccagccgtctgaaattctccgagagcgagggcggcacggcagaaaatgcagcagaaccgcagctgaaaaagaaacagccccagccgccaccgactgccgcaggaggtgaagcaaaaacagtcggtgcgaagttttaccagaaaaagcagtataaggatgcctatgcagccgccaagcgcggccagaaagccggaactgccgccagcaagcaggcagcagcggcaacaaacaccattacggagaaagcgaaagcggcggtgcaggagatcgtcgtgcagcataaaaccttgtgggtcggtattggtgtgggtatcctgctggtgatggtaatgttgggagccttttcaagctgcggtgcagcaattcagggaacaggcagtacctttgtgggaacgacatatcccagcaaggatgccgacatgaaaggtgcggaagaagattatctggaactggaaaaggaactggataaacagattcggcagatggaatccacccatccgggctatgatgaataccgctatcagctggacgaaatcgggcatgacccgtatgttcttatctccattctgtcggcaatgcacgaaggggtattcacatacgacgagataacggacgagcttgccgcgctgtttgagaaacagtacacgcttgcgacagaagtcatcaccgaaacgcgataccgaactgagacgcgggaaggaacacgctcttttaccgaccccgaaacgggagaaattgccacccaactcatcatcgaccccgccttcgagcaagaaccgctctaccggctatggcacacgctctactccatcagcgacaccgatgtactcgaccgcattttggagcgtaaattcggaatagaagaccctgaaatgcgagagaaactcacacagatcgacttcaccaagtccggttacggcaacctgtcgagcatcgccatgcggcgcatcttaccctatctccggcagggatatgtctactccgaggcctgtttcatggccggatacaaccacagcaactcgatcacccgggaagaaaacctcgcccgcgaactggccgaacacttacgaccgataaccaaaggcgaattgcgtcaacccatcgtcgagaagattctcaatcagatggtcaatctcgtcaatgcactgatagaccgttacggacgtttcgacgaaatacgggtagaactggcgcgggaactccaacaaaaccgggaagagcgcgacaagacttacaaaaaacaactcgacaaccagaaacggaacgaagaaatcagacatcatatcgaggaaatgtatctcacccctacccgttcacgcatacagaaatatcgtatgtatgaggagagccaccatttgtgcatctattgcgggcaacccgtcggcctcgccgctttcctgcaaggctacgataccgaagtagagcatatcattccgcgttcgctctatttcgacgacagttacaacaacaaggtgtgcgcctgccgggcatgcaaccaagccaagaacaaccgcaccgcctacgactacatgagcagcctgcccgaggaaacgttccatcgttacctcgaccggataaaaaacatgcacgacaacaaagaaatatccgacaccaaatacaaatacctgctcaccaaaggagatgaaataccgcaggacttcctcaaccgtcaaatgcgggaaagccagtatatctcgcgcaaagccatcgccatgttgcaggaagtatgccaccatgtctacgccacgagcggatcggttacggcatatctgcgccacgtgtggggctgggacaacgtcctgcacgacctcaaccgggaacgctaccgcgccggaggactcaccgagatgcgagaaatcgacaaccgtaccgtcgaatgcataaaagactggaacaagcggctcgaccatcgccaccacgccatagatgcccttgccatagcctgcacccgacaaggatatatacaacgcatcaatacgctctctaaacaagccgaagagggtgatcttgtttcactcgaacgatatatccggcagcaaccacacttttcttatgccgaagtgtgtgcagccgccgagaaaatactcgtctccttcaaggccggcaaacgggtggcaacaaaagggaagcgctacatctaccggggtggtaaacgcatcttggcccaagaagacatcaccgtaccccgaggcgcactgagcgaacaaagcgtttacggacaaatagctcaatatcggaaagacaagaaagggaaagtctcattctcttacgaatctgtcctcaaataccccatcgaaagcatcgataccaaaacattacccgatgtggtcgacgccggtatacgtaggattttacaacaacggctcgatgaacacggcggcaacgccaagaaagcctttgccacaccggtctatacggcaagcggacacctcattcgcaccgtgcgttgctttacccgtctcaaagcggtcgttccggtaaaatatgacgcatcgggcaaagcggtcggatttgtcaagccgggcaacaatcaccatgtcgccatctacatcgatcgcgacggcaaaccgcaggaacatatcgtaaccttttggcatgccgtagaacgaaaaaaatacggtctccccgtcattatcgagcgtccaggagaagcatgggacgctgcaaccgatgccatgcccgattcgtttctggaacaacttcccgacgcgacttggcaattccggctctccatgcaacaaaatgagatgtttatcctcggtatgcccgacgagctctatgccgacgctctcgaaaatcgcgactacgcgttgctggggaaatacctctaccgggtgcagaaaatttcaacaaaatattactgtttcagacaccatatcgaaacctcggtcgatgacaaatacaacgggaagaaaaatgaaaaactttccacacaaatggggaaatataaacttataagtagtataagtgctttatattcccaacaccctcacaaagtgaaaatatccctcacgggagaaatctgcgaaatatgataaaaaagaccctctatttcggaaacccggcctacctgagtttcaacaacggacaactcgtgctacggcttcccgaggtagaaaagaacgactcggtaccgacggcgttcaagcagaaagccgaacgcaccattcccgtcgaagacatcggcgtactgctgctcgaccatcggcaaatcaccattacccacgcattattggcagccctgctcgacaacaactgcgccgtcatcacttgcgacgacagccacctccccaccggactcatgcttccgctgtgcggcaatgccacgcaaagcgagcgattccgcgatcaaatagaggcctcccttcccttgcggaaacaactgtggcaacaaaccgtacaggccaaaatcgccaaccaagctgctctactgcaccgcctcggagtcgaaaaccgcaatatgttgaagtgggtaaacgaggtacgcagcggcgataccgacaatatggaagcccgggcggccgtctactattgggacaacctcttccccgggattccttacttccggcgcaaacgcgacggtgtaccgcccaacaacctgctcaactacggctacgccattctgcgcgccgtcgtggcccgggctctcgtaaccagcgggctgctgcccacgttgggcattcaccaccacaaccgctacaacgcctactgcctcgccgacgacatcatggaaccgtaccgtccctacgtcgaccatatggtgtgcgaactgctcgatgaaagaatcgatataagccgactatctacatcgaccaaagcccgcctactcgccctgccgactaccgaagtctgcatcggcggacaacgcagcccgctcatgattgctgtcgcccaaacgaccgcatctctacataaatgtttctcgggcgaattacgcaaaatcatctatcccgaaatgtgaacaacgaactcgaccgtttcagtgaatatcgtatcatgtgggtacttgtttttttcgacctgccgaccgataccaagaaagagcgaaaggcatacgccgacttccgcaaaaagcttatgcgcgacggattcaccatgtttcaattttccatttatgtgcgccactgccccagtcgcgaaaatgcccaagtacacataaaaagagtaaaaatgtttctgccgccgttgggcgacgtagggattctttgtatcaccgataaacaattcggtatgatggaaatattttccgcccgcaaaacgattccgcccaacgccccgggacaacaactcgaacttttctaaaaacaaaaaaggactccgcactatacttggagtcctttttattcgaatactttttctattctaatcttcgattcaaattcctgaaatacagcatactgtatatatccggctgtattcgatatgtcaaagatacaattttgaaagcaatttacaacgaaatctcctacgatgttcgacctcagatagctgtattcgatatgtcaaagatacaattttgaaagcaatttacaacataaatcgtatgagtatttttttttttcggctgtattcgatatgtcaaagatacaattttgaaagcaatttacaacatcttggctatggttcatttcagaatctcagctgtattcgatatgtcaaagatacaattttgaaagcaatttacaacaactcggaaataggtatgtcggtcgcatctgctgtattcgatatgtcaaagatacaattttgaaagcaatttacaaccacgtcatacacgaacgacgaacggcagaggctgtattcgatatgtcaaagatacaattttgaaagcaatttacaaccggccggtgatggtgccgctgcatcttcatgctgtattcgatatgtcaaagatacaattttgaaagcaatttacaactagattctcgaaaggcgaatgcagactatcgctgtattcgatatgtcaaagatacaattttgaaagcaatttacaacaactcaggaataggtatgtcggtcgcatctgctgtattcgatatgtcaaagatacaattttga

SEQ ID NO: 4129 - DNA, 8097 bp, synthetic construct
  source 1..8097: mol_type = other DNA
  misc_feature 1..8097: note = Synthetic
aggataccagtcctttggctaccaggaggttcttgtcggctcgcgagaggcacgaaaggcaagtgatgggatacgcgccgtagagctggatccagtcccgcagactttctccttttgggtaatcccaactgaggatgcgcaggccatagacttcggcgaaggcgatcgcgtcgtccgtaaagcgggtgttggtggccacccactgctggtaatgccggtctttgaagtcgtcgcggccttcccagcgattccgaatgtcggtataccgggagaggatgtacatcgggacttttacatcgctcttggaggaaggattgacgtggtatttgcattcgatggtgaatatccggtcggggttcatggccaggacatccacttcgtgcgaaatggcatggccgggcaggacgatgcctgtctttacctgataacctttttcggcaaaaagatcggcaatgtaacgctcgaacgggtagccggtgttccccaactggctgatggcgtctttcaagcgataccgtacactggctccccgggagtacttgcgcagcagggcgaaggtcttttggtagatttctttggtagtaataccatcgtaggcttccaaggcgacagcccggataatgatctcggcggtttcgttgtttacgcccacgttctggagcgagcggtatatcttcatcgggtcgaacgggacgcgatctcccgattttttgactacgttgagtcggtacgttgtaggttgtagcagcatgggtattcgttttttggaaggcggttcccggttattccacttcttcgtagtccacggtttctcctatttcgtcacggatgatggttcgagtattgcccgaagtccgttccacggttacttcgccttcgcgtcgttcctggtgtcgataccggtaggcgcgggaggagtctgttccgcccgcctgccggaaaagttccttttgtgctttgtgcaaagcccgtacttggcggaagaccggccagagcacctggaaaaagaaccgcaggaaaaccagcagcagcaagaggccgatgacggtgaaaaatatcccgagaaagtccatttgtttccttctttttctgcaaagctaagctatttgagcggctttgagtggttttttataacaaaattaacgaccgtcagaatcgggtcgttcttctcccggaaaagggaaggaaagacaggaaaataaaaaaggcgaggagtcgcctccccaccttacatgttttcacaacggaatgatccttattgtgatttgcttttgaaatttgtacgacaaatatacagatagttgaacagaattccaaatattttttatttttgtccatactccattaatattactttccttatgaaaaagatactcggattggatctcggctcggcaagtatcggttgggcggtggtcagagaaaatagcgaagagcttctcacagaggatgcttcgggctctacagcccccaacgatgcgatcgtggccctgggtagtcgcatcattccgttgacaacggacgaaagcactggtttctcaaaagggagtgcattgacaaaaaatgccgataggacccagaagagaacccaacgcaagggctatgatcgctaccaattgcgtcgaggattgcttttgcaggagttgtcgcgtttggggatgtacagcggacagactctgaggctctctaccctcggactgtgggagttgcgcgccaaggcggtaaccgagcaggtctcgctgccggagctcgggcgtgtgctgtgtcatatcaaccaaaagcgaggttaccggacggtcaagtccgatttcgaggacaagaagcaggggaagtatgtagaggcagtggtcggacggtatcgggaacttcatgcacaggggctgaccgtggggcagtatctgtacaaggagctttcctccgattcggcattccggtgcaaggatcgggtctatccgcgcgcggcttatgtcgaagaatacgacgccatcatggattgtcagaaaaggttctatccggaggtactcaccggagaagtgatcgcccatcttcgcgactatatcatttttcatcagcgtccgttgaaatcctgcaaacatctggtgaccaggtgcgagctggagcggagggaggccttgatcggcgggcgtatccgaaattgcggtccgagggtggcgccgcgttcttctccgctcttccaagtgtgcaagttgtgggaaatgatcaataatctgcggatagaaaacaaggagggcgatatttttgtcttgacgttggagaaaaagcaggccttgtttgcctttatgaacacccatgcgaaatttaccgctgccaaactgacatcggtgttggggctcaaatctcgggactggaagatcgccaacgccattggcaccggtttgcagggcaatacgacctattgtgctttgtccgccgctttggaaaagtgcccggacaggggaaaactgttggctttcgagttgcatgccgtggacggcgataaggtccatgccgatacgggagagatcgtacaagtgatcgatacgtcttttgaaaagcagcccctctatcggctttggcatgcattgtattccatctccgatatcgataccctgcgggaggtcctcgggcagaacttcaggattgcggatccggaaacactcgatcggctgtgccggatcgattttgtcaagagcggttatggcaacaagtcttcccgcgctttgcgcaagatcttgccctaccttcagcaagggatgcagtattatcaggccaagtgcatggccggttatgacgatgcgccgtggaacaaggagcaaaatcaggcgcgcgagttggccgagcgattattgcccgtcccgaaaggggagttgcgtcagccggtggtagagaaagtgctgaaccaactggtcaacctggtcaatgcactgatggccgaatacggacctttcgatgaaatccgtgtcgaactcgcccgggagctccagcagagccgggaagaacgcgaatcggccagtaggtcgatggcggagaacaacaagcggaatgaacaggtagcccaaaaaatccagcaggaatacggtttgacgcccacacgttcacggatacagaaatacagactgtggacggaatcggatcaccagtgcatgtattgcggtcagctggtcaatgtggcggagttcctgcgtggagtggatgtggaagtggagcacattatcccccgctcgatgctgtttgatgacagttattccaacaaagtgtgtgcctgccgcaagtgcaataaggataagaacaatcgcacggctttcgatttcatgaagaccaaacccgagggagaatttgctgcctatctcgaacgggtgaacagcttggccgaggcttacaagcccaacagaggtttggatgtaggcatctccgagacaaaaaagcgcaaattgctcatgagaaaacaggatatccccacggacttcattgcccgtcaaatgcgggagacccagtatatctccaaaaaggccaaggaaatgctgcagaccgtgtgtcggaatgtctattcgaccagcggcagcattacggactacattcgccatgtgtgggggtgggacgatgtgctgcacgagataaatttcgaagggtaccgtgccgccggactggtacagacctgcgaacgggaggtcgatggccggaaacagcaggtcgagcgcatagtggactggtccaagcggctggaccatcgtcatcatgccctcgacgcgctggtgatcgcttgcaccaagcaggggtatatccagcggatcaacaacctggcttcgctcggcgaaataactttccgctcggatgcgggcaaggctccgtccggagcctctcgagagcgccatacacgtctggagcggtatatccggatgcagccgcatttctcgcgagccgaggtgattcgggcagtgaaaggaatcgccgtttcgttcaaagccgataagcgcacggttactcccggcaaacgctatgtttacaggagaggcaaacggatctgtgtgcaaagggggatcctcgttccgcgcggacctctgagcgaagagagtgtttacgggcgtatccacgacgaaggaaaagaaaaatacgtgctgaggtacgaagtggacacaatcgatctcaagaaactcgactcggtggtggaccagggcatacgggagatcttgcgccagcgcttggagcagttcggaggaaatccgaagaaagcatacgccactccggtatacgatcaccagggaagagcaatacgcagcgtacggtgttttaccaacctgaaggttgctgtgccgttgcggtacgaccagcaggggcaacccatcgcctttgtcaagacgggaaacaaccatcatgcggcgatatacgaagacgagaaaggtcgttggcacgagcatctggttaccttctggcatgctgtggaccgcaaaagatacggactcccgatcctcattaccgatccgggagatgtgtgggatcgggtaaccgaccggatgcccgaggattttcaacggcagttgccgccctcggccacatggcggtttgttttttccatgcagcggaacgaaatgtttgtcctggggatggaagaagaggcataccgcaaggctctttcggagcaggatacggccactttgtgccaatatctctaccgggttcaaagcatttcgaccggggactatatatttcgaaagcatacggagacccagagcgatgataaatatccggatgagaacgggaaaaaggaaaccagtcttccgaggtccaaagctcggggtgcggcgcagagaattaaaagtttcggggccttgcaggcattgaatcctcacaaagtccatgtcagcataaccggtaagatctcggaggtatgataaaacggaccgtgtatttcgggaatcctgcttacgtaagcgtgcggttggaccaactggagatccgcctgcctgaggtcgaaaagagcgatgccctccccgaaggtttcaaaacgtcggcggtgaaacgtatcccgatcgaggacatcggtgtggtcgtgctcgaccatcgtcagatcacgatttcccaaggggccttgtcggcactattggaccatcaggcggcggtcattacctgcaacgaacggcggatgccctcgggacttttgcttcccctttcggggaacaccacccagtccgaacgttttagccggcagatagaggcttcgcaaccgctgcgcaaacagctttggcagcagacggtgcaggccaagatacgcaatcaggcggcggtcctgcgggcgttggcgggtttggactgcggcaatatggatgcgtgggtcaagcaggtaaagagcggcgataccgaaaatctcgaaggacgtgcagctgtgttttattggcagcacctgttcgggcacatagagggtttccggcgcgatagggagggagtcccgcccaacaatctgttgaattacggctatgccatcctgcgggctgttgtggcgcgttcactggttgtgagcggtttgctgcctactttgggcatacatcaccacaaccgttacaacgcctattgcctggcggacgacatcatggaaccttatcgcccgcatgtggacaggttggtggcggaaatcgtggaaacggaggacgatatttcggtgttgacgacggcggtcaaaagccggttgttgtctgtcccggtgctcgacgtggtggtccaggggcggcgaagtcctctgatgatcggggtggggacaacgaccgcctcgctgtacaaatgttatagcggcgaactccgccggatagcctatcctgagatggaatgattgaacggttcagcgaataccgcatcatgtggattttcgtttttttcgacttgcccaccgaaaccaaggtcgatcgcaagcggtatgccgaatttcgaaaaaacctcttgcgcgatgggtttaccatgtttcaattttcgatctatctgcggcattgtccgagcagggaaaatgccgatgtgcacattcgccgtgtaaagcaatggttgcccaaagacggttacgtggggttgcttacggtgacggacaagcagtttgcgcagatggagcttttctatggatgtcaacgggtaaagcaagatatgccaacccagcagctggagctattttgaacgatagaaaaaagatttgcctcctaagggaggcaaatctttttgtagaacacccggtttttttattctgttttatcgtgtaataccctgcatttcatgttgttgcgcaggttgtggtgttcccgatagttcaaagttacaaattcaaaagcaaatcacaacgggtgtaagtattttgcctgcgtcacgattggtgttcccgatagttcaaagttacaaattcaaaagcaaatcacaacatacctcgtcgaggtacagtgcatctccgtggtgttcccgatagttcaaagttacaaattcaaaagcaaatcacaactggatatgtacaagcaggctccgttactcggtgttcccgatagttcaaagttacaaattcaaaagcaaatcacaacacccgttgatatatatatctccgtatttttggtgttcccgatagttcaaagttacaaattcaaaagcaaatcacaacctccagggcggagagaacttcgaccaggtggtgttcccgatagttcaaagttacaaattcaaaagcaaatcacaacacagctttaaagtttggatatttaacatcggtgttcccgatagttcaaagttacaaattcaaaagcaaatcacaactaatgcctttgctgcaaattacaagggctggtgttcccgatagttcaaagttacaaattcaaaagcaaatcacaacgtgcgccatgtacgattgttgttcaaggcaggtgttcccgatagttcaaagttacaaattcaaaagcaaatcacaacgcagagcgagctgatggcgctgaaccgcagggttgttcccgatagttcaaagttacaaattcaaaagcaaatcacaacgccgctgctttggtcgatgagcagggagaggtgttcccgatagttcaaagttacaaattcaaaagcaaatagcgtagaaataattgtccagcccaggtcactgggcggtgtttccgatggttcggagttataaattcaacagcaaatggtgcagaaataaccgtccagcccaggtcactgggcggtgtttctgatggttcggagttataaattcaaaatttatcgctgcggcatcgagcgagtgttgtgagtgattggtggaaaggaagacgttaccaacccatcgtcggaaaagcaccccaggatggaatcccgatgggggagaagccgttgtagtagccgtatccgaacggataaggatagccgccgtcgatgtacgatgcgtggaaactgatcatggcccggcgcgagatgcggtaatcggccccaaacgagaagcctttgcgggggacaaacggattgccgctatcggtgagattgacaaaaccagctgcatggagcgtgaggcgggaggtggggtagtacgccccggctacgtaaacgatcgcgtcggtcgtgcggccgctgcgcgaaggaagcccgttggtgatgatgctccagggaatgaaatcggcaccgttgtagtaggactgcatcacggtgactccagcggtgatgtctgcttttttccctacgggagccgttacttcggcattggcattgaatccccaggcggtattgtttttccgtcctccgacgtagccttccatgtttacccgggtagtggcggcgcggcgggacatcttgatcaccgcgttcttagcctgctgcagagccacagccgggctcttgtacagacgctcgtccagcaccggcatactcagttcctgtgcttcctccacgctgctgggcactgtgagcatcgccaagcggctcagcaccccgctgcaaggcaggaacagcagcatagcgcacacgctggacatggtatggatgtttgcaatggagctcttgttcatcacatcgccccacatggggatgccgatggtaaactgcaccgcatagatcagtgccagcagaatcacgctgccgatgacgttgaagtacaggtgg

SEQ ID NO: 4130 - DNA, 7662 bp, synthetic construct
  misc_feature 1..7662: note = Synthetic
  source 1..7662: mol_type = other DNA
tcccccgcccttttgggagggggtcagggggcggggcttatcaaggaggtgcggtctccaggccgcaccatagtctgtccgggtacgcaggcgtccctgcctgctgagaaaactgccttgaagtacacccaactcctcacccaactcggcattaccgacatcgacagcaagccttttgaccaacgctccggcggacagcagaaacgtatcgccctcgcgcaggtgctggcggaggagcccgacttcctcatgctggacgagcctaccaaccacctcgacctcgacatggtcatctggctggaggagtatctccgcaaggcgcgtatcacccttctgctcgttacccacgaccgctatttcctcgaccgcgtctgctccgacatcctcgaactcgaccaaaaccaactctacacctaccacggtaactacgcctactacctcgagaaacgcgccgagcgtatcgaggcgcagaacgccgagaccgataagtttcgcaacctctaccgcaccgagttggactggatgcgccgcatgccgcaagcccgcgcccacaaagcgcaataccgcatcgacaacttctacgagatagagaagaaagccaagcggactatccaggagacggacatccgcttgcaggtgaagtcctcctacataggcaacaaaatcttcgaggcgcacgaggtgagcaagcgtttcggcgacctgcatatcctgcgcagtttctcgtatgtctttgcgcgctatgagaaagttggcattattggcaataatggcacgggcaagtccaccttcctgcgcctgctcttgggcgagttgcagcccgacagcggacacttcgacatcggcaccaccgtccgtttcggctactaccgccagcagggtctgccgttcgacgagggcaagaaagtgatagacatcgttcgcgacatcgccgagaccattgacctcggcaacggcgaccgcctgacggcaagccagttcttgcagcatttcctcttctcgcctgcgcagcagtacgactatgtggccaaactgtcgggcggcgagcggcaacgcctgcacctctgcacggtgctgatgcgcaaccccaacttcctcatccttgacgagccgaccaacgacctcgacatccccacgctgcaagtgctggaggagtatctgcgtgcgttcaagggctgcctcatcgtggtgagccacgaccgctatttcatggatagagtggtggaccacctgttcgtcttccacggcgacggcgtcatcaaagacttccccggcaactacacgcagtggcgcgaagcaaaatgtccggatgcacaggcatcctcgcctgctaaaaaggaggtgcggtctccaggccgcaccccaaaagtcactggggacgtcccgacagtgtcgcagacggtaaaatcggagcagtcggatagtgaaacggtcggacagcaaagcgtccccgatatatcgggatgcaagcatcagacagcgaagcggtcatcctctgcggctcagggagccagcagaggcagaaaactctctttcaaggagcagcgcgagttagaggagatagagcgtcgcttgccgctgttggagcaggagaaagccgccttggagcagcaactctccggcggcttaaccgacccgcaggcgatagcccaagcctccgcacgctacgaggaggtgcagaccgccctcgacgaagccgaactccgctggctcgaactgaacgaatgacaatagtatgcaataggaatccatagcaataatccataattgttttctccatcatttcctatcatccacctgataccccaaagaggaatatctcttgagtactacacaaaaaaaaagaggagttcgcttgcgcgttcccctcttgaatgtttacacatcggaataaaatccttattgtgtatgtcttgaaattttgtgccgcgaaggtactgcttttttttgaaatgtgcaaatatcttgttcttttttttatgaaaaatttgcattattcagtaaaaacaggtaaatttgcggcgtgattcccttgttggatagttgcaaacgggtacttcctcccattatcggggtagttctttccattatgagggtacttccttagcaggggaaagggtagagttcttttcgcttattctaaaaatcaaatatctatgtacacgactacggacaaagacgcgccaaagggcagcaggaagattctcggattggatttgggtgtagggtctatcggctgggcactcattgaggagcaagacggtcaattggggcagatactcggtatggggagccgaatcgtacctattgattctacggatgtggataagttttccaaaggtcaggctatcaccatcaatgccgacaggacggctcgccgcacggctcgcaagggtcttaatcgctatcagcagcgtcgtgctgcgctgacggagcggttgcgggagaaagggatgttgcctgattttgaggcagagcgtcagattgcgctatgggaactgcgcagccatgccgctacgccgggctgcaggttgtcgctgcaacagatagggcgtgtgctataccatctcaatcagaaacgcggctacaagcatagcaaagctgacgagggcggcgagaagaagcagacggagtatgtagaaaaagtgaacagtcggtacgctgccctgaaagaggagggactgaccgttggtcagcatatgtatcagcagttagtcgcctctgcggtgatgcgcccgagcggtccgtattacacttttcgggtaaagggcgaggtgtatcctcgtgctgcctatttggaggagtttgaccgtatcatggaggtgcagaaggtgttttaccccgatgtgctgacagatgagtggatagcggaggtgcgaaaccgcgtgatattctatcagcgtcctctgaaatcctgcaaacatctggtgagcctgtgtgagtttgaagccaaggagttcactatcaaagcgacaggcaaggtgataacgataggtccgaagtgcgccccgcgcacctctccccttgctcaactatgcgccgcatgggaggctgtgaacaacatcgaactgaccaatcaggaaatggagtgctatcctatcactgccgcacaacggcaggcgatggtggagcacctgtgtacccatgataaactgacgaccaaagatgtgcagaagatattgggtctgcccgccaagtcagagtggaaaggtacgaagcaattagagaaaggtatcaaaggaaacagcaccctattgcaattgcgcaaagcgttggagggattaggtaaagaccaaacaaatgaactgttatcctttgacatccctgtcaagtctattgacatggtggatacagcgaccggagaactgacgcagcgcgcacagatagacccatcggcagaagacagcacgctatatcgtctgtggcatagtatctactcgatacacgatgaggcagaactgcgacataccttgcaaaagaattttgacattcacgatgataccgtattggaagccctgtgcaagattgactttgtgaagcccggttactccaacaagtcgcataagtttattcgcaagatactgccttacctgatgcaaggaatgaagtacagcgaggcatgcgaagccgtggaggtaaaccactctaacagtcagactgccgccgaacgcgacagtcgcatgctgctctcgcagattcctctcatcaagaaaggcgaattgcgtcaaccgcttgtagagaagattctcaatcagatgataaacgtgctgaatgcgctgcgcgccgaatatggcgagatagacgaggtgcatgtggaactggcgcgcgaactaaagcagagccaaagcgaacgggaaaataccgacaaacgcaacagagagaacgagagaaaaaatcaggagatagccaagcagataacagaagactatggtttgactcctacgcgcgcgcgtatcctcaagtataagttgtgggaagagagcgagcataggtgtttctattgcggaaaacccatatcggctgcagatttcctaaacggttccgagggcgagatagagcatatcattccgcagagtgtgctattcgacgacagtttcagcaacaaagtactcgcgtgccgtgcctgcaaccaagccaaaggcaaccaaaccgcgcgggagtttatggagaaacagtcggcaggagagtatgaagactatctgcagcgcgtagagaagatgtacaacggaggcaagaaagatagccaaattagtgccaccaaatacaaacacctgctatggcgcaaagcagatattccttcggatttcatagagcgccaactgcggcaaagtcagtacatatcccgcaaggcgatggagatactgcaacagagcatccgtctcgtgagcgccaccagcggcagtattaccgacttcctgcgccatacttgggggtatgacgagatattgcataccctgaatttcccgcgctacaaagaagcagagatgaccgccatcgtgcgcaccaagagcggcagagaggaagaacgcatcaaagactggagcaagcgtattgaccatcgccaccatgccgttgatgccctgacgatagccctcacaaagccatactacatacagaaactcaacagactgaatgcttcgcatgatgagatgatggcagttgtacgccaaaaagattatcattgggatgccgagtattcgctattggagaaatggctcgtggcgcaacctcatttcagcacccgagaagtgttggagaaggtggacggtatcttggtatcgttccgtgcgggaaagaaagtaactacgcccgggaaacgctatgtgtacaaaaacggcaaacgagtcttggcgcagaaaggcttgctcgtgccgagaggtgcactgaccgaagaaactatctatggtaagttaggcgaccgatatgtggtgaagtatcctttgacacacccgtcttttaaggtagagaatatcgttgaccccactatcaagcgcatcgtggaagaacgattggcgtcgttcaatggcaatgcaaagaatgcgtttgctgcgccattgtattccgaagagggtatggaaatcaagtctgtccgctgctatacggggctgaaagatagttctgtggtggcggtaagccgagatgaaaagggactacctatcggctatgctaaactcggcaacaaccaccatatcgccctataccgcgacaaagaaggtaacctgcaagagttgtccgtaacattttggcaagccgtagaacgcaagcgatacgggttgcccgttgtcgtagagcaaccgcatgaactatggagcaaattgctggatagggacgatataccccaaggcgttttggagagtctgccgcatgacgactgggagtttgtgctgtcaatgcaacaaaatgagatgtttatcctcggcatggacgatttggaatttgagacggcgatgcaggaaaaggattatcggatgctgaacaagtacctctatcgcgtgcaaagcatatctcataatgattatttttttcgctatcataccgagacgaaggttgatgataaatatggagacaaaaaggatatcgggaagagccaaacgatggggaaactgaaacgaatacgcagtctgaatgcccttttcgctcaacatcctcataaagtgcgtatcaacatattaggcgagataacgatatgataaagcgagtgatttgtttttccaatcccgcctacttgagtttgcggctcaatcagttggtcgtcaaactgccggaggtggagcatgctcccaacttgcctgccatcattaaggatgagagcgtgcgcactatccccatagaagatataggggtggtggtactggacaataagcaaatcaccatttcgcaggcagtgatggatgctttgctctccaacaattgcgccctgattatttgcaacgacaagcaccatcccgtgggcttacaactgcctttggacgggcacacgctgcagaatgagttgtttcgcaaacagatagacgcttccgaaccgctcaagaaacaaatgtggcagcagaccattgcttgcaagatagcaggacaagcgtatgtgctccgttctcagcagatagattgtccgaacatgagagcatgggcgcaacaagtgcgctccggagatgccgataacatggaaggacgtgcagcggcgttctattggaagaacatgtttcatatccccgattttgtaagggggcaagaggaagcacctcctaacaacttgctgaattacggctatgcgatagtgcgtgcgatgatggctcggtcgctggtggctgccggattgctgccgacattggggattcatcatcacaatcgctataacgcctactgccttgcagatgacatcatggagccgtaccgtccactggtggatatgctggtgctggacattatgaaggaacgcgaagacatctccacactgagcatagagattaagcgcgacctcttggcgctatccactatggatgtgcatattggcggaaaacggagtccgatgatgattgccatgcagacaaccgcaaccagcgtgcagaaatgtttcacaggcgaagcccgcaaaatcatttaccccgaatggtaagcagggcgcgctttagcgaatatcgaattatgtgggtcttggtattctttgatttgcccaccgacacaaaaaaagcacgcaaggactatgccctgtttcgcaagcaactgctgcaagatggtttcacgatgtttcagttttcgatgtatgtacgccattgccccagtgcagaaaatgcagacgtgcatatcaaacgcgtaaagcggattctgccgccggagggtgatatcggcattatgcgtatcacggacaaacagtttgcagatatggagattttctcttgccgtcaaatacgccccacacaaatgccttctcaacaactggaattgttttaatagaaaatggcaacgatctactatctcaaaaaaatcactccctactgatatacttattaagaattttcttccttcctgacatacaagttgagatcaatatagaatttgaaagaaaggtctatatacaaaaaatgcagccccgaaaaggctgcattttttaattctataacacatcgtaagttgctgattctattatagttccaaacaataggttgttatagaactattaggttacaaaatttcaaagacatacacaacatctccatctgtacctgttttagtcgtatagttgttatagaactattaggttacaaaatttcaaagacatacacaactcaacaaatcgcgtaatccagtacggttttgttgttatagaactattaggttacaaaatttcaaagacatacacaacgtattccaaccgttcactctatcggctattgttgttatagaactattaggttacaaaatttcaaagacatacacaacatcccccgaagaccacctgtgcgccgcggagttgttatagaactattaggttacaaaatttcaaagacatacacaacagaggcgggaggggatgccgtactcgggatgttgttatagaactattaggttacaaaatttcaaagacatacacaacaggggggctatagggggaggggtgcggggagttgttatagaactattaggttacaaaatttcaaagacata

SEQ ID NO: 4131 - DNA, 5365 bp, synthetic construct
  source 1..5365: mol_type = other DNA
  misc_feature 1..5365: note = Synthetic
atcggttgttccgccaggagcacagccgagtagctaagtctggaagggataagcgctgaaagcatctaagtgcgaagcccactccaagataagatttccatatagggacgtcaaagacgatgacgtagataggccgcaggtgtacaggcagcaatgtcacagccgagcggtactaatagcccgaaactttcggaagtgcgagacgtcgagggtagataagggaggcagagattgcgagagactcttttttttcgtcaaggatcgcgacattcaggcggttacagcgcgggggatccacctctacccattccgaacagagaagttaagccccgccacgccgatggtactgcgcaagtgggagagtaggtagccgccaacttataggagagagagccggagagggagaaccccttcggctttctctctttttgtatataggactcacaacgaggcaaggcaggagagacacatgaacgcccccaaagtcacatcgtttccatgattacccctctccccccagccgtgtcccgcagcaaaatataggggagctgtccaaagggcggaggggttaaatatacaaacaaaaatcctttcctatcttttcacctctacccctcagaaacggtggtttcttcggtcttttcctgtcgtccccgacgctactccatacctctgattttcggctcataaccctttgataatatataatatatagattaatatcttttttacactattaaaggaaatcgtttggagaagggtatgacagcagtgattataattttgcgaataggattttgggttggggacggagaaatattcttaaaaagcttttgataaaatagagatatataaaaaagaacgaggagtataaatactcccccttccaaatgttttcacaacggaataatccttattgtgatttgctttcaaatttatgttgacaaatatatatataattttttaatactattgtatttttcgataaatttttttatgtttacatattaaatataataataccataaaatatatagtaggcatgaaaaacatcttaggattagatttaggttcatcgagtataggttggtctgttataagagaaaattcagaagaacaggagttggtagctatgggtagccgagttgtatcgcttacagccgcagaactatcttcttttacacaaggaaatggggtgtctataaattcacagaggactcaaaaaaggactcaacgtaaaggatatgacaggtatcaattgcgtcgcacattgttaaggaataagttggatacattaggaatgttacctgatgactctttatctcatttgcctaaacttcaattgtggggattaagggcaaaggctgttacgcaacgaatcgagttgaacgagttggggagagttttgttacatttgaatcaaaaacgtggatataagtcaataaaaagtgatttttcgggtgataagaaaataaccgattatgtaaaaattgttaaaacccgttatgatgaattgaaagagaagagattgactattggggaattattttttcgaagactgacagaaaatgccttttttcgttgtaaagaacaagtatatccccgtcaggcttatgtcgaggagtttgattgtattatgaattgtcaaagaaaattttatcccgatatattgactgatgagacaatcagatgtattagagatgagattatatattaccaacgaccgttaaagtcgtgcaaatacttggtgtcgcgctgtgaatttgaaaagcgtttctatctgaatgcggccggtaaaaagaccgaagctggccctaaggtagcaccgcgcacttctccattgtttcaagtatgccgtttgtgggagagtatcaataatattgtagtcaaggaccgtcggaatgaaattgtttttatttcggcggagcaaagagccgctttgtttgattttttgaatactcacgagaaactcaaaggtagcgatctcttgaaactgttgggtttgtccaagacgtatggttaccggttgggtgagcagtttaagactggaatacaagggaacaaaacccgagtggaaatcgaacgagctttgggcaattatcctgataagaaaagattgttgcaatttaatcttcaagaggaatcttcgtcgatggttaatactgaaacgggtgagattattcccatgattagtctgtcgtttgagcaggaaccgctttatcggctgtggcatgtattgtattcgattgacgatcgggagcagttacagtcggtgttgcgacagaaattcggaattgatgatgacgaggttttagaacgactgagcgctatcgatttggtgaaagctggttttggaaataaatcgagcaaggctatacgtcgcatattgccatttttgcagttaggcatgaactatgcagaagcttgtgaggctgctgggtatacccatagcaataactatacaaaggctgaaaatgaggcgcacgctttgctggatagattaccggcgaaaagaacgagcttcggcaaccagtggttgagaagatcctcaatcaaatggttaatgtggtgaatgcgcttatggaaaaatatggacgattcgatgagatccgtgtggagttggctcgtgaattgaaacaaagtaaagaagaacgttctaatacatataaaagtataaataagaatcaaagggaaaatgagcaaattgctaaacgtatagttgaatatggtgtgccaactcgatctcgcatacagaaatataaaatgtgggaggaatcgaaacactgttgtatctattgcgggcaaccggtagatgtgggggattttttgcgaggatttgatgtcgaggtagaacatattattcctaaatcattgtatttcgacgatagttttgcaaataaagtttgttcttgtcgtagctgtaataaagagaaaaataatcgcactgcatatgattatatgaaatcaaaaggcgaaaaagccctgtccgactatgtcgaacgagttaacacaatgtacacaaacaatcaaatcagcaagaccaagttgcaaaatttattaaccccagtcgataaaatttctaccgatttcatagatcgacaattacgagagagtcagtatatagcaaggaaagccaaagagattctgacatcggtttgttataatgtgacggctacgagtggttcggttaccagtttcttgcgacatgtttggggctgggataccgtattacacgatcttaattttgaccgatataagaaagtgggtttaaccgaggtaatagaggtaaaccataggggcagtgtcattaggagagagcaaataaaggattggagtaagagattcgatcatcgccaccatgccattgatgcacttacgattgcctgtaccaaacaggcgtatgttcagcgtctgaataatttgagagcagaagaaggaccggatttcaacaaaatgagtttggaacgttatatacagtcacaacctcatttctcagttgcacaagtccgtgaggctgttgatagaatattagtgtcgtttagagccggtaagcgtgcggtgactcccggcaagcgatatattattcgtaagaaccgaaaacgtatttccgtccagtcagttttaattccacgaggtgcgttgagcgaagagagtgtatatggcgtaatttatgtgtgggagaaagatgagctaggtcatgttatacaaaagcagcgtgctgtaatgaagtatccgataacctcgattaatcgggaaatgttggataaggaaaaagttgtggacaagcgtattcatagaatcctttccggtaggcttgctcaatataatgataatcccaaagaggcgtttgctaaacctgtatatatagataaggagtgtcgtattccaattcgcacggttcgttgttttgcgaagccggcgattaatacgttagttccactcaaaaaagatgataagggaaatcctgttgcttgggtcaatccggggaacaatcatcatgttgctatttatagagatgaagatggcaagtataaggaacgaaccgttacattttgggaagcagtggatcgctgtcgggtaggtataccggctattgtcactcaaccagatactatttgggataatatacttcagcgaaacgatatatctgaaaacgttttagaatccttacctgatgtaaaatggcaatttgttctttcattgcagcaaaatgagatgtttattttaggaatgaatgaggaagattatcgttatgctatggatcaacaagactatgcattattgaacaaatatctttatcgagtacaaaaattaagtaaaggtgattataattttaggtatcatacagaaacttctgtcgaagataagtacgatggaaagctcaatttggaattgtctaggcagatgggaaaactaaaaagggtgagtataaagtcgttattgggattaaatcctcataaggtgcatatctcagttttgggtgaaataaaggaaatatcatgatcaaacgcacattatattttgggaatccctcgtatctgagtttgcgcaatgcccagctagtactgcgtctgccagaagtgtcgaataacgacacattacccgatactttcaaaaaggcggcggagcggacgattcctatcgaagatataggagtggtcgtactcgatcattcgcagataacaatcacacaaggattgctcgaagcccttctcgaaaataattgcgctattatcacttgcgataaaagtcgtttgcctgtgggactcgtactacccctttgtgggaacacgacacaaaacgaacggttccgagaccaacttaatgcttcgttacctttgaaaaagcaactttggcaacagacagtgcagcaaaagattgccaatcaagctgcaattttggagagccggggaattgtagccaaaaatatgcgggcatgggtgggcgaagtccgtagtggagacatcgataatatggaggcacgggctgccgcctattattggtcgagtatattccctcacctcgatagctttcgcagagacagagacggcgatccccccaacaatctacttaattatggttatgccgttcttcgggctgttgtcgcccggtcgctcgctattagcggattgttacctactttgggcatatatcatcataatcgttataatgcatattgtttggccgatgatgtgatggagccttatcgcccctatgtcgatggcttggtctgtgaaatcatggaaagtggaaaggactattcgatgttaacgaccgaattgaaagcaaagctattgtctttaccggtggtagaggttggcattcagggacggcgtagtcctttgatggtcgctgtcgcccaaac

SEQ ID NO: 4132 - DNA, 3733 bp, synthetic construct
  misc_feature 1..3733: note = Synthetic
  source 1..3733: mol_type = other DNA
cattaggaatgttacctgatgactctttatctcatttgcctaaacttcaattgtggggattaagggcaaaggctgttacgcaacgaatcgagttgaacgagttggggagagttttgttacatttgaatcaaaaacgtggatataagtcaataaaaagtgatttttcgggtgataagaaaataaccgattatgtaaaaactgttaaaacccgttatgatgaattgaaagagatgagattgactattggggaattattttttcgaagactgacagaaaatgccttttttcgttgtaaagaacaagtatatccccgtcaggcttatgtcgaggagtttgattgtattatgaattgtcaaagaaaattttatcccgatatattgactgatgagacaatcagatgtattagagatgagattatatattaccaacgaccgttaaagtcgtgcaaatacttggtgtcgcgctgtgaatttgaaaagcgtttctatctgaatgcggccggtaaaaagaccgaagctggcactaagggatcaccacgcacttctccattgtttcaagtatgccgtttgtgggagagtatcaataatattgtagtcaaggaccgtcggaatgaaattgtttttatttcggcggagcaaagagccgctttgtttgattttttgaatactcacgagaaactcaaaggtagcgatctcttgaaactgttgggtttgtccaagacgtatggttaccggttgggtgagcagtttaagactggaatacaagggaacaaaacccgagtggaaatcgaacgagctttgggcaattagcctgataagaaaagattgttgcaatttaatcttcaagaggaatcttcgtcgatggttaatactgaaacgggtgagattattcccatgattagtctgtcgtttgagcaggaaccgctttatcggctgtggcatgtattgtattcgattgacgatcgggagcagttacagtcggtgttgcgacagaaattcggaattgatgatgacgaggttttagaacgactgagcgctatcgatttggtgaaagctggttttggaaataaatcgagcaaggctatacgtcgcatattgccatttttgcagttaggcatgaactatgcagaagcttgtgaggctgctgggtatacccatagcaataactatacaaaggctgaaaatgaggcgcacgctttgctggatagattaccggcgattaaaaagaacgagcttcggcaaccagtggttgagaagatcctcaatcaaatggttaatgtggtgaatgcgcttatggaaaaatatggacgattcgatgagatccgtgtggagttggctcgtgaattgaaacaaagtaaagaagaacgttctaatacatataaaagtataaataagaatcaaagggaaaatgagcaaattgctaaacgtatagttgaatatggtgtgccaactcgatctcgcatacagaaatataaaatgtgggaggaatcgaaacactgttgtatctattgcgggcaaccggtagatgtgggggattttttgcgaggatttgatgtcgaggtagaacatattattcctaaatcattgtatttcgacgatagttttgcaaataaagtttgttcttgtcgtagctgtaataaagagaaaaataatcgcactgcatatgattatatgaaatcaaaaggcgaaaaagtcctgtccgactatgtcgaacgagttaacacaatgtacacaaataaccaaattagcaagaccaagtggcaaaacttattaaccccagtcgataaaatttctatcgatttcatagatcgacaattacgagagagtcagtatatagcaaggaaagccaaagagattctgacatcggtttgttataatgtgacggctacgagtggttcggttaccagtttcttgcgacatgtttggggctgggataccgtattacacgatcttaattttgaccgatataagaaagtgggtttaaccgaggtaatagaggtaaaccataggggcagtgtcattaggagagagcaaataaaggattggagtaagagattcgatcatcgccaccatgccattgatgcacttacgattgcctgtaccaaacaggcgtatgttcagcgtctgaataatttgagagcagaagaaggaccggatttcaacaaaatgagtttggaacgttatatacagtcacaacctcatttctcagttgcacaagtccgtgaggctgttgatagaatattagtgtcgtttagagccggtaagcgtgcggtgactcccggcaagcgatatattcgtaagaaccgaaaacgtatttccgtccagtcagttttaattccacgaggtgcgttgagcgaagagagtgtatatggcgtaattcatgtgtgggagaaagatgagctaggtcatgttatacaaaagcagcgtgctgtaatgaagtatccgataacctcgattaatcgggaaatgttggataaggaaaaagttgtggacaagcgtattcatagaatcctttccggtaggcttgctcaatataatgataatcccaaagaggcgtttgctaaacctgtatatatagataaggagtgtcgtattccaattcgcacggttcgttgttttgcgaagccggcgattaatacgttagttccactcaaaaaagatgataagggaaatcctgttgcttgggtcaatccggggaacaatcatcatgttgctatttatagagatgaagatggcaagtataaggaacgaaccgttacattttgggaagcagtggatcgctgtcgggtaggtataccggctattgtcactcaaccagatactatttgggataatatacttcagcgaaacgatatatctgaaaacgttttagaatccttacctgatgtaaaatggcaatttgttctttcattgcagcaaaatgagatgtttattttaggaatgaatgaggaagattatcgttatgctatggatcaacaagactatgcattgttgaacaaatatctttatcgagtacaaaaattaagtaaaggtgattataattttaggtatcatacagaaacttctgtcgaagataagtacgatggaaagctcaatttggaattgtctaggcagatgggaaaactaaaaagggtgagtataaagtcgttattgggattaaatcctcataaggtgcatatctcagttttgggtgaaataaaggaaatatcatgatcaaacgcacattatattttgggaatccctcgtatctgagtttgcgcaatgcacagctagtactgcgtctgccagaagtgtcgaataacgacacattacccgatactttcaaaaaagaggcggagcggacgattcctatcgaagatataggagtggtcgtactcgatcattcgcagataacaatcacacaaggattgctcgaagcccttctcgaaaataattgcgctattatcacttgcgataaaagtcgtttgcctgtgggactcatactacccctttgtgggaacacgacacaaaacgaacggttccgagaccaacttaatgcttcgttacctttgaaaaagcaactttggcaacagacagtgcagcaaaagattgccaatcaagctgcaattttggagagccggggaattgtagccaaaaatatgcgggcatgggtgggcgaagtccgtagtggagacatcgataatatggaggcacgggctgccgcctattattggtcgagtatattccctcacctc

SEQ ID NO: 4133 - DNA, 13724 bp, synthetic construct
  source 1..13724: mol_type = other DNA
  misc_feature 1..13724: note = Synthetic
gtccatcaccctcaaagggttgtccattaactgcgacctgacctgcatagttgaggacagatggtactgcatgggcggataaaaccgctaccaaaaacataaccaatacctgcccgatgaacttcatgctctgcataattgtacgattaaactgaattgtcaatgcattggggttgggcaaactccagacatcgtggagaaagagatttgaaaaactccgaattaaaaatgaagaatttcagactaacttctaaggggtgttgtctttgcgggcaacgcctcttttttttacctcagtagtaaaatccctagcaatcggtaaccttctgagcgggagagacgggtgcggaggttcattcgtgattaataaatttaattatttaactaatctacttgatcgatcaacttacctcaagtaaggaatctaatacaccccaaaatgtactctacaaacaaagaagggcaacccgtaaggttgccctattataaatgctttcttaagccggtgtggtcacgaaacatgagccaggaaatcggcctgcattactaactttgtgttgattccaaaccaataactctaacaaaacttattcccatgcaaacaaaaactgaaaataaaattactatatccttggatatcggacatagctcaattggttggtcagttattgaccctaccaatttaaagattaagggttgtggtagtttactttttcaagcagatgattgtcttgcttcaaaacgtcgccttttccgttctggtcgcagaaatattgctgcaactcgaaatagaattggaagaattgcattacttttgaaacacattggtgcttttaaaggaaacgaagcagaattagtctgcaattcttcaccatggattgatgcttctcgtgttttacttgggattgaaactttggattggcctcgtttatggaatgttatcaggtggtacgctcacaatcgcggttatgatggcaataaagcatggagtaaaagcatgccggaggaagaagctgaggaagaggcaaaaagagtaaaagcagcaagtggtataatgcaggagtattcaacaagtacgatggcacaaacagtttgtgctatgctacatttagaccctgatggtgaaaaacgatccacgactggaaaaaaatataaaaccggagattatgcgttcgatagaacgattgttgaaaatgaagtcagaaacatccttcaatctcacattggtaaacttgaaggcctcgatgaaaaacttataattgccctactagatgatgccaaagttttaaactgccctgaatacaaattaccgttaagatttaaaggaggtcttctttttggaggatttgttcctcgctttgacaatcgtttaatttccatttgcccggttactggtgaaaagactccaagtaaaaaaaggagagaattttatgaatatcgctgggcaatgataattgcaggtatccgaatatttggtgagatgggcgaaagttcgattttgaaaattgaagaaagaaaggctctcgatttagagatccgaaaagtgggattttttacgaaagccacacttaaaaagttcatatctgataattttggccacattgataccaacattgatacttattttctgactcccgaaatggagaaagcattggtctttaatcctgccaagaaagcaatcaatacagcgtgtttaaatgaagcatttgaagcacttcctttaaaagtacaaaagtcgataaatagtcggctaaataagtcaaaaagaactgctccttgtgaatggctcgaacaatctgacaatacccaaaaggtaaaggaactaatggaagttgcctatgaaaaggtaatgaagaggaaaaaaggaaagaataaacctgcttttgaaaaatggctaaaacaggatttggatgtagagaaaaatattccatctgggcgagcaccttattccaaaagaattctatcgaaagcgaccaaagaagtgatggaaggaaaagatccaagagaaactcaaggttgcctagatactgtagctttattatcgaaagaaaaactttcaattcctgtagaaaaacaaacaaacaatcatttggttcgtcacagattaattatgactgaaaggttgtataaagaaattattcgggaatttgctggtggagatttgtcaacagttgattcggtggttgttgaaactgctagagatcttagagaattttcaggaaaatcgaataaagaaaaacaaaagatattaggcggaaaacttaaacagcaccgtgatgctgtaaaaacacttgaggattttagaactgaaacaggaaagtcatttagcatttcagctgggttaattagaaaaacacgaattgctttagatatggactttaaatgtccttttactggagacacatatggtctatatcaaatccttgatgaaagtattgatatggaacacattattcctcgttccttacgtccatcggactctttggatgggctagttctaacatttaaggaagttaataggtggaagcttaatagaaccgcgttacagttcattgttgatgaaggaggcaataaagttccggggctacctcaaaagtcaattatgcaagttaaaaaatttgaggcttttgtaaaaaaacttaaagaaactggttcttcaaatgacgatatcagaagaaagaaaaacagaaaaagattcttaacactcaaaaactttaatgagcgggaatcagattttactgcaggtgacctgactgttacatcccagatcaatcgacttgcaacattcagaattagaagcattcatcaagacgaagttaagcaacccaagtatattgccttaccaggctctgcaactggccttgcacgtaaaagttggaaattactgggatgcctagcacaagctaactccagagtgctaaacgaagacgattcgcttaaaacaaaatctgaaattcgaggaataactcacttgcaccacgctcttgacgcatctgttgccgctattactgcaacaattttaccaaacgatggtgacatttggcgcatgctaaacaaacgaagactaactgattcagaggcaaagcaactgggacagttggatgtcatttcaatttcagcaaaaaaagaaccacggcttaaagatttgccaaaggatttaaaagaaaatttggcacaatgtttatcagaaaaaagagttagatttcatattcctgcaagaataggttctttctctccagatgagaatgaatacggaattgtaaatgttgatcagaaaaatcaagttgctgatttgaaacgaggtggaaaattatacccagggattaaattgagtttacttactggtatagttccatcgggtgccagcaaactcaaagaaagaaatgcagttcttcaaaacaaaggaaactatggtctttggttaggtgacccaccagaagtaatacccaatctccggtcgtgggaaaaaataaaggaattaaaaactcgttcgagtgaatctaaaatagcaagacttggtgattttatagaagtagaaaaaggtacttataaaggtatatggagaattataagtataaagaataccgctgttggtttacgtttaacactgtcaccaatagactctattccatcaaatgattttgctcactttgggggaaaggtagctagtgtgtcagcacttttaaaaaataagctcagaattataccaagaagcctaatctaaataattaacatgtcataccatacggttgatataaactgttctaaagggaaattaacttctactaaaaagcagttaattctgaaaagagatgaggataaaaaaagtttacctatcgaagatatctcatctgtaattattaatggattcgatatcactatccataagcaattattggtggaaatgggtaatgcaggtaagccactaattatttgcgagaaatacaaacctgtttccattttactaccagtaagtcgttcaactgatacattacttacaaggaagcttgcaaccttgagccaaaagatgaaggccgctctatggagatctttaatcaatgcgaaatgcgaaaatcaaagtgcattgtgcgagcaccttttaccatattcagaaaaaacaaaactgcttgttactttttcaaaatccaaacggattaacaaggaagctacttgtgctaaatatcactggtcagtttttcgagaatatacaggcatttatgatttctccagagatagggggactggacaagttaacccatttcttgattatggatatgttgtattattgaatatagttttacagagattactagcagttgggctagacccacaatttggtttaggccatgcattaagagaaaggtctgcaccgcttgcgtatgatgtaattgaaccatttcgtcccatagtagattatcacttagcacattttattaacgagcatgaggaagtccccgatgacatagggttgtttaaggacaccttagcaaatgcactcgagcgaaaatatttttatagagaaagaaatctagatttagcatcactagtagaagctacctgtgcctccttgagaaaatctattatgacttctaacccaagagtattccaaccatggacggcaaaaagtttaaaatgggatggatgattgtagcatttgatcttcctgtttcttcaaaattacagaggcgagaagcaacgcaatttaggaaatatcttttaagtgatggctataaaatgattcaattcagtttttatgcacgcccaaccgtcacttattcaagaatgcaaacacaccttaggaggttaaagtttaatctgccacctgaaggatcagttaggtcgatatatgtcactcaggcacaatgggagagatcctacatcatacacgggagtccagccgaagagatagaatccgaacggatgcctagacagttggaaatttggtaatatttgaatgacagcaacttaggaaaacctagtttgcatagttaagatttggaatcaacgcaaagcgagcttggtattagataactaggatctgacagtttgcatagttaagatttggaatcaacgcaaagcaataaaataccttgtcgatcactatcaaaaagtttgcatagttaagatttggaatcaacgcaaagctataattatatccattatgtctgcaaatcaagtttgcatagttaagatttggaatcaacgcaaagcatagctatatgctccagcacctgaactaaagtttgcatagttaagatttggaatcaacgcaaagcttccttgtttagcgtgctatatataattgtagtttgcatagttaagatttggaatcaacgcaaagcgtgacatcgccgttatcctcaatgactcgagtttgcatagttaagatttggaatcaacgcaaagctttgtacatgtgccaaaaatattctgatatagtttgcatagttaagatttggaatcaacgcaaagcatctgacggagaccatatatttgacgaagtagtttgcatagttaagatttggaatcaacgcaaagcaataccgcttcgcctctagaagtttatcgagtttgcatagttaagatttggaatcaacgcaaagcatctaaggcgaagtgcaaaagctcattggtagtttgcataattaagatttggaatcaaccgaacctgactctcatatacacagagcattactgcaaaaaaattcacgggggctttaaaaataatattaaagtatgcaggtgcgggaaccaagcccccgccccccggtgtaacttggtgtaagattttttgcatttaatcagtatttcttttcttctaccttccgattggtagttttgcatcttttgaaaaagagtaggggagtggttctcttgcattcagctttaatactgagatttcgtttaattacatttacttacacgccatatttttcggaaaaacgaaagtcgaaaaagttgttccggagaccaatattctatccattgaactacgggagcacttcgcagtttgataaaaatgagtcttcaaggataagcaacttgaaagaaacaaaaaaattaatggaagagttgacaaaaatataatattgagattgagtctcattctcacatgagattgagtctcattctcaggcccaatgtggtaaccaaacaaacacgaacaaacccggacaaaatatataataatatgaaaatacataaacttcacttgcccctgagtgcaatctttgctctcgcttctgttgggcattcacaagacaacgcacccgaactgtcacctatcagtgtgctaggttccaaatctgatgcaccaaccttgtcatcaggtatgaaaacatccatgcctttaaataaggccccacaaagtctttcgatcatgaccaatgatcagtttaaggctcaaggcttaaacagtgtcggtgatattatcaattacaccccaggaattattaattcacaaggagagggtcatcgtgatgccgttgttattcgtggtgcccgtactacagcagatttctatgtcgatggtatcagagacgatgtacagtactatcgtcctctatacaatgttgaacaagttgaggttctcagaggatccaacgctcttctatcgggattcggtggaggatatggtctggtcaatcgagttgccaaaaagggtgttatcggtgaaacatttggacaagtccaaggaagtattgatactttcggtgaaataaatgtacaactggacaacaacttcttaatcggagacaactctgctttaagagtcaatatgtttacagaaaatctggaaaatcatagagatttttattacggtgattcacatggtgtaaatcctactttcagatatcaatttgatggaggttcgcttgatttatcatacgaatacttaaaccaagaacgatttatcgatcgcggtattcctaccagcagaactaccaaggaacctgttgagagactaaaagaatttgtattcggagatccgacagaaaactatacaacacatgaagctcatatttttcgtgctatgttagaaaatcaattgactgacaatattctcggtcgctttagattaactcacaacgatcatgataaactgtatcaaaatttttacgccaatggttgggatgaaactgctggaacagctgaacttaaaggttacctagataccacacaaaggaagacaactacactttctgccgaattagtaggcgaagttgaaatgggtggatttcttcacaacttgattgctggttttgaatatattactattgacaacaataatgatcgtatgaagtcagacttctactccattggaagtagtacaggttccgaaacaaaggatttcattatttcaaggatgatgataaacagaggttttggagacacaaataatgatggtgtaatcgatgtttataacaattatactagtacatttaaggacaaagctgaagcagatgtatcagttttatccatatatctacaagacgaaattgcaattatggacaatcttgatttgattttaggtgctcgttacaatgaattcgattttgaagttgatagttacgatagtagttacaatgtaactccacttagtgataacgatagtgaaatttctcctcgtttagggcttattttcgaagccacagaaaatttaacattatacggtatgtatagtgaatcaatgacaactcgaaatgatgaacaatatgcaaacctcaagagtgatgatgacaaaactgatccgaacacttttgagaacttggaagcaggggttaagcttgacttggcgaatggcatgaatctatctgcttcttattttcaacttactgctgtaaagcctgattatataaacgctacatcaacagttgttagagagtcggaaacaagtggagttgaggttcaactttccggttcgttatccgaaaattggtacacatcaatcgcttatactaatttggatgcagagactaatgatgatggaaccatagttttatcgcaagaagcacctgaaaatgttttctctatttggaataattacatggtttctgaccgttttagtgtcaatcttggcattatctatcaggacgaaagcatcatcgacattgacgactatggaggaagtaaggatggagctaaacttcctgactatacacgagttgatttgggtgcagcatatgcgttaacagacaatactcgggtccaactaaatgctgagaatgtattcgacgaagtttactttccaacagctcatgatactgaccaagcaaccgttggtgctcccgtgaacgcaatgttaactattaccagcagtttctaattttgtttgtttcaagttcataaccttgaataatctagtgcttttgtttttgggcaggaaacaaaagccaaaaaacctcgctccgttggcttaaacggggcgagggcactttctcaacgcgataaagttgataatatgcacttggtctccgtcccattggggcggagacctttttgttttaagatccttgaagtttaatataacaagattgtaaatttatttccacaagattgacagcatctgaatgttaatacataatataaggaaattgctcggtagctcagtggcagagcaggtgactgttaatcacttggtcgctggttcgaatccagcccgagcagccattctgttgattcttctaatctgaatcggtatccaattctggccatcgaacaagtttcctatggagggttcttctactaacacccataagttcagccgctttagtcctatttcctcctgcttgtaacaacgcattccgcaaaagtcttttttcattttcttcaacagaaagagacatggatggtaccgaattgctagatggattgtcaattgcctgatcgaaaaaacggggatcgagatcatacggtgtaatttctccaccacgatttaataccactaaattttcgcagaaatttctaagctctcgaatatttccaggccattggtatgcgtttaaaataactagagtttcagaatttaaagttggggagggaaaattattttctatcgaaaattggcttagaaaatgttccaaaagaagagcaatgtcagatcccctttctcgtagagcaggaagttctatggttaccacatttaatctataataaaggtcttctctaaattctccttttttagtcatttttaaaagatccttatttgtagcacagaccaatctagtatcaatttcaagggttttcagactacccaaacgctcgatggacttcgtttcaaggaaacgaagcaattttacctgagttgcagaatcaatctctccaatttcatcgaggaataaagtgccattattggcagattcaaaacgaccgattcttctctcattggcacctgtaaaagctcctttttcgtgaccgaataattcgctttcaagcaagtttgcgggtaaagctgcacaatgaactggtacaaaaggtccacgagatcggtcactattctgatgaatggactgagctacaagttcctttcccgtaccagtttcaccacttaatagaacagttgcctttgagggcccaaccaactttactttttctagaacctgttcgagtgcgggcgattttccaagaatgcctttgaaattaaattttttatctaatcggttatgcaactcatggttttctttttgtaatttcttagattccaatcctcttcggatcagtatttctaatttttccagatttacgggtttggacaaaaaatcaaaagctcctcttttcatggcttcaactgccacatcaacctcaccgtatgcagtcatcataatgcatattggttctgaaggtaaagatattacatgatcaataacggtcataccactttgttgccccattctcaaatcggttaaaattacttcgagagattccgattccattacattgaaagcctcatcagggttcgaagctagaaaaacctcaaatttatcctcaagagctaactcgaggccttctcgggtatgttgttcatcgtcaacaatgagtaagttcggcttcatgattaatttttggttttggcttgctgtgatcctaataattttcttcgagatgaatttctagggaaacgcagcgttactatggtcccagaacccaccttactgtcaattcccacatcccctccatggtctctcattattcgatgaactatcatcatccctataccatgaccacttttttttgtagtgtaatatggttcaaatactttcggtaagtcttctttactgataccagtcccatgatccattattttgacatatacaaaattttcttcaagacccgtaattattcggatttgtgattctttatttatagcttctatagcatttcctaatacattaaaaaaaacctgttttaattgatcattatctcctttaattacgggttctcgaacacctgcctccattgatacttttattttataagcacttaaatcatctttttttagccgtactgtttcttccaaaatattgagtagatttatatttttaaaattaggttcctgaggccggattgcttttaaaaaatgtgctattattccatccaatctctcaacctcacttatgcatgttgttaatgatttttgagatttcttattagacatattttgaaattctaaattgcgttttaatacctgcaagtgaatgtgaatagaattcagcgggtttcctagttcgtgagcaactcctgctgctaaatccatgatgcttgagaccttttcgctttctattctttcatctagacttaccttttcttcggtaatatcagtcattataatcgcaaggccaattttttcatactctggatttttctcgaatgcttcctcaattggaacagcataaactcttatataacgtaaatccgggtatgagatttccatttcacgaacgataacttctcccttaatctcttcctttccctgacccaatccaatcgctctagcaatttctggtgcagcccgcatgagagaaacctgtcctgattggctatcttttagaccgattaactgcttaccctgtatattggcataactaatatcacctttatcatccagaactaaaattccatcgcgaataacatcaaaaacggtttccaataattttctctcccttgccaatctttgcacaagaataccgaggttaacctcatctaagtcatctagcctacctagaactttttcaagagggctttttactgccttcattctaaaattacttcgaacatccgatttgccaatttttctttgtttaaaaatcctaacttaattgtttttccatgagatgaaaacaaagttatttcattgaaatcagaattgaatccaatcatcttttttgaaatttcattaagagcgatccaatccaggtttttcttttttaattttttcttagcgttttcttctccgttttctgtttcagcagcaaacccaaccaaagtttgaaatttttcttttttacttcctaattctgccagaatatcttcattcgctatcatttcaatactttgtggaaactcggtttttttcgttttgtgctttgaacgaaccaccgggcgatgatcactaactgcagcacacattaagattaaatcagcttgttcaaacttttccaacatcgcatgcctcatttcctcggcagtttcaacctgagttatgaataggccatcgatcgcttttaaattcaccggcccactaacaagatttacttcatagcctcttcgcatggcttcttttgccaaagcataacccatcttgccggaagaagggtttgatataaaacgaacaggatcaatccactctctagttggtcctgcagaaaccaaacaatttaattttttaaccataacatataatgtgagcgactttatgcagatttatgtattagatactactatcgatgaataaggatttaatgaatcataataaacctaaaaaagaaagcctgtggttgaacctgggctttaatttactcgttcctattttattcctcagaaagggagacgattggtttggtcccactttggaagaaattctggaatctcccaaggatggaacattaatcggctctgtaatgctcgttcttgccatctcattcccgattggatacggcctttgggactttgcacgacgtaagaaatggaatttcctctctatcctaggtgcgttaagtgcttttctaaccggaggtatcggacttctacctggtgccacagtttttatgtttgcgatcaaggaggcagcccttccagcaattttaggactcctaacaattctaaccttaaaaactaaaaagcctcttgttaagctctttttatacaatcccgatgtgattcgagtggatttggtggatcaggctctagaggctcgcggcaccacatccgaatttaatcaattattaaaaaaatgcacttggttaatagctcttacatttattcttagtgccagcttgaattattttttatctagagcaattgtgataactgaaccctcgattgacaagctcgcgttcaacgacgaagtagggacgatgatgggatggagttttccgataatcagtctaccatgtatggttgttagtgcttatgctttttggattctaattaagggtattcgcactttagccggaatgaactttgaagacgccctcaatcaacctcaggcaaacaaaaaataaccgaccagtctaccttttttctacagataaatatggacgcaaagtggatccttgataaatctgacggggtcgatggatttttttaccagtttcggcaatttccttccagtgggcaagccaaccgggtgttcgacctatggcaaataaaaccgtaaacatatccgtggggaatccaagtgcttgtaaaataatgccgctataaaaatcaacattgggatataactttctttccacaaaataggggtctttcaaagcctcctcctccaacctacgagcaatttcaagtatcggactggaaactcccagtgcttccaaggcattatcgcatgccgcttttaagattttagcccgtggatcataatttctgtagacgcggtgaccaaatcccatcaggcgagtcttacccaacttagctgattcgataaaacgggatccatcatctcccgcatcgtgaatctgattaagcataccaatcacagccatattggctcctccatgaaggggtccccaaagagcagaaacaccccccgctaatgaggcaaatggattggcacctccggaagcaatcattcgacaggtggaagtcgaacaattttgttcatgatcagcgtgcaatagaaagattaaatccaaagcattgaccacagaatccggcatttcctcagagacagaattcttagcaaacatcattgaaagaaaattcttacagtacctttcttccgaatcaaagtccggtacttcttcgttaagaagaaaacggtgcctagttgctgcaatagtcctcatagtagagataataagagcagcagaatcatcaaatctttccagatctgcttttctattattggtacaaaaatcaggataagctccaccaagtgcgtgtaatccagcagctaacacccccatcgggtgggaattctttggttgagcattgattgccgaaatcacctcattgggtagctttgcgtactttgagattcgctcctggaacaaatcaatttcact

SEQ ID NO: 4134 - DNA, 23339 bp, synthetic construct
  misc_feature 1..23339: note = Synthetic
  source 1..23339: mol_type = other DNA
aggaacttggggctcagcttgtaggtgaatctacctatcgggtcattgctgaagaccttccgcctgacacttggcgtgaagttaaagcacttggcattcccggcgtggaacccgatcaacgaacccggcgcgtctaccctgcagatacccttgccggtaacgtccttggcttcacgaccgagggggaagggcgtaccctcatcggtgctgcaggcttggagatgacacaaaatgacatcctcaccggtaaagacggtaagggaagcgtcgaagtgggccgttcaggcgccattatccccactggtaaacaagaagatgagaaagccattagtggtgagactgtcaaaaccactcttcatcctgatttgcaggctgtagctcagcaagccattgacgctcaggtgaaaaagatgagtgccgactggggtagcgtggtggtgatggatcccgctaccggcaaactattggtgatggcggattcgaactctgttaatccttcagatcccggtgcaacccctgaggctgaccgccgctgccggattgtggaagcaattttcgaaccgggttcggtgggtaaggttgttacttttgctactgcccttcacgaaggaactattactcctgagcagaagtggactattcctgacacctggacagcgcctaatggccaggtgtttgaggattcccattcccatcccgttgaaattcttaccaccgcggaggttcttgccgagagttccaacgtcggtactgtccaaattggtgacaccgtctctgaccaagcgcgttacgacatgatgcacgccatggggtggggtgaaaagacgggtattcaaatgccagccgaatcagcaggcattctccttggccctgatgcatgggatgggcgtcagcgttacaccaccatgtttggccaaggtgttgccacgacagcgcttcagagtgttgccgttttggcaaccgtcgctaataagggtgtgcgcgtgcccccacgcgtgatcgaatctcggatcgatcatgacggcgtggagcatcctgagccccagcccgaaggtattcgtgttctcgatgaacaacatgccgcgttgctgaccgacatgctcattaaggttaccgaaaagggcggtactgcagaagaagctgcccttgatggttacctggtagctggtaagactggtactacggaaattcttaccggtgaaggtggaacggttgcctcgtttgttgggtttatgcctgctaaagaccctgtcatcgctattgccgtgaccgtctatcatccccgagcagcgatttatggtggtgaggtagcaggtcccgtcttccgtgaagttgctcttgccgctatgcatgcactcggtgtggctcctgatcctacggtgatcgctcaggtgcaatctgagaagaaagaggatgaatcgtgatggtcaccgttcggttacagctctccgacgcggggtcacacttaggtcacatccgttcagccgcgatagattgagacattatgagtaactctgcctacgcttcagctgcccacctgcgcccaggttccctgcgtccgctgacattgggacaactcgcgcaggtcgacgccgtgcactggcatgagagcacatcggaggcttcggctagccatactctcgtcacgggcgtgagcgtggactcttctgacattgcctccggagaacttttcgtggcactgcctggtgcacgtgtccatggcgcgcagtttgcatcgcaagttgcaaaagccggcgcttgcgccatccttactgatgagcgcggggccatgatggtccgggaagcagggctctctcttcctctccttgtctgtgacgatcctcgcgcactggtgggtaccatctctgcgattgtttatgactttccttcgaggagcctcatcaccactgcggtgaccggaacgaacggtaaaaccactacggcttacttccttgaagcgatgcttagcgcacatgttggtgcttgtatggtggctggaactgttgaactgcgcgtcgcagatgagtccgttccctcgccacgtaccactgtggaagcacccgtacttcagcgtcttctggcattgtctcgtgagaagaacgtgggtgcagcaagtcttgaggcttcgtctcacgctatttgtttggggcgcttgactggcactcatattgacgttgctggcttcaccaatcttcaacgcgatcatctcgatttccatcacactatggaggaatatcttcaggctaagagccagttgtttactcctgagttcactaggcgaggtgtggtgtgtgtagatgatcagtggggtgctcaacttgctcttgatattcgttcacgcggtgagattgatgtgatcactttgcgcgcttacgagcctgaagagtcttgccaggagcaggagttggctcgtaatgaatctatggcgatggctcaggccatgactgattctgccattccacctgccggtgctttcgctggagtgagcatggcatcagcggttgctgccgtacagaatggtgttcctgagactcaagcgccgttgagtgcagatcctgcagggggagcggctcctttccccgcagattggtacgtcactgatgcacgtgtttctttggatacctctgccactactttcactcttcatggccctgatggcgtacttattgaggcttcgtgccctctgcccggtttggtgaatgttcagaatgccgcactggccctggtgatggctattgctgtgggtgtggagcctaaggttgctgcccacgcgttggctaatgctcataacattcccggacgtatgcagcgtattacccagcgcgatggcattcgtggcttgactatcgtggattttgctcacacacctgacgcacttgatttggctctcaaggctgtgcgtcctattaccccgggtaaactcatcgtggttttcggctctgatggtgaccgcgatcagggcaagcgtcccatgcttgggcaggtggctgcagaactggctgatgttcttgtggtgactgatgagaatcctcgtagtgaagatcccgcgacgattcgtcaagcaatccttgaggggattcgcagtgttcgccccgatatgcatgatgttgaggaaatcaccacatggcgtggtgatgcagtgcgtcgcggcgtggaactgtgcggtcctgacgatacggtgattgtcaccggtaagggccacgagcctttcctcgaaattgctgatgaatttatcgcctacaacgacgcacccgttatggctgaggccaccaccaagaaatggggaaatgcatgagcgtcttaatgaccgcagcccagattgcccaagccgtcaacggtgaacttcacggcatggaggctgacactcttattgaaggccccgtggtcatcgactcacgccaggccatcgaaggaagcgtttttgttgctatcgttggcgaaaaggttgacgggcatgattacgcaactgccaccgctggtgaagtgggaaccgttcttgttattgctcagcgccccgtggatgcccctcatatcctcgttgatgattgtgttcttgctcttggtcgcttagcaacagttcacttggagtctcttcgcgccaacggagagattactgtcttggggatgactggctccgtggggaaaaccactaccaaggatctcactcggcagttagctgaagtactcggcaacacggtggcaccccgcctcagtttcaacaatgaaattggcttgcctctgacagttttggaagcggatgcttctactcgttaccttgtgctcgaaatgggagcttccggccccggccacatcgacgaacttacggctattgcaccgcttgatattgcctgtgtgctgatggtgggtcacgctcacatgggtggcttcggctctattgaagcggtggcgcgcgcaaaagcagaaattattgatggtctgtatcccgaagggcttgccatccttaatgccgacgacgagcgctcagttgccatggcagaccgtgcgcctgccagcgtggtgactttttccgcatcgggaaaccctgaggcgaccgtccgagccattaacgttgctttgaatgaacgaggctgcgctactttcacgctctcttgtgaagaggggcaataccccgttgaattgaagttccctggcattcataacgtctctaacgctttagcggctatgaccatggcgatgaatctggggatgagtgctgaacaagccgcccaagtcatgagtgaagcgaccattctcagccctcaccgtatggacgttcgtgaactagcatgcggagcactcatagtggatgactcctacaacgccaaccttgattcgatgacggcttctctcgcttgcttgccaaccttggctggcactcggcacaaggttgtcattgcttcagccatgcttgagttgggggagagcagtgatgacgtgcacgaaagatgcggtaagaaagctgctgaagttggcactgatttgctcatcacgattgggaacctggccacaccgatgagccgcgccgcgcgtgaagcaggcgtggaggtgcttcattatgagaatgtagagcagctccttgaacagctcgactccctcgtagaggctggcgactgtgttctcatcaagggctcccacggatcgggcgcctggcgcgtggccgatcgcctgctgcaggagagcgttgcatgattgccattttgatttctggtgcggtggcgatgctcgctaccctcctgggtacaccgttcttcatcaagtacttggtgaagaaacaatacggtcagttcatccgtcaagacggccccacgggacacttcacgaaacgtggcactcccactatgggtggtgtgatcatcgtggcatcgactgtccttggttacggagttgccaacctcgcactgatgcgtgttccacgagccagtggcttattactgattttcctcatcgtgggactggggcttattggtttccttgatgactttgaaaaaatttctaaacaacgatcgttgggattaaaagcctggcaaaaaatcgttggacaagcgtttatcggtatcaccttctcgatttttgctttgtattttgctgatcgcaatgggctgactcccgcatccacgcgtatttctttcactcgagataccgcctgggatttagccttcgcaggggcagccgtgggctttgttctctttattttgtgggccaacttccttatcaccgcttggtcaaatgccgtgaacctcaccgacggtttagatggtttggccgctggtgcctccactatggtctttgccgcctataccctcattggtgtatggcagactaaccagacgtgcgtgtatgcccacccctatgatttgctcaccacctgctatcaggtccgcgatccacgcgaccttacgatggtggctgcagcacttatgggcgcatgttttggtttcctgtggtggaacgcttctcccgcgcaaatctttatgggggatacgggctccctcgccttaggtggcgccctagctggcctgagtatcctcacccgtacagaattccttgccgtgatcattggcggtcttttcctggctgaagtcatgagtgatgtcatccagattgcctcgttcaaaactaccggcaaacgtgtcttcaagatggcaccattgcaccatcactttgagctcaagggatggcctgaagtgaacgtggtgattcgtttttggatcgttgccggcttgtgcgtggcactaggacttggaatcttttacgcggagtggttagcacagtgagtacctcggtggaattggaccaactctggtcaggcaaagccctgggcgtggtgggtctaggaaccaccggccaggcagttgttcgtgtcgcattggactgtggagcagaagtcaccgcatgtgacggacgcagcgtcccgctccctagtggtgtgactcgcaccatcatcaacgaggatcctcaggctcttgccgatgaactcagccaagcacttagtgaacgcgaatatgaatgcgtgatgatcagtcctggcatcccgcccacccaccctgcctatggtgtatgtgaacgtcacggcgtggacgtggttagtgaagtcgaactggcctggcgtctgcaacgggacatggaccgtgatattccgtggcttactatcaccggtacagacggcaaaacgaccaccgtctcgatgctctctcatatcttgactactgcagggtttaacgcccctgccgtaggtaacgtgggaaccccgatcatcgaaattgttgcctccggccaagcagatgtccttcctgtggaactctcctcctttcagctccacactactttgagcgtggaacctactgcctcgacttgtctgaacgtggcccccgaccacctcaactggcatggcaccatggaggcttatacggcagacaaagccaaggtatatgcgaacacccgtattgcggctatctacaccgtgggacaggatgaaaccctcacgatggttgaagatgctgacgtcattgatggttgccgcgccattggcgttactgtgggtacaccaagcgtggggcaaattggactggtcgatgaccttgttatcgatcgagcttttcacgctgaacgtcacgcctcaggtatcgaactttttactctgcatgacctatctcatttggcgccagccggtgatgtgtcacgtttgcccgtccatctggttactgatgccttagcggccaccgcgttggctcgctctgtggatgtttgtcctgaggtgattgcccaggcaatgtccactttccatccaggcgctcaccgtagcgtcgttgtggccaaccatgctgatgtgacctggattgacgattccaaagcgactaatccccacgctgcgatggccgcattacgtagtgttactccgggaactgccgtatggattgccgggggagacactaagggggctgatttcactgaattggttgctacagtcgcccctgcactgcgtgccgccattcttattggtaaagatcattcgcaactcaatgctttactggttcctatgggtattcccgtagtaagcctgcccgatcaattacccgaagaactcatgactacggtggtccgcgaagcagtgcttctggctcagcgtggcgacactgttcttcttgccccagcatgcgcgtcatgggaccagttcgataactacggccaacgcggagatcttttcgctgatgctgtgcgcgccatgataaccagtcaggcaacgcgatgaagtggttccctcacaacgccccctcagaacagtcagatgagccgtcaccgaaaaaaacttcggtggcgactcaccattctgcgtcctcaggaatcacttcccgtgatggaggaaaccggggccttaaaggattgctttttcgtctcacaggtccggacggccctgtcgacggcgagatgactactttgtcctattacgtgctgctcttgtccacgatggctctgctcgtcatcggtttggttatggtgttttccgcccgcgtggtcagccttgtgtccgaagacatcaatccctttactagtttcattcgttatctgatctttgccgtagctggcgtagcaggcatgtggggcatttcccgcatgagcatcagttggattaaacgtatcgcccctatcggtttgattattgccattgtcttgcaaggacttgtgtttgttccccacgttggtatctgtgtgtacggtaactgtaactggattgcggtgcccggtattggtacagctcagcctagtgaattggtcaaacttggtgtagccctgtgtctcggcctgattgctacgtggatcgctgagatgaaacccaactggaaacgtagcgcactcgttatttttattgttgttggtattccggtggtatctgtgcttgccggtggtgacttgggcactgtgattgtcatggtgctcctggtcgcagcaggcgcatggatgggagggctaggaaaagcctggtttatttccggtgcagtagttggatcatttggtgtgggtgtcctgactatgcttagtgctaaccgccgtgcacgtatcaacgcctggctccaccccgaactggccgatcctactggcgtgggctatcaacctaaacatggcatgtgggcattagccactggcggactgactggtgtgggcccaggatcgtctcgccaaaagtggggctaccttactcaggcggactcggattacatctacgctgtgctcggtgaagagtttggacttgtggggacgctccttgttcttgtgctctttattgccattggcgctagtgccatgcgtattattcgccgttctaatgacctgtatgtgtctgtggtgggggcatccatcacagcgtggattattggccaggcactgatcaatatcatggttgttgttggcttgcttcccgtgcttggtgtgccactgcctttggttagtgctggtggtagcgctctcgtttctgtccttttggctattggtgtgctacttgctttcgcacgtcatgagcctggagcgcaacaggcattagaatcacgttctagttccatggcaaaaacactcgccgttactgcgtcaaggagaaaaaatcgtgcctgattcatcatcaccgctgcgtgtactactcgctggtggaggcacagccggacacgttaatcctctcctggccacagcacacgccctggtgaatgagcacggtgccaccgttcgcatcctgggaacccgtgagggccttgaagcacgtctagttcctcaagccggatacgagatgagcgtggtggaccgtgttcctctccctcgtaagcccagtgcagatctgcttaaacttcctgctcgtctcaagggagcaatcaatcaggcgaaagtagccatccgcgccgttaatgctgatgttgtggtgggctttggtggctacgtctccaccccagcctacctggcagccaagagcctgggcattcccgtggtgatccacgaacagaacgctcgcccaggcctagccaacaaggttggtgcgcgcacggctaaggctgttgccctgactttcgaatccaccccacttactgctcgccgcggtgaaactagtgtggtgggcatgccgctgcgcaaagcaattgaagacctcgctgctgacttgcgtgaccctgctaagcgcggtgcccgccgagctcatgcagcacagcagttgggcatggacccgtcaatgcctaccgtactcatcacgggtggatcactgggggctcagcacattaacgaagcggtctgcggcgtgatcgaggcaggtcttcccggaggcatccaggtgcttcaccttaccggctgtggcaaggatcagccggtgcgagatgctgttgagaaggcaggagtaggggagcgctataaggtacttgactacctcaacgacatggaccaggcgcttagcctggcgaccgccgtggtctgccgttcaggtgctggcaccgttgctgaactgactgctgtgggcctgccggccatgtacgtgccgcttcccatcggcaacggtgagcaaaagcgcaactgtgcggacgtggtggctgctggcggtggcattatggttcctgacgcacagtgcactccggagacgctcggtgagttcatggccggtgtgtgtgatgaccagcgtatgctcaccatgtcccgtaatgccgctcagtctggtgtggttgatggcgcctctcgcctggcaagcattgttgccgctcaggggttgtgatcgcttttcttttatgattctctcagtcttttcggcatgcttattttgaggagagtggaaaagaggtggcttgaccactcttgtgtctttccttatactgaaggtaactaattctcaataagggtcgactcgttagcggcctgacttctccccgggttctgttttacaggcccgggtttttatttctcatttttcgtatttttgtcagtgaagagaattatcatgtgattattcgtatgttcgtgacgagcgctgaggataatcatgctgaaagacccaaagaattacgtcatcggtatcgatgttggtagcaattctgttggtttatgttctgtggaaatcaacaaggatcaggtgcctttagggatactgagtgctacgtcaattattcacgactcgggtgtgagtaaagagcatcgtaagagcgctgataccttgttgaaaattggcggaatcgctcgtcgtactcgtcgacgttttcgagaagaacgtcgccgtttgaaggcattggatcaatggttgatcaatcatgcttacccgttgccttcttcggcggactataagaatcctgctcaaccatggttcttccgagaggaattactttctgagtacattcctgatgagcatcgccgaaaagagatgatcgctgtagttcttcggcacatggctcgccaccgtggctggcgtaacccgtatacaaaagtagaatctctgtttgagagtcagcctgacagtgagtttctcgtagactttcggcgccgtgtgagtgaatacctgaatgaagaagttggtgacgatttatcactcactcgcgtggtgatgttgttggctacgcgcacatcaaactccggtgaagaagtgtttgatgtaggtattcgtcttcgtggcaatgcgtcgaaaaacagcaatgttgatgtggtgccactcggaaaaaccgctcagtcagatcatgctgctgaacttcgtgaaattgcacaggtccaacatatcgatgaagcagagtggaaagactggattcgtctggtttttcgttctcagtctcctaaaggttcttcggtctcacgcgtggggcatgattcgttacccggacaggagcgtttacgacgtgcctctcgtgcatcactgatctttcaggaatatcgcattgcttcagcgctagggaacttgtatgtgcgagagggcggcattaaacgcccgttgacacttgacgagtatgcttcagcatttgaatttcttaacgatggattcgttacacaaaaactggaatcagtatcgtggagcgatgttgccgaggttatcggagttccccggaatcgtttaggcggtttagccgatctcgatgttgataatgaatcatttgcgaggcgccctccaacgaacgttactcatcaggcgatgatgaaaagcaaaattaaggcgttacgtgaatggtggaaatcggcgtctcgtgaactgagaggggagatgatttcttatctcgttgataacgagatgagtgatgccattattgaatggtatggaacgcttaacgatagtgaccaacttgcacttgatgaattggttctccaagtgggtcgtgccgcatactcagaagactcgttaaagcgtcttactgcgtgcatgcttagtgagggatgttcattaactgatgcattgacaacagagtttggtgtttctcctggttggcggccgcctgcagcgcccgtgaaagaacctgtgggtaaccctgcagtagatcgcgtattgaccatcgtcaacgattatgttcgtgaagcaacgaagcgttggggagcacctcaacgaattaatattgaacatgttcgaagtgcgttcatgtctgaagcctcatcccgctcattgacgagggagatggatacacgcgctcagcgtcgccttcagatggctaatgaaatcgcgcaacgtatgggcattcgttctaagttacgcgggtcggatgttcggcgtttttctgcgttacaacggcaaaatggccagtgcgcatactgcggtgacgtgattacgttcaacactgcggagatggatcatattattcctcgtaaagacagtacatccgattcgactgtaagtaatcttgtcgcagtgtgtggccggtgtaatcggtcaaagacgaatattccgttcgctgtatgggctgagaactgtggtatcgcaggagtaagcgtggatgaagctgtcgctcgtgtgaagttttgggtgaaagacccgaagatgttcccggggaagcagttctcgcggcttcaaagtgatgtgatccgccgttttaagcaacgtgttgatgatcctccttttgatacgcgaagtatggaatctgttgcgtggatggcacgtgagttacgcttccgcctggactatgcctaccctgacactaaggtaagggttttccgcggatctattacggctgaagcgcgtaaggcttcagggtttgagaaccgaattacgatgatcggaggcaagggcaaacaacgcttggatcgccgccatcacgctgttgatgcgcttgtgattgccatgatgcgccctaaagttgcggaggtcttggctttgcgttctcagatgaagagagcacaacaggatgcgaccgtacgtgacgatgaggggaggcaactggttgacacgtggaagtctttcaccggcaaggagtttgccgataggcaaatctttgatcaatgggtaaagaacatgggaacacttgctgaaattacccaacgggcgttggataacgatcagattagtgtgcaacgtcaactccgcatacgtcttggaggtgggcgcgcacatgatgacacgattcatgaacttgagaaacatcagttatttgaggaaattcctgaatcgttgattgatagggcagctaccccagcattgtggtgcgctctcactagacacccagattatgttgctggaaagggattacctgaaaaccaatcccgcacaataaatcttcaaggtactcgtgttcattctcatgatgaggttgagtttttcgcgtcgggcgctccacagattaaggttcgaggtggaagcgcggaaattggtggcactattcaccatgcgcgtatttatcgttatccggcagcgcgtggtaacaagatgaaaattgggatggtccgtgtgtttgcgtgtgatcttctcaaacaccacaatgaggatcttttttcagttcctttagcgccgcagtcgatttctgtccgatcgtgtgaacctgctttgcgtagtgctttggaacatgggattgctgaatttatgacagaacttgttgtgggtgatgaactgctgattcctcatgttgatgagatcggtgttcttagcgagttttctgcgatctatccaggaactactcattgggttgttgatggtttccctgaggcgacgcgtcttcgtttgcgtcctgccatgatggcaggtgagggacttgctagcgatgcgtctaagagtgaaaaaaagattcttcaggagaagggatggatagtgacgttatctactttgttttcgaacaagattcgagtcgttcgtcgtaatgctctcggatatccggttggcttgtcaccttataggcttgggactattgaagtgaggccttaatgcgtgatcgcggctggagaataattgactgttctcaccttgagggagagatccactctgttcgtggggcaatacgtattacgaatcaacacgggacaacagatgttgccgtggaagatattgctgttctgcttgttggaccgtcagttagtttttcttcagccgcgattcatcgtttgacttcggctcaggtgtctgtgttgttttgcgattggcgtggggttcctgaatcggcttgttgggcttggagttatcattcgcgtgtgggagcgcgtgctaatgcgcaggcagcgttagcaatgccgaaaagaaaacaggcatggaaatcaattgttcgggcaaagattcatggacaggctaattgtttagaaggtttgtctgaacccgggtatcgaacgattcggcacctggccagcactgttcgttctggcgattcgtcgaatgtggaagcacaggccgcgcgtctgtattggcagtcattgttcggggatgattttcgccgcgatcctgacataccaggtgtcaatgcggcattgaattatgggtacatgattcttcgtggctttgctatccgtgcggtaattgcggctgggttagttcctgcgcttggagtatttcatcatgggcgctctaatccttttaatcttgctgatgatctaattgaaccttttcgtccaactattgattgggttgtagcacagtacggagatgatgtatcggtagatgatcctgatgtaaagcgcagtcttgttgctgctgcggatgcaccttttttggcagagggaactcgtgtttctacggcgatggaattccttgcgcaggcttatggccgttatgtcgaaaacgaggtggtttctttagaggtaccgattttccgttcagggaagtaaagattaatggctgatgatccgatgtggtgcctcgtgatgtttgatcttcctacggaaacgaaagcgcagcgacgcgacgcaaatcatttcagaaatgctttattggatttgggtttctttagggtccaactttcagtgtatgtgcgatacaacccgtctccttctggtgatcatgcgagagtgaaagcggtcgtaagaaatctgcctgcacagggccaggtaaccattgtttatctttctgatacccagtggagtaaggcttttcgtttttgtaatgcgcaggagcaagatgctccagagactcctggtcaactaatgtttttttgacgttgaacttccagttttggttggaaaatcaatgaaaatctccccctctgaagtctatcaaagggggagataactaattctcaaccgatattcgcgctgcctacggcgatttagaagtctatcaaagggggagataactaattctcaacctgactcggcggggtacttttgataaaagaagtctatcaaagggggagataactaattctcaacccgatcacgatcttgtcaatgcttgaaggaagtctatcaaagggggagataactaattctcaacactcatccatccggccgtgttggttccggaagtctatcaaagggggagataactaattctcaactgttcagaggctttgcgtcagggaacaggaagtctatcaaagggggagataactaattctcaacacatagcagaatactcacttgagccaaagaagtctatcaaagggggagataactaattctcaacacccatcggatcgaagatgttgacttgagaagtctatcaaagggggagataactaattctcaacttaggccatgagattccaagtagcgcacgaagtctatcaaagggggagataactaattctcaacacgacgtcgatcaatcaacaggtcacgagaagtctatcaaagggggagataactaattctcaacaggtagacacctgaacgatattgctgccgaagtctatcaaagggggagataactaattctcaacaccatgagggcctgaccgtttccatgctgaagtctatcaaagggggagataactaattctcaaccaagtgccaaaccgtttggcgtggtgtagaagtctatcaaagggggagataactaattctcaacagtagaagtctctatacggcgcgatttcgaagtctatcaaagggggagataactaattctcaacgataagcgtcacggaaatcaaggtctctgaagtctatcaaagggggagataactaattctcaaccgtcctcggcggcgttttcttcctcgtagaagtctatcaaagggggagataactaattctcaactctgacgtgacgtaaacgttcaccaccggaagtctatcaaagggggagataactaattctcaacaattcctgcagtcatgtatgccaaaggcgaagtctatcaaagggggagataactaattctcaacccgctggatgggctctggttcgcactgggaagtctatcaaagggggagataactaattctcaaccacttaagggattattccttatgcttctgaagtctatcaaagggggagataactaattctcaacacgaagaagaactcagggcgtataggcggaagtctatcaaagggggagataactaattctcaacaagattcaactgccctctgagggagatagaagtctatcaaagggggagataactaattctcaaccgcgcgtgaacctctctccaatggttcggaagtctatcaaagggggagataactaattctcaacccagcactcacacgccgccacctcttgcgaagtctatcaaagggggagataactaattctcaacggacatgtggtcccagatgcttaaggcggaagtctatcaaagggggagataactaattctcaactttcaagtcgaatgatgaagcgcagggcgaagtctatcaaagggggagataactaattctcaacgtttgatgcgtcgtgtttatttgaatacgaagtctatcaaagggggagataactaattctcaacgtgatgaatcgtgatcgtgtttgtgaaagaagtctatcaaagggggagataactaattctcaaccgtagtccggcttaatgtcaccaagcacgaagtctatcaaagggggagataactaattctcaacatactcagttactttgtaagtccagtccgaagtctatcaaagggggagataactaattctcaacgcggcgcaggcttgacggtgggtaactggaagtctatcaaagggggagataactaattctcaacctccggtaaagacgttgcttcggaagtggaagtctatcaaagggggagataactaattctcaacggaacaaccacgttttctgcgagccagggaagtctatcaaagggggagataactaattctcaactgtgctgaccagggcagataacgagggcgaagtctatcaaagggggagataactaattctcaacggctttcctacgcctggtcaaaggtgacgaagtctatcaaagggggagataactaattctcaacagccccggactttttcggcgtgggtccggaagtctatcaaagggggagataactaattctcaaccggcggtgaggtggccccatgtgaatgtgaagtctatcaaagggggagataactaattctcaacgcgcaatgacctgctccggggctggtttgaagtctatcaaagggggagataactaattctcaacggcgctgcttctggtgcctcgtttgcttgaagtctatcaaagggggagataactaattctcaacggtggtattcggtggggtcgattccgaggaagtctatcaaagggggagataactaattctcaaccttgtgcctccagtgcgcgtggttgatcgaagtctatcaaagggggagataactaattctcaacggcgatgcggtgcgggatagtggcgcgggaagtctatcaaagggggagataactaattctcaacctctttcagtacacttcacgcagagttcgaagtctatcaaagggggagataactaattctcaacaggccctgctcgcctcgatgaggagggagaagtctatcaaagggggagataactaattctcaacggcatgagcaacaagaagaagaaacgcggaagtctatcaaagggggagataactaattctcaacgcagtgttaaaccagtagttgtgtgggcgaagtctatcaaagggggagataactaattctcaactgagggaggcattcggggaaagatcaaagaaatctatcaaagggggagataactaattcttgtcaaattaacttctgatgagaatttctttgaggtgtttactggcgataactcttacccctcccgccgctctggcggtggtgccagagcggcggtttgttagggaactaattctcagcggggttcacttgaactgcaaatgccacggaagtttatcagtgggaatgctgattatcaacatgtataaatcattttgtggcttaaattcatcaattcttcgccttcgtagtaatggcaattaggaaaaataaatcagttacgttgacttaattcaagaattaagcagttattactaactttacttagaatggagaagaaaagagcgagagatggaaaagaaagcaatgggtagaaggccatagaattcgagtggatgatgaattctgttgggatactcaactgtgtggccaaggcaccgattagccctgagtctttttcttaggggaaggcggaacaaacttgccgtccttgagcgggggagcgcccttcagatcggcaatcgcgtctgttaatgacagttcaggatgcttcaggcgatactggcgtaccaccttggagggaggattcggcaaatgcttgacgtattccaggcgcttgaccgactcatcagaagggtagttcagtaactggtgccagaaaatcgctgcgatcacaacttccatcagggcgatagtccacatcttgttggcggcgctccacaatgctagtccgaggagtatcacagccataaagacgtacacctttttgttcagcacaatctcaccagttttctgcatcgttgaagaaaagttgttgctgccatcttagtgtactgacagttacaaacccgtcacacattggctacgccaaggtgcagatactgaggaaaacaagcaaggtgtgataggcataaacaagccatgcacgcttgccgtgcccccataacgaaaggcgcctcatgactaccacatcatcactggctggccgccatttcttcctcctcggaatcggcggggcaggcatgagcgttgtcgctcaactacttgcctctcagggtgccaccgttgccggagctgacgccgcagactcaccaacctgccaggcgttacgagaccagtccatccctgtcctcatcggacacgacccggctgaccttcccgaggaagcaacagtcgttatttccaccgccatcaaggaaacaaacccccagttggttgtggctcgctcgcgcggacaagaaatccttcaccgctctgaggccctcgctctggccgcacgtgagcaggcttttgtggccgtggcgggagcacacggcaagaccaccacctcaggcatgcttgcccaagccctgactgccgcaggggcggatccttctttcgcagtaggcggagtggtcagtgctttgggaaccggtgcgcacatgggcaatgggggagtattcgttgccgaggcagacgaatctgatcgctccttcctcaactaccgccccgccatcgaaattgtcactaacgtcgagcctgaccaccttgatacctacggttccaccgagaacttcgaagcagcatttgttgacttcgctcaccgcctcaccccagacggcactctcatcatctgctccgatgatccgggggcaagacgtgtcgccgaaaaagctattactgacggtctccacgtcatcacctacggtcaaggaccgggcattgtcgcccagggtgagggtattgcggaacttcgtagcccccacgctcaactcgttatccgtgaccgccagcccggaaccactcgcgccaccatcacgatgactgtgcctgcaagcgcagcatggctgggagaacctctggtatgtggcctgagcgtcgatataactctggcgatgcccggcgatcacgtggtcctcaacgctgcgagcgcgtggctcgctggtgtactcatcggtgtagaaccccaggtcatggcgcaatccttgggcaccttcaccggaacggggcgccgttttgagttgcgtggtgaggcagcaggcgtccgtgtgatggatgattatgcacaccaccccacagaagtggcagccctggtcacctctgccctgcccgtagcccgcgagcgtggcggccgactcatcctcgccttccaaccccacttattctcccgtaccgaaaactttgccgagcgttttgctcaagctctttccggtgcacacgccgtggtgctcgcagacatttacccggcccgtgaaactcaagagcagttcccccacgtcaccagtgccatcattgctcaacacatgaatcctgagtcagttaccctcgtgggtgacttagctaatgtggccccggcaattgttgatctggctcaggccaatgaccttgtcatcaccgttggtgcaggctctattactcaagcaggcccccagattttgagcattcttcaggagcgggcatgagcccatcgggcgctggtacacgtcccggcggcccgcgtcgcctaggaacgccgcgtaggccagggcctgtgcggcctaacggtgcccagcgtcaacgccccgcctcgattcgccctaccgtcgatgagccgggggagtctggcctttttgatgaccctttagaaaagaatgatggaacgcagcgacgcgaaattagtgaccatgcggcgtcgccccacaaagttcaagaggatgaggcacgcgaggagagtgtcaagagtcgcgtttcccgcgttgctgagcgtgtaaaagtagcgttgccgcatcttcctgttcgacgcaacaagcctgccgaaatcatccacccccagcgtactgattctgtggtgtccatggggttagaagagcgtcttcaagaaaagcgcaccgccgaacggacacgcaaaaagaagcgcatccgcgacattgccatcgtggctgtggtggcggtagtaattggatggcttttgttggcctctccgctgctgggcctgaaaatgcaggacgtgtctgttagtggttctgatggaagcgtgagttctgaacaagttactgaacttgtgcagccttatgcgggcacctcactgatcatgctggacgtgaacgcggtggggcagaaggttgctgattcactcgttcgtgttgaggacgcaactgttcgccgtaactggcctcacggcatcaccgtagttctcacgatgcgcactcctgtggtggccatgaagactgacgacggatacgcgattatggacgcacacggtgtggtgctggaaaccgcgcctgcgcccacgaccggtaccgtctcaatcactgcaccaccggagggacaaacgctaagcgaagagcaagtgctcgcagtctctgaagcagtgggtgcgctgaacccgtcgacccgtgcgcgcgtatccagtgctgcaatctctgccgccggcatgatttccttgaccctcgatggtggccagcgtgtggtgtggggaactagcgaagatgatgatttcaaggccgaagtactcggtgtccttattacgcgcgaggctaatgtctatgacgtctcggctccgaataaccccaccacgtcctaaccttttcgtggcctgaatgaactttgctttgtctttgtgatctgaacgagccttgcttcaccttcgtgtgctgagggaaccttgtctcgattctgtggccttgagaaagtctcgccttgttttcttagtctgaggtgagggacccctgtctcgttctggtcccttatgacgtggttactctcctcatgccctgattatttggctggcttggaggtgccggcttgggtgtgtttcaggcaggtgctttggttatttagggctgatttttggggtgtgtgactggcgttttttagcacattagagacacaccgaaagaaatccccaaggcatgtgccaggtgccgtaccgttcactccgtcatgataaacgtgacataagtctaaacctaaagttaaggtttagggcttatttcgggagttaagcacaccagcggaaggcacaccagtggcggaatctcagcactaccaagcagtcatcaaggtggttggtgtgggcggcggcggcgtcaacgccgtcaaccgcatgattgaagcagggctgcgcggcgtcgaattcattgcagtcaacaccgacgcccaagcacttctcatgagtgacgccgatgtcaaactcgacgttggccgtgacatcacccgaggactcggtgcaggtgccgacccgtccatcggcaagaaagccgccgaagatcacgaagatcaaatccgcgaaaacctcgaaggcgctgacatggtattcgtgaccgcaggcgaaggcggcggtaccggcactggtggcgcacccgtcgtagcacggatcgcccgctccctgggtgccctgaccatcggcgtggtcacccgccccttcaacttcgaaggcaagcgtcgcagcgcacaggcagaagccggcgtcaacgacctgcgcgccgaggttgacacccttatcgtcatccccaacgaacgcctcttggccatcgctgaccgcaacatcagcgtggttgacgcctttaaacaggctgaccaagtccttctccaaggcgttcagggcatcaccgaactcatcaccacccccggcctgattaacgtcgacttcaacgacgttaagtccgtcatgcaggacgcaggtggcgccctcatgggtattggcgcagcaaccggtgaagaccgtgcagtccaggccaccgaaatggcgatcgcctccccactgctcgaaacctccatcgacggcgcacacggcgtgctcctcttcttccaaggtggtagcgatcttggcttgttcgaaatcagccaagctgccgaactcgttcgcgaagcagttcaccccgaagccaacatcatcttcggtaacgtcgttgacggcactttaggagacgaagtacgcgtcaccgtgatcgccgcaggcttcgacgaacagacgcagaccaaggaagcacccaaggctcccgtcgtcgcccagcagcgcccccagcgtgtctcctcccatcgtgcagaacgccccgtcgctcagcccgcatccccgctcgctgcagcagcagcacagcccgcaaccgaggcccccgttgctgccagcgcagccaccagtgaggtccccgcctatgtcgatgacactgcaagcgatctcagccccgtggaactcgatactcctcccaccatggaacccatggccgtcacggacgaaatcgacctccccgacttcctccgctgagccttcagtaacacaagcgggtacgccttcccgctcgatagacagtgcaccatgagcacaaactcccgttacccgtcgctgctgagcctagaattaggtccagcagcgacggtatttattaccaccgttgatatgccccacctagcggctcataccggcgatgatccccttaccgtgcgcgccacacgagactgccttgaagacgccgtggaggcaccaatcatctggatgaaccagacccactccaccgccgtcatccatacagacctcacggcacgcacctcaaacaccttcaatcaggccggccttggagacgactatgcggttgctggaagaaaagagacgaagacaggggggagtgcggcgtcgaatgcctgggaatctcacctgttgacgctaagcagtcagatgcctggggcacgcagtagtgcgcaggagtgggaactagaccaggcgggtgacctggtagctcaaggtgatggtctcatcatctctcaacacctcaacggtactgctttagcgaactttcatacgcatggatcccaatcagatgacggag

SEQ ID NO: 4135 - DNA, 24539 bp, synthetic construct
  source 1..24539: mol_type = other DNA
  misc_feature 1..24539: note = Synthetic
tgtaaaacccagtgaatagaacatgttgttgtccaggcgtgaactgttcatgctgacacgatagttggcctgtaaaaaaatataaccatcactttgtgtattcagttgcagaccaccacccagcggcacataaccgctccaggcagtaccataattgccgatacctacaccggcagtaatgaatggagagaaaacatgctcatcgttaataggacgggcatgtaaagagccttcaaattcgttggtatagtcagacttagagcctgttttgctgtaatctgtaaacaaaccattatagcgtaaagagaaatcgatctttttggtgatacctttccagtacattacagaaaaaccgggatctactttcccgatcttgggtacagaggccgaaaaatcaaccaggttggcactgaaacctattaccgatggtttctgtgcatacgtgacaagtgttgacattaataagaagcctgttaaaactcttttcataaataattactactgtttatctttttggttaaaaaacgcatagctataacgggtagttcagtcaatgctgaaccacaatacaataccgtctgagcaaggccttaccagccggcaattacaataagttttgaggaaaaggtaagcacagctaacaatcgtccgggtaagaacccggtatgaacaaagtatttgaacagatagaccgtgaaaggaaagcaaacgtttcgcgtggtaaatatttttttttacttttttattttttgtatcttttttatagcaattacagggcagcattacatgcaataaagattgtgtttcaacggtatcgataacattggttcaacaatgattatattggtatatagccttacagcacagcgtttcagcgattgtataatttatgcaaacgtttgcctgaaaatgggtataaatgtctgtgggctggtacatcttttaaattaatcagatatttgccttatggaacccctgcgcaacgccccgcctttttttgaggtcttagctcaaaaagctgcaaaaggcgataatcacgcttttcagcagctatacgattcaatcgccggcaagatgtatagtttatgtcttcggtatgccggtaataccaatgatgccaatgactgtttccaggaaggatttgtaaagctgtaccggcatctcgccgcttatcgtggtgaaggctcgtttgaaggatgggccagaaccatctttgtgggcgtatgtattgattacatgcgaaagaaaaagaacttcctgtcggtagtaaccgatgggctggaagtttttgccgacaacctttcagggtatgataagcttaataacgaagatctgatgaagctgatccgcaagctgcctgacggatacagggctgtcattaacctgaacctggtggaaggatataaccacaaggaaataggagagatgctgaacatttccgaagaaggaagccgttcgcaattgtaccgggcaagagtaagcctgcaaaaattattaaaagaaaccaatggccaatcgatctgatatattcagccggttacagagctatgaagtgtcacctccacaggaggcatttcagttgttgcagaacaggctgcttgcagagaatgcggctgttgtgcaggaaggtgtctggcatggtttgcagcaactcagcatttctcctccggaaatattgcaggaaaagatcacgcaggcaattgccgcattgccatcattgatctgtctgcagcaggtagccatactgccgccaactggtgtatctgcacacatacaacagcaactgttccccggaaagaaacaaactggtaaacaatggctgcaggcacgctggatagctgctgcttgtttagtgctggcactggcaggctggggcatatattatcttggtacggtaaaacaaaccttacctgttcagcaacctgtggtacaggctccggttgcaacaccccgatcacagatagcagaacaacctgcagacagcaatgctgctattgtaaagaaagtattgccgcaatacaaagactacgataacaacagtaatgtaaacttctttaagaataaccgttttaaaacagaaggcgccttcatcacaatcaccgataatgattttgtggtaacatttgccagtttcagttatgatgaactgcctgcatttttaaccagcgaagaaaataaggaacagtttatcaggttggatcagtacagctattttaccatttctgaaaatatggtagctatgctgaagaaaatgtaccagacaaaatcaaaaggtactcctacccgtagagcacgtaaggaaaaagaaaagctggagcaatggaaaaaagcagacgaaaaacggtttgatctgcaaaaaggtaacccgctggacccgattgacctgggtgatttcctgtttaaataatcagaacctatcatgcatgtatatcgctgtcaattgtatatgtttttcctgttgtgcctggcattacaggtaaacgctcaatctgccaatgctactgcagatgtgcaggctgatcttactgtttcatataccattgctgtaaaagggaaaagaagcaataccggtatgggcgaagcttattccggtggtaccaaaacgctttttgtgagcaatgaagtggtacgcctgcggcagatcaacatgatgcgtatgcagaatatctttattctgcctcccggcaatgaacggcgcaaagcggttattgtaaaagaatccggtaaggataaatacaaaacctatctcgatgccgcacagtggaagcaatacaaccagaaatatgaaggtgctacctgtcagttaagtgaaggatatgtaaccatcgcaggctatgcctgtcataaggcaatcattaaattaacggacggccgtttcattaccgcttattatactacattattaccacacactgcagccgctgttgctgaacctgcctttgcctgtgtaccggggctggttttgaaatatgaataccggtataagaaaaatagtatcacttacactgcaacgtctgtcagccgtcagccaattgatcagaatattctgcgcgttccttccaaggggtatgtggtgaaatgaggggaatttgaaaatgggtagcccgattgcttgatggttgaatggttggattgtgggggtacatgaagtcggatgtctgaaatcagaaaaggcacaagaggcaaggaacaaggttcaaggcgaagagaaggttgaagaagctacgagctttgagctacgagtggtggctaatacagtatgaagggttgaaaagttgataagggaatagccaactgtttttgcgttaattaggttgagggcaaaaacagcaacgatcactcacgattgacgattcacgaccctaatccggatagtcccgcgtcaggatgttcatatactcatcgatcactttttcaatactgaacctgcggatcaccagtaaacggccctgtttgcccatgtgcaggcgatcttctgtagacaggttgatcattctctccatcttatcggccaggtcgaacgggtcatgcattttgcagaagaaaccggtaatgttgttctgcactacttccttacagccgcgatttacagacgtgatgatgggcatttccatactggcagcttccatcaggcagcggggaataccttcgttataaaaagaggggaatacaaaacaatcagcctgcgttaaccagtgacgtacatctttggcaaaacctttatagtgtacgagaccttctttttcccagttgtcgagatcttcctgggtaatggagtccgggtggtgtttttcaaaaaaaccgatgagcaggaactgaacgtcgtaattctttttcttcagaatgcgggctgcgtctgcatacagacgaatacctttgcttttgagcaaacgtgtgctcatgatgaatgtaaaaggctgctcacgtggttttcgtttggcagggtagaaatgctcagtattaacaccttcgccaggcaatacctttacattcctgatgtgtacgatcttttcgctgatgaaaaccttggcgtcttcattattcaggaaccatacttcgcgggttttacgtaatgcttttttgtacagcagttttacaatccggtacagcaggttcttgcgtgcaaaaggataacccagcccggtgatcaccgctacagaaggaatgccggtagcagcggcagccaatgaaccgtaaatattcggtttggctacatagtgaaagataaaatcaggccggtgtatgcggtaaagctgttttagctgacgataaaagaaaagatcgcggaaaggattttcagttttgttatcaaaatgaagcggaataaaccggcaaccgctggctgtaatttcggaagaatattcatcatcaggtgccattaccagcacgcgataaccttcggacagcaggtgcctgataacatccatgcggaaattatacactgaccacgcgctgttggatacgaaagctatcagtttatcacaagtgcggtattgctgcatccgttattattggtgtcaaatttatagatttgatgcggaattagctataaaccattgaatccgcgttgattttatgctcaccttgatcctgtttactgtttacacaatattgctggtatatggctggtacaggttggtgcgacgtgctgccgtgccgctgtcagccggtgaaacagcactggccatggctgttaaaatagcaatggggtgtttatatggctatatcttttggcattactatcagggcgatgacacctggcaataccaccacgattcgctggaagaatacgataaactgctgcaccatacaaaacagttcttttatgagctaacccctgcttctgccattgaaagcggcaataccgcactggaaaaactgcaggtatatgtaatgaacctggagtaccggataacggtgaagttgctgggtgtattcaacattttcagccggggcagttactatataaacgtaatattgttcaacggcattgttttctgggggcactactggttattcagcctgttggtgaccttgtttccggccaaacgtaagtggctgtacatggctgttttcctgttgcctgcacctttgttctggctcagtggcatacgtgccgatggattcttgcttttttttaccacacttatttttctgcatacctaccgctggctgcacctgcaaaaaagctggtctgtactatggatattgttgggattgataggtttatggctttttcgcacagtgatggtaggattggtcattccaccggtagtagcctggtatcttactgtaaaggcaaaacgacaggcagcactggcttttgcaagtgtatatagcattggcattgtgctgttttttggcaccagcttattaccgggcccggtgagtctgccaaaggtaattgccggtcggcaggctgcctatttcgcactgcaagccaatacccgggtgccactggatacattgcagcctacggttatcagctatgcaaaggtgttgccgcaggccgtcaataacactttcctggagccttatccatggaaggccaagggattattgcagattgccacatcgctggataacctgttgctgctgggactagctatagctcttttctggcttcgtagtcctgcctggaaacagtctttagcacatcctgtttgtatttccctcctttgttttgctatatccctttacctgctgatcggttacatggtgccttttccgggtgccattgcccggtataagatcatcgggtcgttacttctgtattgtctggtagtgatcgctgcccgtaagcgagatgttaatgaaacgaattatgaaaaaaaataatattttgttatttggccgaaattgagtattttattgaataataatcagtgagataccagttttttcacattttgtccaatattattgtatcacaggttaaaaaattttttaaactgcctatttctcgtttatttgcacacacttaaaattgttgtttaatggaatctttacgttttaaagcaatcaacgacctcactgttaacccaagcggcgtgactgtagaaggttctgccaaaattaccggcatcttcggggagaatgtatttaccctgaaaacggcccgcgaattcttaagtgatgaagcatataaaagcctgctggcttctattaaaggaagcaagaaaattgaccgcgtgatggcaaaccagatctctgccggattgcgtcaatgggctgaaagcaaaggcgtaagccatttcacccactggtttcaaccattaaccggtactactgctgaaaagcatgattcgtttttcaccattaagggtgatggtacacctattgagcaatttgaaggtgatgcattaatacaacaggagcctgacgcttcttctttccccagcggcggtatccgtgctactttcgaggcccgtggttatactgcatgggatccttcttctcctgcctttattatggagatcggttatggaaaaacattgtgtatacctaccatcttcgtttcttataccggtgaaacgctggactataaagctccgctgctgaaatcactggaaacactgaacaaagctgctttagacgtatgtcattatttcgataaaaatgttaccaaagtaactgctaccctgggttgggaacaggagtactttgtaattgacgaggcgctgttcaatgcacgtcctgacctggtaatggctggtcgtactgtatttggtcatgagcctgcaaaaggccagcaactggaagatcactatttcggttctattcctgaaagagtgtatgctttcatgcgcgattttgaaactgaatcatacaaactgggtgttcctttaagaacccgtcacaacgaggtggctcctgcacagtttgagtgtgcacccatctatgaagaagtaagtgtggcagtggatcacaacaccctgttgatggatatcatggatcgtgtggcacgtcgtcacagactgcgcgtgttactgcacgaaaaaccgtttgccggcatcaatggcagcggtaagcacaacaactggagtatggctaccgataccggcgtaaacctgcttgctcccggtaaaactcccaagaccaacctgatgttcctgacgttcttcgtgaacaccatcaaggcggtacatgattattctgacatcctgcgtgctgctattgcatcagcgggtaatgatcatcgcctgggtgcaaatgaagcacctccagccatcatttctgtattcattggtcaatacctgtacaaagtgctggctgatgttaaagaacgggtaggtggtaaatttgatgagcaggacgaagcgatcctgaaactggatctgcaccgcagtattcctgaactgttgcttgataatactgatcgtaaccgtacttctccttttgcgttcaccggtaataaattcgagttccgtgcagtaggctccagtgctaactgtgccaacgcaatgacctctctgaataccatcatggcagaaacactgaagaaattcaaaaaagatgtggacgccctgattgaaaaaggtgagaaaaaagagatcgctatcatgcatgttatccgcgagtatgtggtaagcagcgaaaaagtattgtttgaaggtgacggttacagcgacgaatggcaccatgaagctgaaagacgtggtttgcctaacgtacgcactacaccgctggcgctggatgctatggtgacagacaaagcaaaacacctgtttgaaagcaataacgtactgagccatgtagagctggaagcacgtcatgaaatagaactggaaaaatatatcaaacgtgtacagattgaaagccgtattatgggcgaattgtgcaccagtcatattttacctgctgctatcaaataccagaacctgttggtaagcaatatcaaaggtttgaaagaagtgggactgccggaaagcagttatgcaaaccagaaagcgatcctggaaaaaatatcagaacacatcaataaagtgagtgccctggtagaaaaaatgatcgaagcacgcaagacctgcaatgccatgaccgatacccgcaccaaggctatcgcttaccagagccaggtaaaagacgcgtactttgacgccatccgctacagcgtagacaaactggaactgctggtagctgatgattactgggtactgcccaaatatcgtgaaatgttgttcctgagatagtgaatggagaatagtcaatggtgaatagtgaattagttactattgcattgaaaattcttaccggaacttaaatcatacaagagcctcttctgctgacccggaagaggcttttgcttttagccagtttgcagatagctaattgctgttattgattgatgcgatcgggtttattgatctgtttggtaaattgtttgaggcaggtagttatacagcggaagaatggattaattgtttttgaccctttgtgcttcccgtaaatatgcgacgagcatgagtgcggaaaagataagtaacaggtagttgttattggtaataaaactataggtgccgcctgtaagaaatagtattgtaaagaaaagatagacattacgcatgtcatatttgtgagctgtaaaaatgtaatcgatatcttcctgagtgaaccctttgttttccagttcctcaataatttcaccctggggttcgccttttttcagccgtgttttgatctcgtttattttttgaggtgtaaccataggagtaaatatagataaaatatggagcaacctgtcttacgaagccggtttgtagcttgtatgcgtcgggtttcccattccctggtagtgttattacctttatcctcatctcttttgacccttgtgccttcaatacggtttcccgtactattgatactaactgtttaagtacattagaacccggattcaggacctgagaatataaaaattgactttcctcaaataaatgatgtaggagggcaattgtttttgtttgcctgaaacttcgagtatatttaatgttagtacaatttcatccagccaggcagggttacctgaagacggtagctgattttttattattaaacctctaaaaaaactgcgctatgctttcacctgccaagaaaagcaagctgttgctggctttaaaaaactaccggaagaaattcctggaacgtgatctgacagaactggatgaatcgggtacccgcctgatgatcaatagttttctgtcggaagtattggattacctgcctatagaagagatcagaacggaatatatgatcaaaggtacctatgctgattacatgatccagatgggcggtatacgtcattttctgatagaagtaaaagcctattcgttacagttatctgaaaaacacctgcgccaggcagtgaactatggcgccaatgaaggcattgaatgggcattgctgaccaatgggaaacagtttgacttttacaagatcattttcggtcagcctatcggagagagaaagatcttttcagttgatcttagtaatgcagccagtcttaaacatgatgccgaacttatacaatacctgcacaaagaggccgtattaaagaaaagtctgaaacaactgtggagcaggtgtgaagcgctggaccccgtgaatgtggcgggcattatctattcaaaagaagtactgaccgtaattaaaaagctggtaaagaataaatactgtgagaaatgtgatgacgaagagatcgtaaaatcattgaatcgcattgtacaggaaaagatagacccggatgttataaaaccctataaaacgggcaaagcccagaccaaaacaaagaaagctacaaaatctggtgaagcaatagtacatgtgcctgtagtggatattacggtaacggatagcgagagcggacaggaagctgtgttggggtgaggaaataaaaaagtcccacagagtttgcgggacaaaagagttatcactcttcggcttatagccttgttgtgatttgcaaaacaaatatagtaaacaaaaaattgaaaccaaataaaaaatggcaaaaattttaggacttgacttgggaactaattctattggctggtctataagagaaactgatagcaatagccgaatggagtattatcaggtctattttagagaactattggagaaaattaaagaaacccaatctatacttgataatgaaattatagactatggtgtagtcgtctttcaaaaaggtgttggtgaaggtaaatcaggagaattttcattagcagcggaacgtagaaaaaacagaagtaaacgcaggctatacaatgctaaacggtatcggaaatgggaattgcttaaagtgttgattgaaaactggatgtgtccgctcacaatggaagagcttcgtttgtggagtattggaaattggcaggaggtgggtggaaggaaaaagaatacaggaagaatttatcctttaggcaatgaggcctttcaaaagtggctagcttttgatcccgagtattttggagaaaaggaaatctcggagaatggaaaagtcattcgaaaaaatccttatgacctgcgttttgaattgattagctcagaagaaacgaacgactttgctaaaaaacaaaaagtcggcagagctttgtatcatttggcgcagaggcgtggctttaagtcgagccgaaaaagcggcaaatctacttatgcagaaaatgctgaattggaaaaactaaagcagagaaaccccgattttcagattacgatgcttgctaaagaaaaattggaaaatggtaaacgttttcgagcaagcggggttattcagcgtaggtattttgaagatgagttttatgccatctgccaaaagcaaaacattagtgatgaactaacagcgaagttttataaagctatttatttcgttcgcccactccgttcacaaaaaggcttggtaggtaattgtacatttgaaaaaggcaaagcaagaattcctgtaagtcatccgaaatttgaggaattcagggcactccaattcatcaacaatatcaaatggcgggaagttggcacacaaacttatgaagccattcctatctcattgaagaaaaatatttttgaagaactatttttccgaaagctaacgagtgggaaaaacaaagggaaaactattactgaaacttatttcaaatttgatgagattgttgaaaaatattcggaaaatgagaaatatgaattcaactacaaaaataagcctaatatttccacctgccctactattgcagttcttatgaatgtgtttgatgctgaatgggaaaacaaatttatcgcagatgaaaacagttacggcatcaattgggaaggtttgtctatcagctatactgttaaatacggtataaaagaaggagaaaatcggaaactagaagtagatgagatttggcatttgctgtttgattacattcaaaccaaagataatgcggaagaactcgaagtgttttgcaaaaatgtgttcggatttgatcctgataaagcaagagcatttgctgaaatagacattcagcaagggtatggctcgttaagctataaagccatttctaaaatccttccttttttacaaagtggatttgtttatcctgaagctgttttgtttgccaatttgaaaaaagttttgggcgacacgtttgaggttaacaaagtgcaggcgaagagaatcattgacgatgccataaaagaaacatcagcaatcaaggaaaaacggaatatagtcaatgggttgattcagcagttttttgccgaacataataccaaccgagctaaaggcatcgataatacgattaaagaaatggcagctcaggatacgctgaacaaactgaaaaaatactttggcgaaagtgattggaacaaaaaaactgaaactgagcaaaggttgtgggaagatgaaattctgaacttgtatttaaaatttcttgaaggaaaacagattaaagaagaaaaggcatctgtacagttgggcaaaaatcctgaaatagattactataagctgccccgtgtggacgaatcgattaagcaatgtttaaaagcatcttttaatttgccggatgatagattgagacatctgtatcatccatcagatattgaaatgtatcctaggtcgaaaagcgaaatagaagtaagaattaatggcgttgagcagtttgtaaaacaattggaaagtccgcagcctccatcaagggggtggaaaaatcctatggttatgcgaacactccacgagttgcgtcatttgctcaactgccttttgagaataggaaagattgactacgaaaccaaagtggtagtggaaatggcgagggagttgaatactaaaaactatcgcaaggcttatactgattggatcaatgatagagataatgaaaataagagtttcaaggcaagcattcttgaagtgtatcaaataacagaaccgtcaattgacgattacaataaatttcgttcagcggtagagcaaatagtaaatacagaattgatagaaaataaaacaactatttttcagaataaatatcaagagtttattgatacatacctaaacacaataaaaattcctgaaaacaataaagatgaattgatgagcaacgagtattatgactatttaatgtatttgattttaaatagaggggagtttaggaaaatgctcaactttaaaattcctaactcaaataagtggcaaactcaactaatagcaacttcttctagttttgaaaaaaagtggaaagaattatctgaaatgctaacgaagtatagattatggaaacagcaaaaatttcaatgtatatacacagggcaacaaatttcatttacgcaactttttaccgaaaattatcagattgaacacacaataccacgaagtatttcttttgatagcgaactcaaaaatcttaccgtttgtgattctgcttataacaactttgtaaaaggcaatttgttcccaacagaatgcccgaactacgaaacagcgaaagtatgtaaaacggtaaaaggcgatattacttgttttcctatcaaagatagagttgaggaaagcatttttccgaaagtgaaagagttgcatactcgtattaaaaacttagacacaatcaataaaggattgaacgatgaagaaaagaaaaatgctaacattagattaagatactatttgaaatttgaattagagtattgggaaagaaagttgttgacatttactataaaaaaaggtgattggaaagatagttggaaaaacagtcaattagtagatacacaaattatctcaaaatatgctaaagcatatttaaaaagcatttttgaaaaggtggatgtacaaaaaggttcaatagtaaatgattttaagaaaatttatcaaataaaaggtgacgggcaaaaagaccgcagctggcacagtcaccatgcagtggatgccgcaacgcttacacttatccctggttctgcaagtcgggaagctattttgaaagaatattacatagctcttgaaaacaaaaagaaatatcacgccaagccctataaaggttttcaaacatcacatcttttggatatagaaaaaataattgttgtaaatcatatttcacacgataaaactataacagaatcctttaggaatatcagaaaaagaggctttaaaacaggctgggttgcacagggtgattcaattagagggaggttacatgaagaaacatatttaggcgcaataaagcctaacgaagtaaaagatgagggtaaagcaattaaggatccaatatctgggaaatatcttaccaaacaattaaatggaaaagatgtaatttgggtggttcagcgaaagaagattgaggacgtagatatagacgtcattgtagacgaagctttgaaagcccacattaaatggcaattgggtaacggagtaaaaataaatgaggtgaaagattttgcaggtaatacaatccgtcatatccggtttaaaaagttttcaccttcttatgacaaggcaatacaagtaaagcctcatttgttttcttcaaaatatggccacaagaatttctatttagctaataatgaaattaattatctatgccttctgtacataggaaaggataaaaatgggaaagaaattagagcattcagatttgtgaatttatttgagttctctaaaatgaaggacaagcgaattaatttattgtttcataatgaagactataatgtctttgttaaagttaatcggagtaatgagtacaagcttaatataaagtgtattttgaaagtcgaccagaaagtcattttgtataagagttctatagaggaaattgataaacagaaccttgataactataggtgtcgaatttttaaaatttataaatttaacaactctggttctgattatatttttttacagaacatcattgaagccagaaatgatgatggattgataaaagcaggatttacaaaagatggagacacagaatttaagccaaaacaatatcagcctcgcttaaaattaacggcagataacttcaactgcctttttgaaggagttgattttgaaataaagccagatggaacaataaagtggattaaatcatgattaaacgttctctttatttcggcaatccagcttacttaaaaacagcaaacgagcagcttgttattgaaatgcatgatagcggagaagccaaaactacgcccattgaggatattggtttactggtactggatcatcagcagataaccattacacaggctttgctggcaaaactgctggccaataacacggcggtgatcacctgcgatgccacccatcaccctacgggcatgttgctgaatctggatggaaatagtttacaaagcctgcattttcaggcacaggtagaagctactgtaccgctcaaaaagcagctttggcaacagactgtaatggcaaagatctataatcaggctgttttactggaacaacaaagggaggaaaataaactgctgttaaactatgcaaaagaagtgaaaagtggtgatatcgataatcatgaagccaaagccgctgcttattactggaaacgtgtatttcctgatttcctggaattccggcgtgaacgttatggccctccacccaataacctgctgaattacgggtacgctattctcagggctgtggttgccagaagtttgacggcatccggcctgttacctacgctgggtatttttcaccgtaatcaatacaacgcttattgcctggcagacgatattatggagccctaccgcccgtttgtggatagacaagtatgtgctattgtacgggcaaatggccggttcctggaaatgacaccaggtatgaaaaaagagttactggcagtaccggcgatggacgtacagatagatgggcaaaaaagcccgctgatgaacgctgtgcaacgcactacagccagcctggctaaatgttttgaagggaagtccaggaagttgctatatcccgaactgatatgaatagtgtaaggctcttatattcaccttacgaggggattgggggctttgaacgcctgaatgcataccgcattatgtgggtactggtattttttgacctgccgaccgagactaaaaaggacaggaaacaatatgctgtattccgtaaaaagatactggcagatggtttccagatgttccagttcagcatgtacatacggcattgcagcagccgggaaaattcagaagtacatataaaacgggtaaaaaccattctgccgcccaaggggcatgtgggcattatgtgtgtgacagacaagcagttcggcatgatggagatattcagggggaaggagcaggtagaggccccggaaacagtacagcaactggagcttttttaaccgtgttgatcttaaaatggcaaaacctggttgacaggaataaaaaaacgggtcttataacccgtttttttattctgtttccggcctcaaatgcaggccggataagggttttctgtaattcagttgtgtaagaactaatgtacagaataattgaaagcaaatcacaaccaatgatatgatgattcaatggccaaatccgttgtgtaagaactaatgtacagaataattgaaagcaaatcacaacttctccacctatgggtttggttttgacattgttgtgtaagaactaatgtacagaataattgaaagcaaatcacaacaatggaagatggtattcgatatggtatggtgttgtgtaagaactaatgtacagaataattgaaagcaaatcacaacttgtacatccctccgaatttcttcatcaccgttgtgtaagaactaatgtacagaataattgaaagcaaatcacaacttacccatcggtatatctatatctgcatcagttgtgtaagaactaatgtacagaataattgaaagcaaatcacaactacttattgtgcccccttcgccagcacctgtgttgtgtaagaactaatgtacagaataattgaaagcaaatcacaactccagttattgaggccatccatcaaaaaggttgtgtaagaactaatgtacagaataattgaaagcaaatcacaactaagtcgtctttttgataaaaaccattcaggttgtgtaagaactaatgtacagaataattgaaagcaaatcacaacttttccaaggcgttctgcaagagattcgatgttgtgtaagaactaatgtacagaataattgaaagcaaatcacaactccatcttccacacaaactttggcggttcagttgtgtaagaactaatgtacagaataattgaaagcaaatcacaactgatcaatggttgatggagattgatgatttgttgtgtaagaactaatgtacagaataattgaaagcaaatcacaacttgccgagtccattgatcttgaagagaggtgttgtgtaagaactaatgtacagaataattgaaagcaaatcacaacttacgtcagcaggttcagtcacatggaatagttgtgtaagaactaatgtacagaataattgaaagcaaatcacaactagttgcacttgatgcaaaaaatacgaatggttgtgtaagaactaatgtacagaataattgaaagcaaatcacaacatgctatgggtggtttatttatccaaagatgttgtgtaagaactaatgtacagaataattgaaagcaaatcacaacttacggtggggtgtaggtgttttaaatatgttgtgtaagaactaatgtacagaataattgaaagcaaatcacaacattaacacgccgattatatagattttgaacgttgtgtaagaactaatgtacagaataattgaaagcaaatcacaacagtactaaccggattgtcactgggcggtggtgttgtgtaagaactaatgtacagaataattgaaagcaaatcacaactggtcgttgtaatgcctccgccaccgccacgttgtgtaagaactaatgtacagaataattgaaagcaaatcacaacattagtgagttgttgattatattcttttacgttgtgtaagaactaatgtacagaataattgaaagcaaatcacaactgcgtgggtttgataaagaagcgggaaaatgttgtgtaagaactaatgtacagaataattgaaagcaaatcacaacttatgaaatcatctcctaaattcattatctgttgtgtaagaactaatgtacagaataattgaaagcaaatcacaacattaacggatcgatttggtcggttccagctgttgtgtaagaactaatgtacagaataattgaaagcaaatcacaactggtaattgttatggctcctttcacgcgcttgttgtgtaagaactaatgtacagaataattgaaagcaaatcacaacataggtgtactgcagaataatctaatatcagttgtgtaagaactaatgtacagaataattgaaagcaaatcacaaccgtggtcaagttggtattgcactaacaaatgttgtgtaagaactaatgtacagaataattgaaagcaaatcacaactagcagcagtggtactattttttcttccaggttgtgtaagaactaatgtacagaataattgaaagcaaatcacaactaatgagacagcccttcaaattgaacaattgttgtgtaagaactaatgtacagaataattgaaagcaaatcacaactaataaccacttacaaccaccataacttctgttgtgtaagaactaatgtacagaataattgaaagcaaatcacaactcatcctgttgtggttatgtcggagtaaatgttgtgtaagaactaatgtacagaataattgaaagcaaatcacaacactcattcgttttgatttaatgaatgctgtgttgtgtaagaactaatgtacagaataattgaaagcaaatcacaactagtaatgtataatgccggagaagggaattgttgtgtaagaactaatgtacagaataattgaaagcaaatcacaactcatcctgttgtggttatgtcggagtaaatgttgtgtaagaactaatgtacagaataattgaaagcaaatcacaacagtacgaatgctatcgtttaatggtttattgttgtgtaagaactaatgtacagaataattgaaagcaaatcacaactacggcaccaaggcactcatattgagctccgttgtgtaagaactaatgtacagaataattgaaagcaaatcacaactgctgcgcttctggaactttttcatccggagttgtgtaagaactaatgtacagaataattgaaagcaaatcacaacttaatgcgactaagggggttaaaaatactggttgtgtaagaactaatgtacagaataattgaaagcaaatcacaactttttggaagtgtttgtgcataattatacagttgtgtaagaactaatgtacagaataattgaaagcaaatcacaactgcgtgggtttgataaagaagcgggaaaatgttgtgtaagaactaatgtacagaataattgaaagcaaatcacaactagtaatgtataatgccggagaagggaattgttgtgtaagaactaatgtacagaataattgaaagcaaatcacaactatagaacctattgattaaacaaacaatcgttgtgtaagaactaatgtacagaataattgaaagcaaatcacaacatataggggcagacctttccgagataaaaggttgtgtaagaactaatgtacagaataattgaaagcaaatcacaactgcaagatggtaatgcatctttacatgaccgttgtgtaagaactaatgtacagaataattgaaagcaaatcacaactctacctggtcacaccaaacttcagggtcggttgtgtaagaactaatgtacagaataattgaaagcaaatcacaacctgttgtattattcatctttttgcaaatctgttgtgtaagaactaatgtacagaataattgaaagcaaatcacaactgaaaccagcgtgttcctcggttgactgagttgtgtaagaactaatgtacagaataattgaaagcaaatcacaactattcacatttgtacccatctcctgcatatgttgtgtaagaactaatgtacagaataattgaaagcaaatcacaacataatgtgaattatacaggttttcaatctagttgtgtaagaactaatgtacagaataattgaaagcaaatcacaactcttcgacattagcgatcaacaattcaaaagttgtgtaagaactaatgtacagaataattgaaagcaaatcacaactcattcagcccattttacccgcgcttctatgttgtgtaagaactaatgtacagaataattgaaagcaaatcacaaccgttgcgttacctcaaaggcctgggacttttgttgtgtaagaactaatgtacagaataattgaaagcaaatcacaacaatggcaattcagtattcaaaagcagtcagttgtgtaagaactaatgtacagaataattgaaagcaaatcacaacacaagatggtaatgcgtctttacacgaccggttgtgtaagaactaatgtacagaataattgaaagcaaatcacaacacgcgttaggttgtattgagtatgcatatggttgtgtaagaactaatgtacagaataattgaaagcaaatcacaactatgatagagtatacactactgctatcggtgttgtgtaagaactaatgtacagaataattgaaagcaaatcacaactgttttcaaccagtcaagatctgcttgaatgttgtgtaagaactaatgtacagaataattgaaagcaaatcacaactaacggggggcatgttcgtttttttacttcgttgtgtaagaactaatgtacagaataattgaaagcaaatcacaacataactttctgtcagcttattaagttttttgttgtgtaagaactaatgtacagaataattgaaagcaaatcacaactataatgtatggtataagttcttgatcaaagttgtgtaagaactaatgtacagaataattgaaagcaaatcacaactatatactgatggttgccttgatcctgtgcgttgtgtaagaactaatgtacagaataattgaaagcaaatcacaactcctagcgcttgtgccggcaagtagatccaggttgtgtaagaactaatgtacagaataattgaaagcaaatcacaactggagccggtgatcaacaaaatggatgagggttgtgtaagaactaatgtacagaataattgaaagcaaatcacaactatggctattctttgaagaaaaaggccagggttgtgtaagaactaatgtacagaataattgaaagcaaatcacaacctattctcacctacttccacacctgtccagttgtgtaagaactaatgtacagaataattgaaagcaaatcacaactttcaatcttccggcagatattggctgcttgttgtgtaagaactaatgtacagaataattgaaagcaaatcacaactgttatcccttacaataataccatagagtagttgtgtaagaactaatgtacagaataattgaaagcaaatcacaactatgaatgctatgtactaaacccgatgattgttgtgtaagaactaatgtacagaataattgaaagcaaatcacaactgtgcgcaacatacccgtgaaacccttgttgttgtgtaagaactaatgtacagaataattgaaagcaaatcacaactaataaattatgacactcagagaaaaggcgttgtgtaagaactaatgtacagaataattgaaagcaaatcacaactgactgtctctgctactttgtgcgaacgaggttgtgtaagaactaatgtacagaataattgaaagcaaatcacaacatacaagcacaacaagagtctgataataagttgtgtaagaactaatgtacagaataattgaaagcaaatcacaactgtcgcctgttgaagccgacaatgtacccagttgtgtaagaactaatgtacagaataattgaaagcaaatcacaaccaacggcaattgatacaatcggatttacttgttgtgtaagaactaatgtacagaataattgaaagcaaatcacaactctatcactacagcatctgttgtttgtgtgttgtgcaagaactaatgtacagaataatttgaaagtaagttgcagaggcattcacacagacaacatgctcttgcatagtgtggtggttacatgctttttctgaaggcctctgtcacataggctgctggttgatatagaagagtttcgtttacagttagctgcgagtagttgttttcgttgggacgtggcatctggatattgtaggatgaatagagtgtttgttgtagttttttgccatcgatatttttacccagttcaatgccgtatatattggtgcccccaggcaactggctgatctttatgccaggtattttgttcaggcctgaaaagatctcttcgcctctttttttagcatccgacaaacgtgtttccaatccctccagccggtgaagcgccatggctgcattggtccagttgccatacatagagcctccatgtattttgataagatgcggcattttatcgattacagttttatcgccgcaaaggatggcgcccccgctggcaccaagatatttatacaaggaaatatagatagtgtcgaaacaggctgcatattctttaacagtattgccagcccaggtggtagccatatagatcctggcaccatcaaggtgcatccggatattgttgctgcggcagtaagtactgatcttcctgatctcatacagcggtaccatttgcccattacttctgcgtacggggttttcaatagacacaacaccggtgccggatgcaaacacttcttcattaggtatattttccacagcttcctgtaattgctgtgccgtgaaataaggctcgttttttgccaaaggcatcaatcgtttaccaaatactgattgtgctgcatcggcttcatcgcggtaaacgtgactggtatcctgtacaaataccttggtgttattaccgctcaatacagcaatggccatttgattggccatagtaccactgggcatataaatagctttttctttaccggtaatttcacagaactttttctcaagcgcttctattgcgccgccaataccatagcggtctggtttaatggctgcagccgcttgtactttttgtaacacgttcaggtaatcatccggatcaaacatttcaccatctccccagaatttgatcagtggtgttcccggtgcagtctgtggggtggataaaccggctgcgtttgcgggtataaagggtgccagtacaggtaaggttgccagtccgtacgtttgcagaaagcgtcttctgttaacaggtgccatgttgaaaaggttggtgttatacaagctaatatactcataatgctgtagaagagatgacccgataaagtatgttaacaaataaggggagatagcctgttgtcagtgggggataccaggataaaaaagggccgctgtaaaagcggcccgccgggtgagtcagtaatcgacctgtataattatttcactactttttgtacgaagttctgttcgccggctgtgatatttaccatgtaaacaccggaagcaagtatgctcaggttgttcaatgatatacggttgatgccagcctgtgcctgttgtgtgatccgctgtataatgctgccgttgctgttgtacaggataatggttacgggtcctgctttggacaactcaatattacaattgatcttatcagtaaacggattgggctgaacattgatggcaacattggcggtgctgccggcccgtacggaagcaatattgctgtaagtaactttaccatctatatccacttcgcggatgcgatagtacaaagtacctgtagtaacaatattgtggttgtaattgtaattgaccctgctgttggtgttgccggctgccggtgttgaaccgatagttgtgaagtcaacaccattgcgactgaattctatatagaaattttgcgtattgatttctgtatatgtactccatgataactgggttgcattgttacggtacacagcctgtaggggtgaaagttcaaccggtaaggtagtggtacagatatcattaaaacctcttgtattagtataggtggctgtgtcgtatggtgtcatggaggtatttacgaaaagaaactgcctggtaccattgttaatattttgattaacctgcaatggtgctatattgctgataccgctgatagtaccattgttgttgatagagccgctcacatatagctgactggggcctttgagtgttccgttattttgtaaagctccgtttatacgcagctgcgcattggagaagttcatggtaacagaccctgctccgttgatggtgagtgagccctgtgtccacaataacccttcattacgaacactgttgttaaaggtaatgctgttccggaacaacatctggtaaagattaatgatagagtctccgctattgctgttaaatgtattcaatacagatattttccattgattgtatacgcggcccaaagcggtgaaactaccattaaaaataacctggccggtattgtttaatgtacagccattgccaagggtcatattagaggcaaaatttaaaaagcctttattggtcagcacggtacctgattggttcaggttagttgttgaagtgaaatgcatgctgccacaggcattattggtaacagtcaatgcagcattctggttccatgctatccagttaaagctcccattgttgataatagaagctccgctggccaggctcagaccggcagtgcccagttgtgctgttccgtaattggttagggtagctgcaaacgagttagcaaccgtgggggtaaaggtaccgccgttttgtacaatgatctgagaaccggcgttggcagtaatattgcctgtgtaagcaccattgttaattactaccattttggcaccgttgttcagggtaatactgctggttaccggcagtgatatacatactgtctcgccactgttgtaggttcctcctgtattggatacactacctgcggggcattgtgcagaagcctgtatacctgca

SEQ ID NO: 4136 - DNA, 24314 bp, synthetic construct
  source 1..24314: mol_type = other DNA
  misc_feature 1..24314: note = Synthetic
agaggcggcaatctctatcacggtagagttaaagcgttggcagaaggtgctcgtgaagctggactaaaattttaacagacaatgaaactgaaaaacaatattcaaagagtaaaacccagtggtcttgaactcgtagatcggctcgtagctgttaatagggtaaccaaagtaacaaaaggaggtcgtcattttcgcttctcagctcttgtggtagttggaaatgaaaatggggtagccggttatggattgggcaaaagtaatgatgtaagtgaagccattgccaaaggagtggaagacgccaaaaagaatttggtgaaaattccaattgtcaatcacacagtacctcacgagcaggaatcaaaatacggtggagccagagtgttcttacggccagccagccacggtacaggtgtaatagccggtggtgctatgcgggctgtgctcgaatcctttggcatccacgatgtgctcgctaaatccaaaggcagttccaatccgcacaatgtggtcaaagccactttcaaagcactgaccgaaatgcgcgatgcctacacggtggccaaagatcgcggaatttctgtagagaaaatgttcaactcctaaacgttatcagtggtggaaaaaataaaagtaaccaagatacgaagcaccattaaagcttccaaaaaccaaaagctcaatatgaaagctttagggttgaagaggatcaactcaagcaatgaacttgaattgacaccacaaattgccggaatcatcgaaagagtcaaacatctggtcaaagttgaaaaaatttaaacaatgaaattacaagatctaaaacctgtagaaggatctactcacaaagaaaaaagaataggcaggggagaaggcagcgggcatggcggtacttctactcgtggtcacaaaggtgataagcaacattctggctacagaattaaaagaggatttgaaggaggtcagatgcctcttcaaagaagaattccaaaatttggatttaaaaacttcaatagagtagaatacagggccataaatttggatgtcattcaatcactgattgaccaacaaaaagtggaagggcgtattgcacctgatgacttggtaaaattgggacttgccggaaaaaatgacttgattaaaattcttggccggggagagttgaagactaaaatcgaagttgtagcacacaaattctccaattctgccattgaggccataaaaaatgccggtggagaagttgtgaccatttaatttcagcccaatgaaaaagtttcttgaagtactgaaaaatatatggagtatcgaagagctgaaaaacaagctcctgctcacgcttggattgctgtttgtttaccgtctgggctccaatgtggtcttgccgggtattaaccccgaaagcctttcagcacttcagcagcaaactgatgacaacaacctcctgggcatattaaatgctttcacgggtggagcatttgcaaatgccagtataatggcattgggcattatgccctatatttctgcaagtatcgttattcagctgctgggcattgcagtgcccagcatccagaaactcgataaagaaggagagagtggcaggagaaagaaaaacaattatacacgttttcttaccatattcatcactcttgctcaggcgcccggttatctggccaatctgatagcccaacaggtagaaatcaccatcagtccgtccaccttttggtttttaggaatcattgtattggtcacaggtaccattttcgcaatgtggctcggcgagcgcattaccgataagggcattggaaatggaatctcactgctcattatgattggaatcatagcaaccttgcctcaggctttcctacaagagctcattaccaaactcgaaaatcaaaccggaggattacccatctttctggtcgagattgcagccttgtttgttgtaattctgctttcagtagcacttgtatctgctacgagaaaaattcctgtccaatatgctcgcagagtagctggtggaagattggccgacaatcagattaccagaagctatattcccctcaaagtcaatgcagctggagtaatgcccatcatctttgctcaggccatcatgtttattcccatcactgtgctgacctacgccggcagtaccgaaagcaccggctggatcgtaacactctttggcaacatcagtggattttggtacaactttctcttcgcagtgctgatcatcctctttacatatttttatacggctatccagatcaacaccaatcagatggccgaagatttaaagagaaatggaggttttattcccggcatcaagccaggaaaacctactgctgaatacatcgacctgattttgtccagaatcacacttcccggctctatatttctagccttgatagctatcctaccagcctttgcgatgagcgctggagttaccactcagtttgcttacttctatggcggtacttccttggtcataatggtaggtgtgatcatcgataccttgcagcagattgaaagttatttgcttgcacggcactacgatggattgatacaaagcggaagaatcaggggtagatcgtcggtatcagtagaataaacaaaaatcaggaatggcgaaacagtccttaatcgaacaagacggaaccattatcgaggccctttcaaatgctatctttagggtggaacttgaaaatggccacgttgtgaccgcacacatatcgggcaaaatgcgtatgaattacatcagactcttgcccggtgacaaagtgaaaatggagatatctccctatgatttaaccaaagcaagaattatttacagatattaatacagtcatgaaagtaagagcatcactaaaaaaaagaagtcctgaatgcaaaatcgttcgcagaaaaggacgtctttatgtcatcaacaaaaagaatcctaaatacaaacaaagacaaggataatacgtaagctatggcaagaattgcaggtattgatttaccaaaaaacaaaagaggtgaaataggtctgacctatatttttggaataggcaggagccgtgcccgtaccatcctcgatatggcaggtgtcgactacgataccaaagtacaaaactggaccgatgaacagatccaggccattcgccgtgctatttcagaaaacttcaaagtagaaggtgaactgagatcagaaatccaactcaatatcaaaaggctcatggacattggatgctacagaggaatcagacatagaaatggcctgccggtaagaggacagagaaccaaaaccaattcacgtacccgcaaaggcaagagaaaaaccgtagcgaacaagaagaaagccaccaaataattaagtactcctatggctaaaaatacaaaaaccgtaaagaagcgcattgtaaaagtagaagctgctggtgaagcgcatataaatgctacttttaacaacatcatcatttcccttaccaatttaaacggacaggttatcagctggtcatcagccggaaaaatgggttttcgtgggtcaaaaaagaacaccccctatgcagctcaaatggccgctgaagacgctgccaaagctgcattggaagccggcctgaaaaaggtgaaggtctatgtaaaaggcccaggggcgggaagagaagcggccatccgaacaattcacaacaccggtattgaggtaactgaaatcctcgatattacccccataccacataacggatgcagaccaccaaagaaaagaagagtttaattattgtaattatctagatcaaacaaaaaatggcaagatacagaggtcctttatccaaaatagccagaaaattcggcgaaccaatttttggtccggacaaggcacttgagagaaaaaactatcctccgggtcagcacggttttgctcgaaaaagaggaaaaaaatcagaatatgccgttcagctcgcagaaaagcagaaggccaaatacacctatggaatccttgaaaggcaatttgaaaacctctttcaaaaagcaaatcgcctgaaaggtattaccggtgaaaccctactccaactctgtgagacaagactcgacaacgtagtatatcgccttggcatcgctcccaccagaagggcagctcgccagttggtatctcatcgtcacattgaagtaaacggagaaatagtcaacattccctcttatcagcttaaaccaggtgatgtgatttcagtacgccaaaaatcacgctcaatggatgccattaaccttacaaaaggcactcaaatggattggcttgaatggaatagtgccacagcatccggacgtcttctcaatgtacctcaaagggagcaaattccggaaaacatcaaagagcaacttatcgtagagttgtattctaaataatcacctcaaacaactgattttatggctattttaagtttccaaaagcctgacaaagtaatattgatccatagcgacgacttcgagggtcaattcgaattcagacccctcgaaccagggtatggccttaccatcggaaatgcactcagacgtgttttgctctcaagtctcgaaggctatgctatttcctctgtccgtatcgaaggagtagaacatgaattttctaccatcaaaggcgtggtggaagatgtcactgaaatcgttctcaatcttaaacaagtaagactgaagaaccaaattccttcgcaagagaatgaacttgtaaaagccaacttttctggtaaggaccgcattactgcaggcgacctgggcagttttatttcagctttcaaagtgttaaatcccgagctggtcatctgtaacctcgatccatctgtttctctgtctttagagtttacgatcgataaaggaaggggttatgtgcccgcagaagataacaaaaaaagcaatgcaccactcggcaccatttttatcgataccatctatacaccgataaaaaatgtaaaatacagcatcgaaaactaccgtgtcgagcagaaaacagactatgaaaaactcatcatagaaatcaccaccgacggtagcatatctcctcaagatgctctgacagaagcagccaaaatattgattgaacattttatgctcttctccgacaaactggtaaatgtagaaccagtgaaaaaagaggaagaaccggatacatttgatgaagaaatcatcagaatgcgcaatctgctcaaaaccaagctcacagacctagacctttccgtaagagctctcaactgtctgaaagctgctgaagttgaaacacttggtgacctggtgacgtataccaaacaggacctgatgaaattcagaaatttcggtaaaaaatccctgaccgaactcgatgaactgatagagtccaaaggattgcacttcggaatggacctttccaaatacaaactagataaggaataaaaatgagacacggacgtaaagtaaaccaccttggcagaaaaacaggtcatagaaagagcatgctttccaatatggccagctctctgttactacataaacgaatcaccaccacacttgccaaagcccgggaattgagaaaatttgtagaacctctcataacccgctctaaagaagacagcactcacaaccgaagaatcgcttttgccaatctcaaaaataagtatgccgtaacggaacttttcagagaaatttcggtaaaagtagctgaccgccccggaggatatacccgcattatcaagttgggcaatcgactcggtgacaatgcggaaatggcattaattgaattggtcgattacaatacgacttacacaaatgaaaaatcggccaaaaagacccgcagaagcaggagaagtaaatcaaaggcagaggggactgctccagttgaggtacaatcagctgcccctgaagcagaggctcccaccatttcacctgctgattcgccggccaatgaggccacctcgacttccgagaacgaggataaagcctgagcattccagttgtaatttttaacaaaaaggtaaagccaactgctttacctttttttttgctttccctattggtggaaatttctctaggtcaaagagagtttcagattttgcatcaagaatttagtgcggataacccggtgaattacgacggaactcacatttctcttcactgttgtatttcgtcatctaacgtaattctgctggatgttacagccaaagagttatcagcaatgaaggtgatcacctacatcacgctgattattttccacagaggtgatttccataatatgagccattgagcatacatcattgtcggagatatatctgcgtctgtgcctccggttaaaatgatatttataagagataatacattcattaccaatgcattgctacagggtaatgagggatttttagattttcttttatacaactggaaaaaaaggtttacatctcagatgccttctcaggaggggcctggcgcattaagataggatggtgtaccgccattgatttcgaaagcagagaaaaatcctcaatggattagaaacagttggaaattgtgtatcatgggacgaacggatatggcctgataacgggcgaagacaaaagaagctattggataaaaaaggtacctttactggtgatgagcactgttagacccgaagtctgaagctatttaggtgctacagatgtctcaaaactccaactgagcgatttcctcctcagcaaaaaagtaaagcaatacagaccaggctgcccaaaccaatgcaccgcaaaaaatgccagcagcaagtgagttgaaatatccgctgcccgctatcactaccaacacagatggagcaacacaaaaggtaagcattgcgacgtagcccagcggcaaaaaaaggtagcgatccagcgcgttgcgaactctcaattttacattgagctggtatagaaaccccgtcagatataccacttccgatgcaattacacagcccagtacgaagtaaaaatctatgcctccggctatccatactggcagataaaacacagtggttaaaagtcctatctgaagtaaatccaacaaaataaaaaagaaaaatttccttgcggtggtgtcagggatcaatgcaaatattggcctggcaaggtcaccaatgcgcacacgcatccatccggcaaaaaaggagaggaacatcagcaggataaagcttacagtggcgatttctgagaggttgtcagcatctactactcctagtccatacaacaagccaagaagaacgcccaatacacccattaccagcgtagtagggtcgacaaccggaaggcccgattgtcggaagctcattacccaatttttccagaagagcgctacagcgcccctgccaaattccttgtggtgccgtatggtgcgcgtattgatcgcccagctgtactctacatcgtccgacaattgggattcgccagagcggatttgttcagctctggtctgcaattctgtggaagccagtacgtcttcgtaataattcttgccaagtacataaacacctgctggtagcgcagccgaagttgctgcaaacagcagtaaatttaaactgaacaattgaccttccaatatggatgttacactggcctgaaaccacccgacatacggaacgaattgaaaactcccgtgtacaaatactgcacgcactaattccttcaccccccggaagtcggatatttttactgcaatagccaacagtgctgaaatcagaagaagattccgcacccaccgaatgtgccggacagccctttgggactgcccgccggccacatagctgaagatcaaaaactggataggccgcaagctgaagaaaaaaagaccaaccggcaatgccagagcaaacaacttaacggtatcaaaaggcagctgttccggagttagaaacacaaaaaaatagagcaaaacaaccaaagcagagaataaggccggcagcaaactcttgaccatttggtagagaaggatggactgtggcctgaaaggtccgggaaataaaaagtgggtatcggcattgataaaaaaggtagtattttttttcactgctctgttgagcacaatgagcagcgccaccagtgccccaattcctgagacagcacttagtaccaccacaagcttatcaaaagcctcattagaaacgggatacaagctgtctatgtccggatagccactttccggtgcggtgaccatgaccacccgtctgtagataaaaaatccgaaaaacacaaccactacaagccacctccatggctttttcagagccatcttgaggttgtttttcaagatcaataaatctttaatcagcagaaccttccatggatgcttcatcgacgggggaagattgggttaatgtgaaaaagatgtcttcaagcgtgtggacctcgtttccaaagtgggttttcagttcggctggtgtaccattccacagtaaagttccggtgcgcatgatcaacaagcggtcagcaaagcgctcaactgtatccagtatatgggtagaaatcagcaaggtttttcctttttgcttttcttctgccattaacagtttgacttctctgatggcttttggatcgagcccaatgagcggttcgtcgagcataataaagtcaggattgtgaaggaatgccgtacagatgcttactttttggcgcattcctttggagagctcacggccgagtttgttgcggtgctctgtcagctcaaaccgttcgaaaagctcttcagccctgggtttccaattgttcaggccataggcctgcgcaatgaactgcatgtgttcccaggcagtcagcagagggtaaggttccggcatttccggcacataggccattcttcgcttggcttcgatagaggtgtgatcgtatccggcaatggtgatggagccggtgtcgagtcgcaggagtccggctatgcatttgatggtagtgctctttccggctccgttaggaccaatcaacccggcagtctggccgctgtcaagttcaaaactcaattccttgacggcgtattcaccttttttgaaggacttggatacttgtgataggttgagcatgagggatggattacaagtcaaaaataatggtatactgctatcaataattgtaaagttttggaatttcctggtagtcaactttaatgtttttgcaacattagttacaattattacattccatttttctagttgatttttttaaaacagttaatttctcctaatttttttctactggtatatctattatccaaaaaaataagtgaaataggatatagattactcatacttcatatttctttactgcttctcgtttcggattaaattcatgctattaataaattgtcttaaattaaaaagttgaaaaaaggtattaatttttggtatataaccccttaaggaaggctattgctatggttatttaaaaattgtgtttgacatcataacatcttaattgtttacctccgaagaagctttagtagcaccttctttgtcataccaataatctagcagtacatttttcttatgcctccaataccaaaggcaaaacaacaaaatttaaagcttaagaaaaattacttagattaaatatcttaatgcatccttaccggataaatatatcataattactctaagcacatgtatttgcatttatactgtcaaaaggtactgtactttcccaggcggttagttcttttaggtatatcgaattaaaatttaaaagtaaaaagtttttttctataacattacgtaaacctcagattataataatatttgaatgtcaacttactaacctttacagtgcttttagaaataattatttaatgactttttaaagttaaaaattttcgtttatttttgaggcagtatataaaaatactgattcatggttttaaactgatgattgaagatacaataagaatgaagcaaataaagatagttaaacaataaagccccacagaagtatgcggggcttaagagtgtgtcactcttcggcttatagccttgttgtgattcctaagcgcaaatataatataaaatttaaaattaagtaaaatgaaaattttaggacttgaccttgggaccaattctatcggttgggcaatccgtgaaactgacagggtatgccgaaaagaatattctaatttattcaaaaataatttattagacttggaaaatgaaattgtagattatggagtgattgtgtttaaaaaaggggttggtaatggtaaatcaggcgaattttcgctggctgcagaaagaagaaaaaaccgaagtaagcgaagattatacaatgctaagcgatacaggaaatgggagttacttaaagttctcattgataataatttgtgtccgcttactattgacgaattaaaactatggagtgttggggaatgggttgtagaaaacggaaaaaagcgtaataaagggagaaagtatccgatgtcggctgattttttaagatggctggcaatggattttgataaaattggaactgaatttactgacggagaaaaacttaaacccgaatttgaaaatccttatacgcttaggtgttttttgttggaaaggaaacgagatgataatcaaaagactaaatatcagataggtcgggctttgtatcaccttgctcaacgaaggggattcaagtcaagtcgcaaaagcgggatgtcaacgtacgcagaaaataaagaaattgaacaaaagaaaaatcttgattctagctacagtatttcaaagtatgcaatagaaaaaattcagtcaggaagatttcgcgcaagcggtgtaattcaaagaaaatattatgaagaggaatttttatgtatttgtaaaacacaaggattggaagaagaattaactaaaaaattgttcaatgcggtctattatgtgcgtcctttaagaagtcagaaaggattggttggtaaatgtactcttgaaaaaaataaaactcgtattccaatcagtcatcctgtttttgaggaatttagagcattggcatatataaacacgattcaatggagggtaaccggaagcaataagccctttgaaccaatacctatagaacttaaaaagaaaattcttgaacaacttttttttagaaaaaaaaggaatggtgaaattgatacaagaggttattttagatttgatgaaatcataaaagaattttctgaaaattttaaatatgagtttaattatgccaaatataaggataataatccggaactttctgaaaataaaaaaatatccgacctacttaaagcaaatccaaatattactgcttgccctgttattgcgggcttgatgaatgtattttgggaaagttggaaaaataaattcattactgatgacaataagtttggaattgattggagtggattaaagttagactatacagttaaatacggaagaaaaaaaggagagaaaagacagcttgactacgaaagtatctggcatttactctttgattatatattaacaaaagatgacattgataaactaaggatattttgtaatgatgtacttgggtggaataaagagagaatagacctattcgttgatattggcttatctcagggctatgggtcattgagcaaaaacgcaatcaagaaaataatcccttatttacaacaaggttttatctattcagaagcggtactatttgcaaatcttgaaaaagtactagggcaagaaaaatttgtctcaaataaagaagacattttaaaaactatcgccgaaacaattaaaggtgttgatatatataaagaaaaattgcacatagtaaattcacttatacaaaaatattttggtgaagttgaatttaaaaatgcaaaaggtttagatgaaacaataataaaaagtgcagaacacgaagtgataaataaattgaaagagtactttggtgaaaaaaattggaacataaaatccgaaacagaaaaaaaagaatattatgaatttgtacttgataaatacttaacctttttagatggaaaacaaaaacctgaagaaaaagcatctacacgtttaagaaggaatccagaaatagattattatttattaccccgacttgatgagtgtgtaaagaatattttatcagaaaaattttctgcatctgatgaggggttgaaacatttataccatccatcagatattgatgtatatccaaaagcaaagaataagcgcctaggcgatccggtccctccgagcaagggttggaaaaacccaatggctatgcgtacaatgcatgaattgaaaaaactgatcaattatttattagaaattggcaagattgatgaacaaacaaaaattgtagtcgaaatggcacgcgaattaaatgatgcaaatttacgttgggccataaaaacatatcaaaaacaaagagaagaagaaaataaagaatttgcaaaaattatattgggattggctcaagagaaatatcccaatttaaatgaaaatgatgttgataatattaataaagttcgcttgtggtgggagcaacttccaaatggagaagaaatttataggcaggtaaaagaattaaaagattatgtattgaaatatcggttgtggaaagaacaaaaatgccaatgtatatatacaggaaaatggattaacataacggatttatttgatggtacaaaagttcagtttgaacatacttttccattaagtgattcctttgataattctcttgcaaatcttaccgtttgtgatgcacactataatatgaatgttaagcaagatcgcattcctacacagttagaaaattacaacaaggatgccattggatattcagccattaaaccacgcctcaagaaatggtttatcaaaagagatacattgaaagaacgaattgaaaataataaagtcgaaacaaaaaaagcaattagaattggtaatattgagcgcaaaaactatctgataagggagcgtcatttgttgcagttcgaatttgattattgggataaaaagttaaaaacctttacactaaaagaaattcctaattggtggaagaatagtcaacttatcgatacacaaattattactaaatattcttctgcatatttgaaatcattgtttactaaagtagatgttgtcagagcaagacgaaattctgaagacatacaagatgggacagtaaacattttcaaaaaaatatatggaataaaaggcgatgaacaaaaagatcgaggccggcacagtcatcatgcaatagatgcagctgtactcacattaattccaagttcaacaaaacgagaggaaataataaagcaatattttaaagaaaataaatcaaaaaacaaatttcacatgctgccctatcaaaattttgatactaaccatattttgcaaatagaaaaaaatataatcgtcaatcatattgttaaagataagacactagtccgaacaaagaaaaaagttcgtaaaagaggattggttcaatatacttcggagggcaaacctatgatcatgcaaggtaatagtatacgtggacagttgcataaagaaactttttacggtgcggttttagtaccggaaagaaatgaaaatggatacatcattaaggaaaatgataaagttaaattgaaagaaaatgaagtatggatagtatataggaaaccaattcaaaatattgatattaatgaggatattattgttgatgagttactcaaaaaacatatacaaaatcaaattaataaaggtgtgaagattacagcggttaaggactttcggggtaagcttattcgacatttgagatgtagagcaaaagcaggcagaggatatttaacaaagaaaaaaacaattgagttgaaaaaaaattcaagtaatcctaaaaaattacataaacaatttgtattgacgcaaaatgaggaaaactatttgtatttattatatgaaaataacgttgattctaagaaaatatgtcgtgaagcccgtattgtcagtttatttgaaatgcaacagctattacgtgacggtatttcaataaaaaaaatttggaaggaaaatgaactaaatcaattacttggtttacctttaagggctataataaaagtaggttacaaggtaatattttatgaaaaaaacaaggaggaattgaaagaacttaaatcaaacgaattgcaaaatagagttttcattgtttataaatttaatgaaataggttcaccttatatttatttacaaaatcacattgacgcaagaatagatgacgaatttcaaaaactttcacatggaaaagatggttatactgaatttgatgtatcaaaatatcaatatcgtttaaaattaaaagcacgaaaattaaattgtgttttcgaacgaattgattttgaaattaaacctgatggtgaattaatatggaaattttaaaacatatttgttttcttaagggattaattaaacatcaaatctattgtataaaatgttaaaatgttattgtcacaatattctataaggtacttggattgttaaagtaattacttcctttcaatttttagtatttttggctcattgacattccattttttttcaagtgcactcatagttctgttgtgatttcctttcaatttttagtatttttggctcattgacattttaaaagaacatagcggcattatcgctgtgttgtgatttcctttcaatttttagtatttttggctcattgacattcaattggtagggatgatatagttgccggaagttgtgatttcctttcaatttttagtacttttggctcattgacattaatgaaggcctacatatctttgttgttcaagttgtgatttcctttcaatttttagtacttttggctcattgacattaaataaatccgaaacaggatgatgtaaatcgttgtgatttcctttcaatttttagtacttttggctcattgacattttgatggaccaggcacagagacaagcgactgttgtgatttcctttcaatttttagtacttttggctcattgacattccttcgcggaaagtaggctgcgccatgagtgttgtgatttcctttcaatttttagtacttttggctcattgacattgtttccgagaaatagtcgtacggtgtcttcgttgtgatttcctttcaatttttagtacttttggctcattgacattatgagagatttaacaaaaattaaaccatacgttgtgatttcctttcaatttttagtacttttggctcattgacattgctatattgctgctaaaagaaataatagagttgtgatttcctttcaatttttagtacttttggctcattgacattcttatcccttcagggttaaatgtgttatcggttgtgatttcctttcaatttttagtacttttggctcattgacattctatcttattgtggatgaatgccatattgggttgtgatttcctttcaatttttagtacttttggctcattgacattggagtgccgttttcatgcaactcttgaagtgttgtgatttcctttcaatttttagtacttttggctcattgacatttccctgccgtcaaacgttatattctcaagagttgtgatttcctttcaatttttagtacttttggctcattgacatttggtgctgctttatttttcccctcttttttgttgtgatttcctttcaatttttagtacttttggctcattgacatttcggctctgactttgaacttttcaatatccggttgtgatttcctttcaatttttagtacttttggctcattgacattaaaaagacatcctttctaccctgatgacttgttgtgatttcctttcaatttttagtacttttggctcattgacattaccgggttaatagcagcgcaaagcctttgagttgtgatttcctttcaatttttagtacttttggctcattgacattaaataaatccgaaacaggatgatgtaaatcgttgtgatttcctttcaatttttagtacttttggctcattgacattttgatggaccaggcacagagacaagcgactgttgtgatttcctttcaatttttagtatttttggctcattgacattcagaaagccttaccggctcgacctttctatgttgtgatttcctttcaatttttagtatttttggctcattgacattcttgtcggtttgcagctcctcaatttggctgttgtgatttcctttcaatttttagtatttttggctcattgacatttctgccgattgcgctcttgcattgcccggtgttgtgatttcctttcaatttttagtatttttggctcattgacattttgacgaagcagaagaagtaccttcgctgggttgtgatttcctttcaatttttagtatttttggctcattgacattgttttgtaggtaatttacctaaactttttcgttgtgatttcctttcaatttttagtatttttggctcattgacattaagaatgtgtttttttaggcgtcaacctaagttgtgatttcctttcaatttttagtatttttggctcattgacattccaacgctttctcacgcaaaacaatatgcggttgtgatttcctttcaatttttagtatttttggctcattgacattccgtcgcataagtcgcactggatttacaaagttgtgatttcctttcaatttttagtatttttggctcattgacattagttactggccactaaattgctggccacccgttgtgatttcctttcaatttttagtatttttggctcattgacattttctgggtactccaaactcgcaataataggttgtgatttcctttcaatttttagtatttttggctcattgacatttaatttaagcacctcgtacgcctcaatgtgttgtgatttcctttcaatttttagtatttttggctcattgacattgatggcgaatcgtatgaaattcaggacgttgttgtgatttcctttcaatttttagtatttttggctcattgacatttcttcacatctctttacgttttcgtcctagttgtgatttcctttcaatttttagtatttttggctcattgacattttgtgttccttttccacaacctcagaaacagttgtgatttcctttcaatttttagtatttttggctcattgacatttgctctggcttacgtatcagcctggacatagttgtgatttcctttcaatttttagtatttttggctcattgacattttttttctgtttttaagtgattgcttcttagttgtgatttcctttcaatttttagtatttttggctcattgacattgagcagttcaatcaggagttttggcgagatgttgtgatttcctttcaatttttagtatttttggctcattgacattcataaaaggagctttaaatgtgcttagtgtgttgtgatttcctttcaatttttagtatttttggctcattgacattaattacaaaacaaagataagcatcctttttgttgtgatttcctttcaatttttagtatttttggctcattgacattcgatgatttttactactttgtgcaggcagggttgtgatttcctttcaatttttagtatttttggctcattgacattgtaaagaaaaaggggatactgcaattattggttgtgatttcctttcaatttttagtatttttggctcattgacattactggtggacgaatagaccgcaggcagacagttgtgatttcctttcaatttttagtatttttggctcattgacattttttacgtaaagatcgtattccgactttaggttgtgatttcctttcaatttttagtatttttggctcattgacattgcctccatcagctatctgctcataggttaggttgtgatttcctttcaatttttagtatttttggctcattgacattacatggcacttgaccctattgacggcagaggttgtgatttcctttcaatttttagtatttttggctcattgacatttttgaaacgctttcgaagtaatcgttgtttgttgtgatttcctttcaatttttagtatttttggctcattgacattctccattaagcgactactacgacgacttgtgttgtgatttcctttcaatttttagtatttttggctcattgacatttctggccatctttccctgagcgctcgaaaggttgtgatttcctttcaatttttagtatttttggctcattgacatttgtgagcggcagtctaagctatcacgttgggttgtgatttcctttcaatttttagtatttttggctcattgacatttcggaaattcgtatttattaatcatggcacgttgtgatttcctttcaatttttagtatttttggctcattgacattataacactcggtactcgcttatctccatcgttgtgatttcctttcaatttttagtatttttggctcattgacattctggccacccgtattttaactgtgcgcatagttgtgatttcctttcaatttttagtatttttggctcattgacattcaccaccaaacgactccttccataaattcggttgtgatttcctttcaatttttagtatttttggctcattgacattttccagctcttttataagctgaacctcaacgttgtgatttcctttcaatttttagtatttttggctcattgacattataaagaaaaagtaaaagaagcttacgatggttgtgatttcctttcaatttttagtatttttggctcattgacatttacactgcgttgcggtaggcgtaggtgcgggttgtgatttcctttcaatttttagtatttttggctcattgacatttgcgggtgtttgctcaactggatagcaaaagttgtgatttcctttcaatttttagtatttttggctcattgacatttagaagagcctctaaagatcgcataaccaggtaaatacaacttgttgtgcaatcaaaaaacgagggtgatcaaccctcttttttttgattttatgtgattttttgcatcaaaacaactccaattccaactgaatgattcgttggtcaggtgtttttttcggctttgtttttccggtataaaactccatcatcccaaactgcttgtctgtgatctcaaacaagatgacgttgcccttttccggaattacggatttaactcgctttttgtgtacctcaaggttttcgcgactggcacagtgcctggcatagatagaatattgaatcatcataaagccgtcgaagagcaattcttttcgaaattgggcataggctttcttgtcttgtttggtttgggtgggaaggtcgaaatacacaaacaaccacataattcggtaagcgtttaagcgggttttcatattcgatttcagtgttattccaggtttggataaagtatttttttggattctcctttaaaacatgccaccagagatgatgtggtgcgttgtgagccgaccatcagggggcttttttgggaatcaattatcacatcgattgctggtatactgagcagttcttttttgtgtgctggtgtgagggtttcgggaatttggccaagtctactgacaaagtcaatgatgagcctatcgataaagggtcggtaaggttccatgatatcgtcggccaggcaataggggttgtatttgtttctgtgatatatgcctaccatgagcaagcagccgctggccaccagatttcgggcaatcacggctcttaggatggcatatccatagttgagcagattgtttgggggtggtccatgcctgtgtctggtcgttcgggtattgaggtacgtaaatattttttcccagtaaaaagaagctgccttggcctcaatgttttctttgtcgccactacttacttcagtggaccaccgctgaaggggcttgtattccaatcccaactggcgaagcagggaggcctggtttctgatttttgccgtcacggtctgtttccagagattttttttcagaggttcggaagcttcgagttgaaatcggactttttcggtgtaggtatggttatgggccatggaaagcaatagtccggatggcatgtgtttttcgtcgcaccataggacgcaggcgttattttctagcagtgaggcaatgacggattgtgtaatggtaatttgctggttttcgagcactacgataccaatgtcttcgatggggacctggtgcctggtaccctcttgcttcagctcaatgatgagctgcttgtattgctgatgcagatgggccggtttgctaaagaacaaagttttttttatcatggcaaaagttttcaacaaacggatgttcataaataatgccttctgttgcatttcagcagcttacgactttagaacctattgaaaattctgtgaaataaaagattttctttataaaccgttttgaactgaatgagagtacagaatcttaaggtgttaataagtggaaaactttaaatgcgcgcaaaatttgcgaattgcgggtggagaatatctttacattatagaaaatagaagagatgaaaaaagatccgtctttgaacatatttgaactcccactggagccatgtagcctaaagccaaaaacgggctttttcagaaatggttgttgtgataccgctccggaggatgtgggctgtcataccgtgtgtgcagtgatgacggaggagtttttgctcttttcacgaagtaggggcaatgatttactaacgcccaggcctgaatacgacttccccgggctgaagcctggagatcggtggtgtctttgtgctctgcgatggagggaagcttaccatgcgggatgtgctccgctgatcatacctacagctacgcataaggctgcacttcgatacatcgatatggaaattttggtgcaatattcattgagagacaagcagatagactcagaagattaaaagtgtaattcgtacacataggatgtgtaatctgtgttactttaggcgcctgaaataaaatgttaaaattcacaatttcaaatggcgcgtaaagaaaaacctttactctccttctggcaaatctggaatctgagcttcggattcttaggtgtacagattgggtattcccttcagaatgccaataccagcagaatactctcagctgtaggggccgatgtgcatcacttaagtctcttttggctggctgctcccttagcgggtctgatcgtgcagccaatcgttggcctgtcgagcgataagacctggacacggtttggcaggcgaataccctttatcctcggtggtgcgatggtgtcggctgtagccatgttttttatgcccaacagcgaattttatgctcatttgatgcctccggtcatctttggggcatttatgctgctgctgatggatacttcatttaacgttaccatgcagcctttcagagcattggtgagcgatatggtaccggaccggcagcgcaacctgggctacagcgttcaaagttttcttatcaatgtgggggctgtggttggaagtgttttgccggctattctcacttttattggaataagcaatgttccggcggaaggagagaaagtggctgctacagtgatttggtcgttttatatcgggggagctacgctttttctcacggtgatttggaccgctatcaatacgcgggaatacccccccaaagagtacgctgaatacaacggtatatgtgaagatagccagccaaagagtattggcaggctgatcgtgtctgcaccaaaagtgatgtatcagctggctgtgacacagtttctgagctggtttgctctttttctgatgtgggtgtataccacgcaggcgctggccgaaaatgtgtggggcacgaccgatccacagtcccgggagtttaacgaagccggcaactggaccgggatactctttgcggcctacagtgtatttgcagctgtttacagcctgctgatgccacgtctggccaatcaatacggacgactgaaggtctatgctttttcacttatcgcagggggtattggtcttatcagcatgttgctgattgcagaccggtatctgctgttgattcctatggccggtctgggtgtggcgtgggcggctattttagcaatgccctatgcaatactggcgtcgaagttgccggctcaggacaccggagtatacatgggattgttcaatgctacgatcaccattccccagattgtggccggtttgaccggtggattattactcggattggtaggagggcacgcagtgtggatgttggtagtggccggagcatcaatgactttggcgggtctggctgttccatttgtattgaaggagtagcagtacttcggcgcagcatccgtgggccgattacgattggtgcgtctcttatgtacgatattgaaatcatcgaaaagtgggattttccggctttaattgatgagattttgcgcatcattttcagggaaaaaccattgcgtattcgaatacgaaagcaaaacccgaaacgatggagttcaattccacagtttagcaccttattttgcccgaaatttttaagcaattgaaatggaaaaagctttatcaaaaattttagtgcccataggtttttcggagcaaagcttactggcattgcagcaagctgtattgtttggcaaggccatgaaagccaagttgtatttgctcagcgtactcgaagagtccagtcttttggacaggattttttcgcaagatgaagaaacggaagtaaaactgcgaaaaactctggaagagaagctggagcagctggccattgaaacgagaaacaactcggggcttgaagtcgaatacctgatttctaaaggtactgtttatgaagaaattgccaagactgtggagctgctcgatgccgacctggtggtgatgggaaccaatggccggcctagcaactttagaaaaaggtttgtgggctccaatgcttatcgtacggtgacggcagtgaaacctccggtgctggtggtaaagggggtcaataatcccaacagcgtgagcagaatcatctttccggtgatgaccgatccaaaatccagggaaaaaacgcctacagtgattcactttgcacgtctttttaaggctaaagtggtctttgtcgggctttttaccaccggtgaggagcgtgagaaactgctcccgattctcaggcagctggatcgcgtgtttgaagatgccggaatcccgcacgaaactcatctgaaacaagtcacctcgagcaacaagaagattgaagaactgcttgagttttcgtacagtcaaaacggggatatcatcgccatcaccgaagagggggaggaacctgatctggcgacacgacttttaggcactgatgtacaggaagtgttgtattactcagaaatccctgtactggccatcaccccaagaagagtaatctacggtggaatcatcggaagctgatgaattgacgaagaaaaagttacttgtaatcggggggcccacagcttctggtaagacggctttatcggtgcttcttgccagggagctgatgtgtccggtagtttcgtacgactccagacaattttataaggaaattccgatcgtgacggctcaacccggcaaggctgaactgtccgaggtgccacattatttcataggcgatcgaagcattcaccaacccttacacgctgccggatttgcggaattggcaaacggcaggttgcaggatatttttacagaatcggattattgcgtggctgtagggggtagtggtttgtatcttaaagcatggttggagggtctggatgatatcccttccactcctccgaccataagggctcaggtgaatgtcgttttccgcgaacaaggacttgaggcgctccgctcatggctaaagtctgtagatccggaattttacaaccaggtggatctcaacaatccccggcgcctgactagggcattggaggtatatctgcacacgggaaagccttattcagcatttctcagccgtagtaaaaagaggaatccgaactttacagtggtatacatcggaataaatccagacaggtctgagctccacagccgaatagctttgcgggtggagcagatggtggccaatggtttgtttgaagaagttatgccgctgtatgcattccggtacttgccgaccttgcagacggtaggttgcaaagaaatttttgacatgatggagggcaagtacagctgtgaggaatgtctggaacaaattataattcacacgcgtcaatatgcccggcgacagttgacctggtaccgtaaggtgcccggcattcattggttcgaaagcgaccctgatccgaagagtatactgaagctcattgattgaatacttgatttgatgttccgtcgggggttaaaagagctttctgacaaggtcgtctgtggtaagtccttcagcttcggcctggtaatttctcacgattctgtggcgaagtaccggtaa

SEQ ID NO: 4137 - DNA, 21742 bp, synthetic construct
  misc_feature 1..21742: note = Synthetic
  source 1..21742: mol_type = other DNA
cagggcactgcgccatcgttgtcgttgtgcatcatgagtaagggcgtttgcacttttggagccataaatacaggcgagttttcgatataatgcatgggtttgtcccacaaagtaccaccaatgcggctttgtgtttcttcgtactgaaacatgcggctcatacctgttccccaacgaattccgccgtaagcacttgtcatattactaaccggagcacctgccattgctgctgcaaacatattggtttgagttaccagataagcaatctgatatccgccccagctttgtccctgcaagccgattttctgactgttgatataaggacgtgtgttgctgagtttctgaacaccactcacaatagcgtcgtaagcactttgtccgggatagccatcgcgatatacaatgtcgggcacaaaaaccagataaccgttgctgttgtaaaacggaatgctgataatggagcgacttggttgcgggaggttgtaacgatgaatggtttcggagctgcgttcgtagaaataaaccatcatcggatatttctgcgaagggtcgaagtcttcgggtttgtaaagcaatccgcgcaaagtgtcgccggcaaacgaaacccattcgaccgactcgacggttgaccatacaaaatctttttgctggctattggtttccgaaatcactttcgaatcagtaaagttttcggtgctgtaacgtatttccggataatcttttaccgtttgcgacgaccacagatacttttcggcatttcgtgctttcgcagggttactcagagattcgtttacttccagaattttttcaggttggactgatccgggcaacaggctgaaaaaaccttcagcccaattatcttcattggtcgaggaaagtaaaagctttttattcaaatttataaagtattgttccgggtcgacagaaatatagcggaaacgttttttagcttcccgtccgttggttatgttttgagcattttctttgcctttaggatcaattttccaaatatcgaagcggtcgtacacaagcacatatttatcgtcttcggtccatccggcaatgccataagtatcgggcaggttaggagtgtcgtgcagttcgtcggtaagagaaacgcgcaattgctgagttacaggatatgttttttgagttttaatgtcggccacgaaatattgtttttcagcgtggtcgtaccaaatcagatacttacccgaagccgaaagttgcacgccgtttttttcctttagttcgaaaagagttttgccttttttcagatcgatgacagcatagtccgaaggcgaaacagtactccaagtggattgacgtaaataaggtttgcggtccgacaccagagcaatatcgccattgttgcgggcatggagttgtgtctgctcgtaagtgctgtcggctatctgaaacagttttttgtcatcggtgcgatatacagccagaaaagtttgtttcttcatgcggtttacttcttttagctgacggggctgaatcagcatatcggtatggctccacaggtcgaggcgtggtttttcatcgtcgagcaaactgtcttttggttcattaatgactttttgagctactccgaaataaagtttgctgccatcaggcgaaaaatagatacccccgttttccgatggcgacatattttgttttagtccaatggttgcgctgtcggcaatacgggtgacttttattttttttagcgcactgtaatacaaggcaaaatttttattcttagccgtgtcgcccgaaaccagccatgctaactgaagtcctttttcgtcgaaagtaattttacgaaagtgtaatgagtcttttaataaagtatcggttttagctgtttcgctatcaaatactattagcgctttcattttattgctgtcgttaagctgcgatagaaatgcaattttacccgactttgctgaaatactgaaagtatcaatcgcattgaaaatatgttttgtgcccgacacaggattcagcaccgtaagatcgtaaatatcttttttcgtttttttcttgtcctttgcagttttagtactgtcggttgcggtggtgtcgacttttggaagctcacgtttggccagaaaacttatgaagttgctattctccgcaggcaaagcaaaactttttacatcggcaaaagtgcttaactctgcttttttcaggttgaaaatccccaacttctctttgggcatattttctttctttgttttggccactttcagtttacgcaaactgtcttcgggcagacgaatacggaaagccacaaagtcggaagcggccgaaaattcaggttgatagccatgctgaatgctgtcggttttttgagttactgcattgtaaatgagtagtacaccatcacctttttgcttttttatttcataagccacaaaatttccatcgttgctgattttacggctttcaatacgtttccagttggcaaaatcagatatttgcaggcttcttttttgggaataaacagtggctgacaaaacgattgtcaggcataatgtgctgagtaaatacttcatattcaattgtgttgttgagttttagaatacatttgggtggaaatgaattttctttccgtcaaagttagtgattttaattatatttgcaattggtttagagaacagagaacaaagaccaaagaataaagacaaaagaatgataaacgcgggattagttgagaatcgttcccgaagccggaaatcttcaaatttcaaatcttcaaatcaaaactctgaaacactgaaactccaaaactttttaaactttaagcattttgacaacaaaagaacgttataaaaaaatcgttgaatggtttcatgtgaatatgcctgtggctgagacagaattgcatcacagtaatccttacgaattactggtggctgtgatattgtcggcacaatgtacagataaacgtgtaaatatgattactccggctttgttcgaagctttcccgacgcctgaggtgatggctgcaagttcgcacgaggtggttttcgaatatatacgttccatttcgtatcccaacaacaaagccaaacatttggtgggcatggctcagaagttagtcaacgattttggaggcgtggtgcccgacgatgtggatttgttgcagactttacccggagtgggacggaagactgccaatgtaattgcttcggttatttacgataaacctgccatggctgtggatacgcatgtattcagagtgtcggaacgaatcgggctaactacaaactctaaaaatcccctccagactgaacgggaactggttaaacatattcccgaagaattaattccgcgagcgcatcactggcttattttgcatggccgttacgtgtgtattgcccgcaaacccaaatgtcacgaatgtggcataagggaatggtgccggtattataaaaaacaaagcccagaatagaactccggggctttgttttgtaattatcttagaataaccctagcgggcaatctttaaatcctcaaatcttcaaaacttgtccgccgtggcggatcctcaaatcctcaaatcttcaaattcattaacacggttgaaatcgtcagagttgtgcaggttcatttgcgcacgcatcagattcaccgatttcatagcaattacttttgtttcgttcagcagattcagatacaaaatactgttacgtgtaccagtgtccttgttctttgtacgtttaatctgctttttcaccagttcgctgtacaggtcaagaatacttgcacggcgttccttaatagtatcgagaccactgtaatcgccctgttcaatcattttatcgaagtctttgtaaatgtccagaattccgtttccaagcgttttcaaatcttcaatttgttcggctgtgaaaccttcgtgggcattgtcgataaatttgaagctcgattcggtcatatagcgaagcgaaaccgatatttcgtagaagtaatccaccacctgcacataatactgtcctgtatcgagcgaattctgatcgagacgctgtatggttggcaatacttcgtaagttctgcgtcgtttctgacggccgtggaattcatcggcaaccttgtacagtttcataagttctttgcggtcttcgttaaagagtgcatcgatcatgtttttgtaaatatacatggttgtttccaccgatttttcaatctctctggtacaattaagtacaatgtcgtgttcgtccgatatttcattatcctgcacttcttcagctttctcacgttttttgtgaatacgtgtaaactgatacataaggaatgcaaccagaattattgaacctaccactgcataaattccaccatacatcagggcaaatgccacgatagcagccacagtaaaagctatgaatgctgtaaggaaccatccgctgataactgtaagtacacctgtgatacgatataccgcactttcgcgtccccatgcacggtcggcaagcgacgaacccatggctaccataaaggttacatatgtagtcgaaagcggaagtttaaggtcggtacctaccgaaatcaaaagtgccgatactgtaagatttaccgaagctctgataaggtcgaatgaagcatcgccacgttcctcagctgagagcggagtaaagcgtcgctcaataaagttcagaaccggtttcggagtaatggttttaaacagtttgctcatgtttatggcgcttcgtacaatggagcgtgaagcacccgaagagttaaagcgttcgataccttcgttctgacgcgacaggtttacttcagtttttgtaaccgagcgtgcttttttcgaaaaccacaaagccagaatcataataatacctgcaccaaacagatagcgccagtccacacttacaggtccggccagttctcccattttcagagtggtaatgtcgccacctgcagcagctactcccgaagcaatttcgtatgagctcaggccggccataaataccccgataaagtttacaaggtcgttacctgcaaaggccagtgcaagggcagaggtacccgccagaattatgattttaagaatattgactttgaaaatatgttgtaaaatagccatcaatacagtccagcccaacaaaatgtaggtcaaaaccaaccaaatgttgtcatgaatgtaattcagtgtgtctttactcataatcgtgctgtttttcaatcccttgaaaatagcaaagtatgtgatagcagtcagtgccagaccagcccaaatggctcctgcatatttgaatgtttttttgtatttgaatgagaaaatgacacgggaaatccacatgataaacgaaccgaatgcaaatgcaataaccaccgaaaccagaatacctgatataatggtaagtgctttacccgagttaatgtaatcgatcagtacaccagaatcggtttgccatatattgaaaagggctacagctacagctgctccaagcaattcgaaaacaagcgaaacagtagtggaagttggtaatccgaaggtgttgaatacgtcgagaagaataacgtcggtgaccattactgccagaaagagcatcataatttgcgggaatgtaaacattccggggtgaaaaactccgcttcgtgcaatttccatcatgccactcgaaaacagtgaaccaataagaatacccaccgaagctactgtaagtataacccacagcggagctactttcgaaccgatgctcgagttgaggaagttaaccgcatcgtttgctactccaactacaaggtcgagtgctgcaagtcctaaaagaacgattacaataatcaaataaatattatccattttttgtgtatttaatttggcgcaaaattactttatggtgctgtaatatattcctcaaaacgattaaataaatatttcaatgatgttacatttatgttacaagataattgttaccccaagcctcccgataaatcgggacagtctctaaaggggatgtgagttagtatcgtctcttaattttgaatataaaaatgtttgcagttcgctatcagagacaaaagtaacttaaatcccctttagagcctgtccgccgtggcggaggtttgccgtagttttgagtagcttgagtataagttatattgtcagtagtttgatagtgaattgtatttattgtatttttgcattttaaattcgtaattatatataatggagatacttattctttctgttctgtttcttttgaatggtttttttgcgctttcggaaattgctctggtatcgggtaaaaaagccagactcgaacaacttaaaaccaaaggtagcaagggagcccgtattgccctgaaactacaggacgaatcggaagattttctgtcggctattcaggtgggtattacattgataggtattgtgacaggggtgtacggaggtgtgaacattgccgacgatctggcgccattgtttatgaacgttgaggtgctgaaaccttatgctgctgaaattgccatgactcttacagtggtaattatcacttatgtgtccattattatcggcgagctggttcccaaaactgtggctttaagcaatcccgagcgcacagcagtgattgtagctccggttatttattatttcagcaaggctttatatcctgtggtttggtcgttgtcggcttccactgcgcttataatgaaactgatgggagttaaaaagcaaaccgagcagtttaccgagtcggaactccgccaaatgataagaatggcttcgagcgaaggggtgatcaacgagactcagaatgaaattcatgaaaatctgttcaatttctccgacaaaaaggcgcaacaccttatcacacaccgcaccgagcttgagtggatcgatatcaatatgtctctggccgatatcaaaaacagactcgaaaatattcatcacagtaaagtgatttgctgcgatggcgatcttgataactttcggggtgtattgcatctgaaagacttttacaaggctctaaacgaacagaaaaatcccaaattagataccctgatacgcgaaccgcttattttccccgaaagagtggatgcatctcgcatacttaccgaacttcgtcgcaacgaaaacaaagtgtgctttgtggtaaacgaatacggcggcctcgaaggcattattaccctctacgatattctggaaaatctggtgggcgaaattcccgaagaaggcgaaaataccgatcctgatatgtatgtgcgcgacgacgactcggtgcttgtaaacggcgatgctcctgtggaaattctcgacgatattattgaagattacgaagtcgactttagcgaaatcgattatgccacagtggcaggttttgtgctgtcgaaaatcaacaaaattccccgcgtaggcgataagtttgtattccacaaccactccttcgaagtagtggatatggacggaaaccgtatcgataaaattctggtgacaaagatttaagcatattttatcttaaaaactgacattttagtaaaagtttgcaatttggcatgaattttgataatgtaaaattcataataacccattagcaaacagactattttgaagttttatctgacatattgcccactaacgcactgccaaaggacagttacttacacattatgaaatttgtagtgagtagcactgatctgttgtcaaatctggaggcaataagcagacctgtaaataccaatagtgctctttcgatactggatgagttcctgacaggccggcaacccatgcctgcaattttcagaaaacattataaacagaaattaaattctaatgagttcaattcattactcagacttgttttcgatagtcccgacgacttaacacttagtcagtacgaaactgtaaactcacctggttatgatcagtttctcgagagtatcatcgaactggccacatggttagacactgatgtcaagtcggaaaaacctcaaaaaaacaattacagctttttctacagcggttccaccagacaattgctgcacaatctggccgtttacacagggcatgaactgtccacactattccgcgtattacgtaatacactaatacattcactttcgatatttttcggactttgctgcagctgttcgggatatatcttcgatgccatttcaggcacttcatcacaccccgttccttcatcgttgtaaatttcggttatcctccttttttgcggaagatggccatttctgtagggtaaaaatccgcatgtttttttaatagaatttataaccgccaaggcttttattagtcggttgcatttagcacagtacagttaagccggggcaaaatagcaaaacaatgaaaataaataatttatataaaatatcgaaagccaccaacgaaactgttgccatgctttcaaaacgtattcttgaagcagttgtaaaatcagacattcaggaagcggtaaacggcaaacaataccttgtacatgccgaactgagtgtgaaattcgaaaaagccgccgaaaaacagaagcggaaagagttgagcgaatcagtaaatacgtgctacgacgagcgtcgcagtttgttcaatgccatgtatgtatatgccaaaggactgtgtaatgcttctgaagccgaaatggccgatgctgcaaagcaggttttcagggcactgaatatgtacggacagtttttgagcaacctgcgacgcgatgtgcaatcgttccgttatattcgtattatcgaagcgctcaaacagcccgaactgtcggcagcactcgttaaaacacaacttgcagccagagttgaagaactggatagcgcacagcgcgaatacgaaaatcagtttagcattcgtagcaccaagcttaaagtaaaagtaacggcatcgtcgctgcgacgcgaactgaatgaagcgatcagacttcatatcgaagaactgaactggctggcactccaaaccggaagtgaagcaattcgtaaactttgcattgaagtaaatgcccgcgtagacgatttgacagtaagttcgcaaaaaaatgatactgctgacaatacggaagccgatgcgtcggaacaaacacagcaatcggcctgatttgtcgtgtgagaatgttgtgtagacgacgttttcgctgaataacgctattgaaagccccttcggacatgtttccggaggggcttttttgtgatttgtgtgtgctgtacttcgttataaaatactattatttcacgcaaagtcgcaacgagaaaccgatggtttttcttaaatgcgtttcaggaatattctgtaaagcacgggtttatatcaactttacgtgaaataaataaggcgcagaagaaaactataaatcgtttttcttttgttatcgggctgatatattgcaaaatagtcaatgctgtaacgatccgctacatttggaaaaactcaaataagtccatttaactgataatttccattttccgaaaactgttcaagtccacttatttgcttttttccatttggaaaattccactccagtgcacttaattgcttttttccattttccgaaaaccacttaagtccgcttaattgataatttccattttccgaaaaccgtttaagtccacttatttgtttttttctatttggaaaattccacttaagtccacttaattgataatttccactttccgaaaaccgtttaagtccgctaaatcgtttttttatatttttcgaaatacgctcaacttcgctatatcggttattgcagatttccgaaatgctgttaagtggggttgactacccgtgttcaatgatagaggcaaagtaaaacctttttacaaaagaaaaaaggcgagttgccccgccttaaatgttcttcaacatgtttgtgaaaataaatatattattttattgcttttaaaatttaaataatgtaattttatggcaaaatcaaaaaccccacggagtacgcggggttaaaggatacaaatccttcggcttatagccttgttgtgatttgcaagagcaaaagtaatcaaaagttttattaaacaaaatattatggcaaaatttttaggacttgaccttggcacaaactcaattggttgggctatacgtgttaatgatggctttgaaagagaggtttattttgaaaggttttttactgatagatttgaaagcctgaaacaaattcagaataaaaaagaaatagataaagataatgaaattgttgataatggagtcataatattcaaaaaaggggttggtgatggaaaatccggtgaattttcattagcagctgagagaagaaataatcgtagtaagcgtcggctttataatgctaaaaggtatagaaaatgggaactcctaaaagtactaatcgaaaatgaaatgtgtcctttgacaaaggatgagttaagactatggagtgttggatattgggaaaaatatgaagataaatggaaaaataaaggacggatatatcctgtaaacaatgaagatttccaaaattggttagcacttgacccaacaattttcggcgataaaggaacctcaataaatggaaaacctgttaggaaaaacccttatgatttacgctgtgaattaataaaacaagaagaaactaatgaatacattaaaaaactgaaaattggaagagcactttaccatttagtacaaagaagaggctttaagtccagtcgaaaaagtggaaaatcaacttttgcaacaaatgaagatattgaacaacttaaaaaagagaactcaaactttcaaatttcatttttagctaaagaaagacttgataacggagaacgctttcgagcaagtggtgtaattcaaagaaaatattttgaagatgaattttttgctatttgcaacaaacaaaatttaagtagcgcattaattgaaagcctgcataaagctatttactttgtacgtcctttacggtctcaaaaaggattagtcggaaattgcaccttagaaaaaggaagaccacgcattcctattagtcatccaaaattcgaagagttccgtgctttacaattcatcaacaatattaaatggagggaaaaagacagtaaagaatttgtcgaaattccaatcactttaaaaaagagaatttttgaagatctgttttttagaaaacttgtaggtggtaaaaataaaggcaaaattagtggagagtcttattttaacttcgaagatataatcaaaaactactcagaaaatgggacttatgagtttaattataaaaacttaccaaatgtttcaacctgcccaactattgccgcattaatgaatgtcttcaacgaagaatgggataacaaatttattcaggatgaaaataattacggtattaattgggatggtttggtacttaactacaccgtgaagtatgggaataaaaccggagcaaaaagagacttaaaggtagatgaaatctggcatttgctttttgattatatacaaaccaaagataaaatagaagacttagaaaagttctgcaaagatgttttagagtttgatgaagacaaaactaaagcattctgttcaattgatattcctcaaggatatggctctttgagctataaagctatcaataaaatattaccatttttacaaggtgggtacatatattctgaagcattgttatttgcaaatctaaaaaaggtcttgggtagcgaatttgaaaataaaaaagaagatgcaaagactattatagcaaaaactataaagaaaaccgggttaatcaaagaaagatacaatattgtcaatggcttaattcaatcttattttgccgaggcagaaaccaaccatgctaaaggtgctgatgagaaaataatagaaacagccaagaaagaaacaattgatagattaaaaaaatattatggtgaaaatgaatggaacaaaaaaccggaatcagaaaaagaattgattcaaaaagaagttttcattttatacattcgtttcttgaatggagaacaaactaaagaggaaaaagcatctgcaaaggataatcacattcctgaaatagattattataaacttcctcgtctggatgaatctatcaaacaaaatttaagaagtagttttaatattgccgaaagtaatttaaaagcactatatcatccttcggacattgaaatgtatccggtatcaagaactgaattaaaagatactaatacaaaaatattagaaagtccacagccaccatctaagggttggaaaaaccctatggcaatgcgcacattgcatgaacttcgtcatctaataaactatcttttgaaaattggcaaaatagataaagagacaaaaattgttattgagatggcaagagaactcaatgatgcaaataagcgttgggcaatacaaacctatcagagatacagagaagatgagaataaggaatttgcaaaagcaattgtgggtgttgtaaaacaaaaataccccaacttgaacgaaaatgatattgaaaatatcaacaaggttcgactatggtgggaacaagtcgaaaacaacgaagaagtatataaacagataaaatcattaaaagaagatattgagaaatatcgtctatggaaagaacaagattgtatctgcatttatactgggaaaccaattaatataactaacttgtttgatggaactcaaacacaaataatgcatacttttccagtaagtgcgtcatttgatagttcattagcaaatctaacagttggagatgcttattataataacgaaattcaaagtaataagattccaacacaattaccaaattactcaaaagatgttatcattaaagggaggacatatacagcaatagaaccacgaatagaaaagtggaaagaaaaggttatacatttcaaaaatttgatagaagaaaataaaaagcggacaaaaaaaactcaagatccgggaactaaaaaaaatctgattcagaatagacatttattgcaatttgattacgactactggaagaagaaagttgaaacatttactcttacagaaattccattacaatggaaaaatagccaattaatagacacacaaattatttcaaaatatgcacgggcatacctgaaaactgtctttgaaaaagttgacgtacaaaaagggacaaatactgataagtttaaaaaaatatatcagattaaaggtgatgaacaaaaagatagaagtaaacacagccatcatgctcaagatgctgcaattctgactttaattcccaattctgcaaagcgcgaagcaattttagaaagttactataaagcagaggaggaaaaaaggaaattccatacaaaaccatacgaaagttttaattcttctcatattcttgatattgagaaaaatgtcatcatcaatcatatatctcatgataagacattaacagaaacaataaagaacataagaaaacgaggagaaagaacaggtaaaaaagctcagggtaatagtatcagaggacaattacataaagaaaccttttttggtgccattaaagtcttagaaagaaatgaacaaggttttcctataaaagaaaatggaaaatacaaaattcttaaaaataaaatagaggaagacgaaatttggattgtatcaaaaaaaccaattaaggacataaagattgataaagatattattgtagatgacttattaaaaaaacatattcaaaaacagttggataatggtatatcattagaatctgtgacggattttaacaacaaaccaataagacatattcgaattcgtgtaaaagcaggtgttggattcttgtctaaagacaaagcaatgccaataaagacacaaacatactcttcaagacatacacacaagaatgagtatcttgttcaaaatgaagaaaattatttatttctactctatgaaggtttaaacgataaaaacaaaacaattaggcattaccggatattaaacctgtttgatattgctcagcttaaaataaaagatatcaatacaattaaaaatgaacctgaattccaaacgatcaaaaaaggtaaatttgagctgtctctaaaggttattttaaaagctggagataaagttattttctataatgaaagcagagatgaaattacccctgaaaacaccaaaaacaggttatataaattatataagttcaatgaaatgggaagtgcttttctttattttcagaatcatattgaagctcgaacagaaaaagatattgagaagacagaaagcacttttaacccatctagatatcaagcaaggttaatgctcgttcttgataagattaattgtctatttgagaataaagactttaaaatttgccctgatggaacagttgttttcatttaaataacaataaatcctctatcttttccaaagttttagagttttggaaaagatagaagaaagcaaaaaacaaatgggaaaaatttacgcccaacttgtacgtatcatattttcaatcacgccaaagggtttgagaatatctttgttcaggacgagaattatcggtttttctggagaaatacctaatttattttcgtcctgttgccgaatcactttcgttggatgttttgatatgcgtgaaaaggaaattgacggggtgacttcaagtcaccccgtcaattggacattctcttgtacaaagataagtttagcataagcaacgagtcgcactccgactaacccgaaaacagagggcttctctcgaagagacatcctctgtgtgggctctttaaaacaatatcagcaaagaaaattgattaaatctttcggtgaaacaggcatgcttacatgataataaatcgcaaagtgtaaagcttatggaactaatcaaggataatatctaccatatatacaatcagggtaataaccgtcagaaaatcttttacaacagagataactacctgttctttctgcaaaagatgaacgattatttattgccatattgtgatgtgcttgcctggtgccttatgcccaatcattttcattggatggtatatgtgcgcgaatcggagttggaaataccgacaagagagggtgtctttataaaagacgccctctctgattcgcatatcgatgatatacagcctataaaaggagcctctatagggaaaatgatgttggatgatgccgaaacagaggacgtcgtcttggcaatatatcagtttaaccgatatgtatctcttccaatccgttagctaacggattggaaaagattaatccccaaaaaaagaaacgaatatgtccaaagcaaaactaaaaaaagaactgaacaaccttaccaaagagcaattggtagaacaaattcttgatttgtacgagaaaaacaaagcggtgagggagttttacaatttttatctgaatccacgtaacgaaaaggaactggttgaaaagtataaaaaattgattcggaaagagttcaatgtagagagaccggagcgtagcagtgagaaattttctgttgctaaaaaagctatctcggattttaagaacttacaaccaacagccgaagcattagccgatgttatgctgtacttgcccgaaagtgcctgtgagttgacatattgctatggcgatttttctgagcaattttacgattcggcatataataattacaaggctgcacttgagtttatggcaaaaaataaaacactcgatgtgttcagagcccgtgccgaacaatgtgtagaatgggcatctccgtgcgggtatggttttgccgatgatatagctggcgttttttacgattattatggcgagtaatataaccataagcatctgagtgcgattctatgccgcatatacagagggcatctcccgaagatacaccctctgtgggggctctttcaaataataccagtaaagaaaatcgattaaatctttcggtgaaacaggcatgcttacatgataataaatcgcaaagtgtaaagcttatggaactaatcaaagataatatctatcatatctacaatcagggcaataaccgacagaaaatcttttacaacagagataactacggtttttttctgcaaaagatgaacgattatttattgccttattgcgatgtgcttgcatggtgccttatgccgaatcattttcattggatggtttatgtgcgcgaatcggagttggaaataccgacaagtcgtggcgcaataacaggtaaaacggaaattgacagggtgacttcgaatcgtgaggcaagtcggggtgcgatagctggaagaacggaaattgacagggtgactcgaagtcaccctgtcaatggctcgattatcaaacgtaacctgaacgacagcatagctattttacttcgttcttacacccgcgccatcaacgtgcagcaaagtcggagtggttcattattccgtcaaaaaaccaaagccgactgtattaccaacccacaggaggtgtcgccttcgtattacaatctcggatttggcactttaatttatattcccgaccccgacagggattatcctcagatttgttttaattatattcatcagaatctcgtaaaagtagggcttgtaaaaaatccttacgattgggagtattcatcttttcgcgatttatgtggactcagaaatggtaagttggtttgccgtcaacgagtggaagaatttggtttacacttgtaaactacaagtcggagcacgactttaggttgtactccgacatcttgcttttccgacaatttgtaacatcttaatccggcaatattatgataaaacgcacattgtattttggtaatccggcatatctgagtatgcgaaatgcacagttggtaattcatttacccgaagtagtgaaaaacaatgatctgcccgagaattttaagaaggaagcacaggctactatccccatcgaagatatcggagtagtgttgcttgaccacaaacaaatcactattacacaaggattgcttgaagctttgctggcaaacaatgtggcggttattacctgcgatagttcgcgaatgccgttgggattgcttatgcctctaagtagtcacacagttcagagcgaaaggtttcaggcacaaattgatgcatcggtgccattgcgcaagcaactatggcagcaaacagtacaggcaaaaatcagcaatcaggcttatgtacttgaaaattttcgtggtgtggtagtgaaaaacatgcgtgtatgggtagatgatgtgaaaagtggtgacagcgataatctcgaagcgcgtgcagctgcttattactggaaaaatgcattcccgatgattcccgattttaaacggggcagggaaggggtgccaccaaataatctattgaattatggttatgcgatattacgtgctgtagtggctcgttcgcttgtaggtagcggtttgctgcctacacttggtattcatcatcacaaccgttataatgcttattgcctggccgacgatattatggaaccttatcgaccttttgtggataaaatggttatagaaattgtagatgatattattaaacagaatcccattgctatagaagagataaatagtcgacagcttgattataatattgcagctgcacctgaaacaaacgaatacgatgaacaggcacaaagtaaaatgtcggccttcgatttgaccaaagaaataaaagcgaaacttttaaatattccggtacttgatgtaatgataaataatcagcgaagtccgttgatgatagctgtaaatcagactacagcatcattagcaaaatgctatatgggtgaaaccagaaaaatcgctttcccaacgttctgatctgagtagttagttcttatgtagatacccttttacgaaattaggtttgaaatggaacgttttagtgaatacaggattatgtgggtactggtgtttttcgacttgccaaccgaaaccaaaaaggagaagaaggcatataccgatttccgaaagaaactggtcggcgatggatttactatgtttcagttttcgatatatctgcggcattgtgccagccgtgagaatgcagaagcacatgtcaaacgtgtaaaatcatttcttcccgaagccggacaggtaggggttttgtgtattaccgataaacaattcggacaaatggaactctttcagggtaaaaaagaaaaggaaattactacaccttatcagcaactcgaactattctgatcagaaagcaaaaatcccgtcatacgacgggatttttgttttaaaacagcctgattttttgaatcaaattcatgttgtaattttcagatttttagcactttgcacataatgtgctgtttctttcggcgctaaaatacaattttgaaagcaaatcacaacagacagcagcacacaccgcgtttggcttgagctgtttctttcggcgctaaaatacaattttgaaagcaaatcacaaccatctgtcacgccattgccaagcccgccaggctgtttctttcggcgctaaaatacaattttgaaagcaaatcacaacgtttatcgatattgtaaatcctgtatctacgctgtttctttcggcgctaaaatacaattttgaaagcaaatcacaacattggaacggttgaaagcctttcagaaaaagctgtttctttcggcgctaaaatacaattttgaaagcaaatcacaactttgccaacacgtgttggaaaaatggagtgctgtttctttcggcgctaaaatacaattttgaaagcaaatcacaacattgcaacgcatcgacatcaattatgtagcgctgtttctttcggcgctaaaatacaattttgaaagcaaatcacaacagatgcacgtgatgccgctttacttgcttggctgtttctttcggcgctaaaatacaattttgaaagcaaatcacaactaacaaaaccaacatcggttttgataatgagctgtttctttcggcgctaaaatacaattttgaaagcaaatcacaacttattgattacccccccccacggacaaaaagctgtttctttcggcgctaaaatacaattttgaaagcaaatcacaactatttggaagcgttgaacttttacggtaaagctgtttctttcggcgctaaaatacaattttgaaagcaaatcacaacaaaacgttcgggcatgtgatacagaatatcgctgtttctttcggcgctaaaatacaattttgaaagcaaatcacaactgtaccttcaatcctataaaacatatctgagctgtttctttcggcgctaaaatacaattttgaaagcaaatcacaacagtactcagcgtcaaacccacacttaaagggctgtttctttcggcgctaaaatacaattttgaaagcaaatcacaactttagtattaccgaacaacttcaccaaccagctgtttctttcggcgctaaaatacaattttgaaagcaaatcacaacaagtgagctaagttcaccgtttgcaagctggctgtttctttcggcgctaaaatacaattttgaaagcaaatcacaacagggaaggaaaaacaatcccatgaacactgctgtttctttcggcgctaaaatacaattttgaaagcaaatcacaacgcttgtagagaggtatggagaaagcatattgctgtttctttcggcgctaaaatacaattttgaaagcaaatcacaaccttcgctatcgggatgacgggcaaaaacgagctgtttctttcggcgctaaaatacaattttgaaagcaaatcacaacaaaaaaagacagacttagtattcgaggaaggctgtttctttcggcgctaaaatacaattttgaaagcaaatcacaaccgtgttgtgccagtcccgtaagtcgttgtagctgtttctttcggcgctaaaatacaattttgaaagcaaatcacaacctgttccgttatcttcgggaataataatatgctgtttctttcggcgctaaaatacaattttgaaagcaaatcacaactaagttccaatcttccacattttcaacagcgctgtttctttcggcgctaaaatacaattttgaaagcaaatcacaactgttagttctggttatcgctccgcagcaggctgtttctttcggcgctaaaatacaattttgaaagcaaatcacaaccgaagtcaactttaggcacttgcgcccatgctgtttctttcggcgctaaaatacaattttgaaagcaaatcacaactatacaatcaggcaggaaaaaaagagcgcagctgtttctttcggcgctaaaatacaattttgaaagcaaatcacaacagtaggcttgtccctctatgattttctttgctgtttctttcggcgctaaaatacaattttgaaagcaaatcacaacaaatgaactggaagctaaacttaacgaggtgctgtttctttcggcgctaaaatacaattttgaaagcaaatcacaacctcataatactcatacccacctgaaataatgctgtttctttcggcgctaaaatacaattttgaaagcaaatcacaacacgcgttcctatctttgccgcgcgctctacgctgtttctttcggcgctaaaatacaattttgaaagcaaatcacaactttacgcaaggatggccgaacatgggtacggctgtttctttcggcgctaaaatacaattttgaaagcaaatcacaacaaagggctattcctgtcttgacaaagtttggctgtttctttcggcgctaaaatacaattttgaaagcaaatcacaactaatcaacaacgcaatcattggcggtgacggctgtttctttcggcgctaaaatacaattttgaaagcaaatcacaactttctaatgctgataatctttcttcaaaccgctgtttctttcggcgctaaaatacaattttgaaagcaaatcacaacagtaggacaatttactgggttaactgacagctgtttctttcggcgctaaaatacaattttgaaagcaaatcacaacttatatacaactgatcagctatttcacgaagctgtttctttcggcgctaaaatacaattttgaaagcaaatcacaacgccaaaatcagagagtagcgtttctaaatagctgtttctttcggcgctaaaatacaattttgaaagcaaatcacaactggaggtggaatttctccaatttgttttttgctgtttctttcggcgctaaaatacaattttgaaagcaaatcacaaccgtaaaaacgaagatcgtaaactcgaactgctgtttctttcggcgctaaaatacaattttgaaagcaaatcacaactattcagcacgccaatggttcaggccattggctgtttctttcggcgctaaaatacaattttgaaagcaaatcacaactttaagcccgattatgcccatattgttgcagctgtttctttcggcgctaaaatacaattttgaaagcaaatcacaactgtagccggaagcggtacagcatggagcacgctgtttctttcggcgctaaaatacaattttgaaagcaaatcacaacaggtaatcaccgtcgtttgatttgtacactgctgtttctttcggcgctaaaatacaattttgaaagcaaatcacaactgctgtaagtttcgcgcggacttttgatttgctgtttctttcggcgctaaaatacaattttgaaagcaaatcacaacttgaacccgatggcaccgaacccgaaatgcgctgtttctttcggcgctaaaatacaattttgaaagcaaatcacaaccaaatccaaacggttgcaataaggtttttgctgtttctttcggcgctaaaatacaattttgaaagcaaatcacaactatcattaagttctttccatttgtctttcagctgtttctttcggcgctaaaa

SEQ ID NO: 4138 - DNA, 20676 bp, synthetic construct
  source 1..20676: mol_type = other DNA
  misc_feature 1..20676: note = Synthetic
attattatcctacaaaaacaattgttctttacctgcttttacaggggggcagtttgagccggtatcagggggtcaatttgaaatggccgaaggggacctgattcttttggccgaagggggttagtttacgtggattttccacacacacctgcatcccaatccatgcaaacatatcgtacacttattcacgattcccgtttcacgtctcacgccctcattcccccagcaacccatccaccaggccgttaaactcctgcttaaaggcggtaaagtgttcgccagtggcggggccgctgtagccggtgaatattttgcgtacggtgccttttttatcaatgaatatggacgtggggaaggcttcaatattttgcaattgcggcagtgttttttcggttttaaggctgtccatcaccgttacgccggttaccaatatggggtactgcacgttaaaccgctgctggaaggcctgtagcgattttttgctggtttcgtaattggtggtgtactcgtaggcaaggcccaccacttcaacgccgcgctggtggttggcggcgtagtagctgcttaaaaactgtgtttcgtccatgcaattggggcaccaactgccaagtatttgcactatcactaccttgtttttataccgcgcgtcgtttatgctaacggtttggccactggtgcttttaaaactaaaattaagcttgctttcgccagccttcaatttggcaagcccgtagccgtcgggcagggcggccttcgcatccctgtgggcatgccagttttgcgtgcctgcggcacctgcgtaaaacttgccggcggcaagggtattatcgggattgataagggcggtgaacaaaaatgcatgcccaccgtcgaaggtggatagcctgagtgtgtcgccgctcactacgccttccaggtagcggtagtcgccaccggggttcaaaaaggttccggttacatggctgccctgttgggtaaactcacccaccgagatggaatccaccgatttcacgtcttcaaagctcactgcccagcggcctgtaatgttagccttaggggcggcaaaggcggtaaacctgggctggttgtattcggcaataattggcagtaactggtctttggttccgcggtggcgcacccaattgcccgttaggctgtgggcggtaaacctggccctgaatgatgactcaaaaaacggcagctgtataaacacagagtctccgttaaactgtacgctgtcaaccagcaggcgctccttggcatttagtatgtataggtgctgtttgccagcagtattggttacctcaaagttaaacaccacctgctggccgtcttgccgttgtatggcggccctccaagtacctgtggttagggactcctcttttttattggtaaaggctgatacaaaaatggcacccgcgattacaaaaaaggccacgatgtacactttaattaggaacaactgcgcattgcgcatgcttaacaagttgccaagtttcatactgttttgtttatcaagaactattaccctataaaattagtagacaaatttaagaagaaaaagttcacccgagaaaaaatattgtttggcaatttttagacttaagcagacctctaccagtacctaaccgtaggaatatcagtcgcactcaccccctatttaatcaaaagctttttaaacttttgcagttctgcaacttccacgggggttagcacttctttgtttaggtatttgccctgtaaaaacaacacgcgcttgtgggcggggtatttggccaatatttcggtaattaggttgcccgcttcctcatcatggttcgtcttttccggcacagccgccaccacggggcttttgtagcggttgggcattttaagtatggtggcctccatagtggctagccagttggtgggcatgtcggttaccttcaatgctttttggtaagccccctgcaattgctttttgctaaggcttccccgctcctcgtactggtgcataaggctttggatgaaaatagaatctgggtagtgcttgtaacaggcatctagcactttatcaataatatcgatgtcgttctttttttttaccatgggagttgttcgtgaaacgggaatcgtgaatcgtgaaacgtcaatggcggattatcaattcgtattgaaatattatttagcttttcttatctgtcaaccaacatttttttctcggcgctttctcgtcaccgcattatttgtaattcatttaccgtccattttatgttacaacgctgcgtataaagctgtttgcagcactcaatctatttcatcccaccattatattttttggttgtctataaaaaaagcctttggcaaatttagccctttatttgtggttatccgttgcttttgttaaagccaccctccccttacgcagcattttcccctttcgtctacacattgcgggtgtttgcctattagtgggctggggccgttaaaccagctgcaccatgcaccgtcagtacttgcaaataatacaattatgaaaaagcttttaaccatttccgcggcactggtttgtttggctggtgcggccgtggcacaaccgcagggtgacggcacccaccaacatgttaacggccacaggggcatgcagcacggaccagattttaagggccgccctaacttacagctaaccgaggcccagcgccagcaattaaaaaccattaacgacggttaccgccagcaagtggccgccctggaggctaacgacaagctgcccctaggcgattacaaaaaacaattggccgacctgcgcaaaaaacacgaggcacaggtgcaaagcgtttttaccgccgaacagcaaaaacaactggccgactttaaaacccagcgcgaacaaaacatgcaggtacgcggtgctgcgcatttggaaaagctgaaactgcagctggggctgaatgatgaccaagtggcaaaaattaaagcccagcatgagcagttgcgcacccaagtgaaagccctgcacgaaaacaccagcctgctgcccgaacaaaaaaaggcgcaaatgcaaaccttgctggcccaagagaaagaccaacttaaaaccgtgcttacgcccgaccaagtggccaagcttgacagcctgcaccaacagcgccccatgcacggcggcgatggcgtttggggcggctaccggggccgcatggccaaataacggcatagtggttgtaaaagagcgatagggtaaaaagcccccctgcaaatagggggctttttcgtgctgggtggtgttccccggtctgacggcccccgtcggactgggggaacgccaccggcccatcagacgggtaccgtaagatgggagaccgtcagatggggttatttcaccagtttcatgttcacggggtcccagttgatgattttcttttcaaagtagctggcgttgcaggccagggcaggtgcggcagccctaaagccaaacgtggcatcttccaccacgggggcaccgccacgaatggcatcaaaaaaatgcgtgtggtggtctaaatgctcgttgtagccagccggtgcgttaaacacaatatcgggtttgttaacagatttcttttcctcggcggtatattttgttttgtagccagctgtaaggctttcttgcatggccttggggtaggtaaacaccgcgtcgtacccgccaaagcccggggctttgggcataatgctgtggtgtacggtaaggccgccgtttttaatttcaatcaccccttcctcgcctacaaagcgggtggcctcctggccgccggtgccgctaacaaaattcacctgtagcgtaagttgaaacgccgggtgctcctggctatcggggtattgtataatgccggtcatcacgtcgggcacgtcgcggccgtctttccagtagctaagctggccgctgctgaatatggtgctgggcccttttgagcctgttataaaatgcgtgccgctcagcaggtgcacaaacaagtcgccggccacaccggtgccaaaatcgcggtagttacgccaccagaaaaacttcttggggtcaaagggtattttgttcatgccctcaatgtagcggttccagtcaacggtgtcggggccggcgtccaacggcatggtgtattcccaggcgcccaggctgctctggcggtcgtacacggcgttcaccatatttagtttgccaatttcgcccgccttcagcagttcctgcgctttggcaaaaacaatgctgctcacccgctggctgcctatctgtacaattttgttgctggccttggccgcttccactacgcccatgccctcgctaataaggtgggtcatcggtttttcgcagtacacatgcttgccttttttcagggcttctttggtaatgcgcgcatgccaatggtcggcagtggcaataatcaccgcatccacgtccttacggtccagaatctcctggtagttctgcgtggtaaatatgtcgttgccgtacatttccttggcgttttgcaggcggcctttgtacaggtcgcaggcggccaccagttgcacgccgggcactttaagggcggtggctacatccatgtggccttggatgccaaaacctatcacggccaggtttactttgtcgttggcggcaaatgccttgttgtagcgtatggtacgcgcttcggctttttcggcggcggcaaagccggccagcggtttggcagccagtaacaggctggtgctgcctatttgctgtaaaaacagcctgcgcgaacgttgtttatcttgctgcatacaatcgttgatttttatgtttggtactgttgtttggtatttgctaaagttagcagaaacggtattgttgggccaactaatttttgggaaagggggaatagtccatggtccatagccaatagtccatggcaggcaactgcggaggtaaaaactgcccggtttgtaaaatgagacaacattgcggctttgcccgaaaagggaaagggggaatggtccatcgtccatagccaatagtccatggcaagaaactgcggaggcaaaactgcccggtttgtaaaatgagacaacattgctgctttgcccgaaaagggaaagggggaatggtccatggtccatagccaatagtccatggcaagaaactgcggaggcaaaactgcccggtttgtaaaatgagacaacattgcagctttgcccgaaaaaggaaagggggaatggtccatcgtccatagccaatagtccatggcaggcaactgcggaggtaaaaactgccgatacgcaaaacggtgcaaaaaatgagacagtttgcgacacccaaagcggggtgtccgtttcccggaatgggaatgcgccgaaacctccatgcccattgcgtttgcaccctaaaacgatacactaggatgcaccccaaccacctgtctcatcccaaattgggaaaccgccaatagggcgcagatattgggtttcagcaaatacgggtttgtaaaatgcctctattttgcgtggtacaccctgcccccacccaaacccttaactaccaagggcttagggggtaaaatgagacagccgaaaacgaaaaagtatgcggttgtgttttgtagtaacccgccacctgggcatggcttgccctgcaggcccagctgcccccacgcgttttgtaaccatacccacatgcttactactattgttgcggccattgtttgcgaaggtttttaccgttaatatcgcaaaaatggcgggtatggcggcggttgtaagctattattctgggccacgatttgtccaaaggattccttcggagggggggatgtctgaaccgggatttgcccaaagggctccttcggaggggggatttttgggatggggaagatgcttgccgattgttggcaacatagcgaactataaggtttttgaaacctgataaggtttgggattggcaagacgcctgccggttgtatataacaccgatagggcgcggttaacacagccgttcggcacggcacttggattttttaagtaaaagccctgctgtgaagggaatgctatataccaccgcaacatatgcctactaagccgcccctgtacaactgttatttagcctgccgatgtattatgctgtctgcgcggaagccaccgggctgcccggctcttggccgctatcccaacgttttttatgttcggtttttcaacaccctgcacagaaggggtttaatcagcaaatccagatgcccctttggaatttctggattaacgggtgggtgccaggctattgcagcaaagcaactaattttctactgggtattgtaaagataaaaaaaactgttatattagtgaattggcacaaaaaagctccacattttttgcggagcttaagaaaatcttcggcttatagccttgttgtgatttgcagcagcaaggtaggtataaaaattaaaaaaactaaactaatgggaaatattttaggactcgacttaggaacaaattcaatcggctgggcaattagagacttagacagcgacataggagaccaaatagcccattatggggtagtgatatttaaaaaaggggttggcgaggggaaatctggcgaattttccttagccgcagaaagacgaactaaccgaagcaaacggcgtttgtataacgcaaagcgttataggaaatgggctaccttgctggcattattaaaaaatggcatgtgcccaataagtgaggaagagcttagactatggagtataggaaattggcatgacggcaaaaacaaaggacgagaatacccttcttcgcccgatttcactgcttggctggctatggattttcatagaataggcaaaagcgtcgatgtttcggtaaaactcaaacctgcttttcataatccatacgcattacgctcagcgttgcttgaaaccaaagatgaaaacgacaccctaaggctttataaaattggccgtgcattttatcatctagtacagcgaagaggatttaaaacaagtagaaagaacggaaaaagcaattatggcgacaatgaattatttaagaaatttaaagaactacaccccgataaaattacgtggaagccatcacaaatatatttgtatttacaatccaagattgaccccaaccctgaattaagaaaagagcgcataagaaacaacgcggtaattcaaagagcattaaatgaagatgagtttgatgcgatctgtgacaagcagggcattcctgacaacgtttctgctgcaattaaaaaagcaatatattttgttcgccccttacgttcgcaaaagggtttagtaggtaaatgcaccttggaaacaagcaaaacacgcatcccaataagccacccagcgtttgaggagtttagagctttagcgttcataaacaatatccaatggcgcgaaacggatactaaaaacccatacgaacccttacctattgccattaaaaagcaaattctagaacaactattttttagacgctttgaaaaagggaaaaaaaagggaaaagtagatgacggtggcagtttagcttttgtagatattataaataccttttcagagaaaggcaaatgggaattcaactttaaaaacaaaccaaacatatcaacctgcccgttaattgcaggattaatgaatgtttttgacgaagaatggactgaaaaattcgtcacagaagatgaccagtttggcattaattggactgggctatctatagcttacgatgcagtttacaacggccagattgtaaaacataaaaaactaaaccacgaagccatttggcatttattattcgactttttgcacacaaaagacgacgagcaagggctgtctacattttgccaaaaagtgttaggatgggatattgaaaaaactaccagttttttagagattggaataagccaaggctatggctctctaagccatagtgccatcttaaaaataacaccgtacttacaaaaagggtttatctattcagaagccgtactatatgcaaatttatctaaagcattaggaaaggcaacatttgaaacaaacaacccatccataatattaagcataaagaacacgatacaaaataccgataccgtaaaggaaaaactaaacatcgtaaacagcctcattcaagaatactttgcagaaaataatagcaacagggccaaaggtgtagataaccaaattaaagaaatggcattccatgaagtagaaaacaaactaaaagcatttttcggtgaaatgagctggagccgaaaaacagagattcaaagaaacagttatctagaatttgtgttggataagtatttagcatttttagatggcaaacaaagcagggaagaaaaagcatcggctggcattaacaaaaatcctgaaattgattacttcaagctacctcgtgtagacaaagctattgaagaagtgctaaaaactagatttggtgctaccgaagctgggctaaaaaagttgtaccacccctcagacatcgacatttacccaaaagcaaagaacgataggctaggtgaccccaacccgcctagtaaagcgtggaaaaacccaatggccatgcgcacgatgtacgaattacgcaaactgataaactacctattggaggctggaaaaattaatatagaaacaaaaattgtggtagaaatggcacgtgagttgaacgatgccaataaacgatgggcaattcaaacataccagcgtgatagggaagaagaaaataaagaatttgccaaggccataattggtgtggcaaaggaaaaataccctgaattaaacgaaaatgatgctgacaatattaacaaagtgaggctttggtgggaacagctagaaaatggagacgaactgtataaaaccattaaaacgcttaaggaagatattgataagtataggctttggaaggagcaaggttgccaatgcctttataccggaaaaattattcggataactgatctatttgacggcacttcttttgattttgagcatacgttaccaattagtgattcttttgacaattcgttagccaatttaacgatatgtgacgcagtttataatagaacaatcaaaaaaaaccaaataccaacccaattaaaaaactacaataatggatggggtacctaccaggctattaaaccgagaattcaaccttggattaacaaagtagaacaactaaaacagcgaattgacagaaacaaggctgatacaaaaaaggcaataagagctgcggacaacgtaagaaagaatgatttgatacaaaaaaggcatcttttggaatttgactatgattactgggataaaaaactaaaaacctttaccgttgatgaagtacccaactggtggaaaaatagccaaatggtagatactcaaattatagccaaatatgcaagagcctatttaaagtcactttttacaaaggttgatgtacaaaagggaacaattaccgcagaatttagaaagatatacggcataatgggtgacgaaaaaaaggacagaagcaaacacagccaccatgcaaaagacgcagcggtattaacgctgatacccggttcagctaaaagggaagaaattctaaaaaactattattgggctttggaaaatagacaaaattatcacgtaaaggcctatagtggctttgaaatagcccatgttttaaaaatagaagaaagtgttttgattaaccatgtaagaaaagaccaaaccctttcaccaaccaagaaaaaaatgagggaaagaggtatggtggttttcaaaaaagatgataacggtaaatttctaaaggacgaaacaggaactaaaattcccaattggattgaagggcgttcgattagagggcaacttcacgacacaacctattatggtgccattaagccagtagaaagaaatgaaaatggatatgcaaggaaagaaaacggcaaatatcttttaaagcaaaaggatggcattgacgagctttggattgtcaagaaagaactaatacaagatgcagacatagaaaacatgattgacatcccattacaaaaacacatcctaacgcaaatacaaaatggaattaaaattagcgaagtggttgactttaataataataaaataaggcatgttagatgccgcgtcagatccctgacagcaagcaaagccatctttttcaaagaacacaattttaagtccacacatttgcataaacagcaatatatagccagaaacacatctggcagtaattatttaaatatcttatacgaaggcatcaacaaaaaaaacgagctaataagggcttatagaataatcaacctttttgaattttcgcaaactggtataaccgatataaatcttctaaattctgataatgcctataacacttttacaaaaacaaaaggcagtaattctattaagctccaattaaaaaagatattaaaagttggagatagggttgttatgtggcataagaataaagaagaattgaatttattacctaaccaagaaatactaaaaagactgtatacaatcttcaaatttaacaatcagggttctgactacaattatcttcagcatcatttggaagcaaggccagacaaagatttagacgatggagacacagtgtataacccagatatttatcagccaagactcaaattaggtgccgaaaagtttaattgccttctcgagaatgacgacttcataatccttactgatggaaatattttatttcggccttaaaaaacaactccatggtaaaacgcaccctttgcattgaaaacccctgccaccttaaatgccgcaatggccaactggtggtaagctacgagcatgtaaaggggtacgaaaccgtgacggaaaaaacggtgccgattgaagacataggcatgctggtgctggagcacccacagattacccttagccattacctgttagatgcgctggtggccaacaacacaggggttattacctgcaacagcacccaccaccccagcggcatgctgctgccgttggaaggcaacaccctgcaaagcgagcggtttagggcgcaggttgatgccaccgacccccttaaaaagcagctttggcagcaaaccgtaaaagccaaaataaccaaccaggcggcggttatgcaaaaatgggggctgccgcacaagcagctaaccaccttggcccaaaacgtaaaaagcggcgatgccgacaaccacgaagcgcaggcggcggcctattactggggcaacctttttcccgcggcctggcagtttttccgccaccgggaggggccgccgcccaacaacttgctaaactacggctatgccattttgcgcgcgggcatggcccgcgccattaccggggcggggctgctgcccacgctgggcatttttcaccgcaaccgctacaacgcctactgcctggcagatgatattatggagccttaccgcccgtttaccgacgcagtggtgcgggctattgtagaccaaacaagtgcagttgacgtgctaacgcgcccccttaaagtgcagttgctaaacctgcccacggccgatgtgctgatggacggggaaaaaagcccgttgatgctggccatgcagcgtacggcggccagccttgccaaatgttacaccggcgaggggcgcaaaatactgtacccgcaaatgccatgaaagccgagagactaaacgcatacagaataatgtgggtactcgttttttttgacctgccgaccgaaacaaaaacggaacggaaaacctatgccgactttaggaagaagctgctggccgacggctttagcatgttccagtttagcatatacctgcgccactgccccagtgtggagaatgccaatgtgcatataaagcgggtaaaaaaaagcctgcccgaaaaagggcatgtgggcattatgaccattaccgacaagcagtttggcatgatggaaatatactatggcaaaaaagtggccgcaccggccaatattccgcagcaactggagctgttttgaagaaaggcaaaccacagagttacatggagttttggcacagagtgccagggagggatgaatggtaaatagtaagtggtgaacctggaaacggcaatcgtgaatgcccgcccgaattaggcaatgggcagggtgaaccgtgaatatcgccacccaactttacccgaatacaccgtgcaactctgtgccaaaactcctgtattcctctgtggtagaaatgcaaaaagcccccggttgttaccaaaccgggggctttataatacatttttttccttctattttttggcaaaacccttgctggcattatctttcagcgtttgctgttgttaccaaagatagaaagaactcaaattgaaagcaaatcacaactgcaccaggtgcaaaagcgttgaaggcgaggttgttaccaaagatagaaagaactcaaattgaaagcaaatcacaacgctacaggccaaaccccgcaggttaacccgttgttaccaaagatagaaagaactcaaattgaaagcaaatcacaacaccacatgctccgatagcgaccgtttttttgttgttaccaaagatagaaagaactcaaattgaaagcaaatcacaacagaagacacacattaaccagctcaaaggagttgttaccaaagatagaaagaactcaaattgaaagcaaatcacaacttgtaaatcttcgttcatcattttaaatttgttgttaccaaagatagaaagaactcaaattgaaagcaaatcacaaccgtacaccttgcgggctaatataatcgcgtgttgttaccaaagatagaaagaactcaaattgaaagcaaatcacaactaaatgttttttcttcttttgttttatcagttgttaccaaagatagaaagaactcaaattgaaagcaaatcacaaccttatcatcctttcaaaaaaagcaacatgagttgttaccaaagatagaaagaactcaaattgaaagcaaatcacaaccaatatcgcgcccggcaccactgaatggctgttgttaccaaagatagaaagaactcaaattgaaagcaaatcacaacctaaggttacttgttttttcattgcttcgagttgttaccaaagatagaaagaactcaaattgaaagcaaatcacaacgtgcctgcttgtatacctgagcccgttagtgttgttaccaaagatagaaagaactcaaattgaaagcaaatcacaacatccggcactagggccattgtttgggagttgttgttaccaaagatagaaagaactcaaattgaaagcaaatcacaacactaatgtagtgcggccgtctattacttgtgttgttaccaaagatagaaagaactcaaattgaaagcaaatcacaacccccgggaaccaaatagccaactggccgacgttgttaccaaagatagaaagaactcaaattgaaagcaaatcacaaccggcggtttggattattacaccgtgccagtgttgttaccaaagatagaaagaactcaaattgaaagcaaatcacaacttatgtccgtatgtgaaccaaaaacaaagcgttgttaccaaagatagaaagaactcaaattgaaagcaaatcacaacccttacggtgatgttggtgatgtgctttggttgttaccaaagatagaaagaactcaaattgaaagcaaatcacaaccaaagagccggtactcaatgtagataatagttgttaccaaagatagaaagaactcaaattgaaagcaaatcacaacccctgataataggaagcattgacaggtaaagttgttaccaaagatagaaagaactcaaattgaaagcaaatcacaacaacgctgtgtaaagaggttgatcagctggtgttgttaccaaagatagaaagaactcaaattgaaagcaaatcacaactgtgataggtagttgccgatcggcaggcctgttgttaccaaagatagaaagaactcaaattgaaagcaaatcacaacctaccgaatgtttaccagcagagcagaatagttgttaccaaagatagaaagaactcaaattgaaagcaaatcacaaccttctgtgcctgcaaaatcatttttggctagttgttaccaaagatagaaagaactcaaattgaaagcaaatcacaaccagtgaccctggttctaatatcttaatcggttgttaccaaagatagaaagaactcaaattgaaagcaaatcacaactatgacattaaacagaaggtacagtaaagagttgttaccaaagatagaaagaactcaaattgaaagcaaatcacaacgatgccttcttgtttgttggcgtagtagttgttgttaccaaagatagaaagaactcaaattgaaagcaaatcacaactacgggcggtactaaaacaaaggtttacggttgttaccaaagatagaaagaactcaaattgaaagcaaatcacaacggtctgccaaagtaacaacgcctgcagctggttgttaccaaagatagaaagaactcaaattgaaagcaaatcacaacgctacatgctatgtagtcaaacaaatcgggttgttaccaaagatagaaagaactcaaattgaaagcaaatcacaactgtggtttatactaagtttgtggctagccggttgttaccaaagatagaaagaactcaaattgaaagcaaatcacaacgccgcatagccatggatattaaaagcagcagttgttaccaaagatagaaagaactcaaattgaaagcaaatcacaacgcagttggtttgctgcattttttaacggcttttccaaccctcattacaccaagcggcagataaccacggcccaagccttacacaaaaccctacgtgcgcctcgttatgacggtaagggcagataaccacggcaccggccatgcacaaaactgggggtgcctcgttatgactggtgcatgaggcaaccccagctttgacaactttttaaaagttgtcaaagctcgctacacccggcaacagataaccacggcgcaaaccatgcacaaaaccctgcgtgcgcctcgttatggcggtaagggcagataaccacggcaccggccatgcacaaaacttggggtgcctcgttatgacgggccacgaggcagccccagcttggacaacttttggaaagttgtcaaagctcactcgccacaacccgcaacagataaccacggtgcaagccatacacaaaaccctgcgtgcgcctcgttatggcggcaagggcagataaccacggcaccggccatgcacaaaactgggggtgcctcgttatgactggtgcatgaggcaaccccagctttgacaactttttaaaagttgtcaaagctcactacacccggcaacagataaccacggcgcaaaccatgcacaaaaccctgcgtgcgcctcgttatggcggtaagggcagataaccacggcaccggccatgcacaaaacttggggtgcctcgttatgacgggaagggcagataaccacggcaccggccgtgcacaaaacttggggtgcctcgttatgacggggaggtaactacggcccagcccgcctattcttcgacaaagcatacaatagcgtattcgccgttaatatgtgttagtgatgggctttacagcgtatgaataagcgccagaaacctttgggtaaccggcgcagcgggcctgctgtaaggcaaaaaattacgcggtattgtgcttcccccgccgccatgaaataccaccgatgaactgagcgtcgcaaaagccgaccccatgaaaaacctctgccggccaccaaaaaacaacaccccaaaaaacctaccggttggcctcactcagccagtgaaactgcttttcggccagctgaaaatggcggttggttaatttcagttccacatacaggctgtcgccgcgctgcatgccccaaagccgtatggtattggtatcgggcaattggtaccggaagctgaggatggaaaggctgtcgccgggctgctttttaaaatggagcaccggcgcggcactgtcggccacataggcaaaataagaccgttggtaccggtggcggaaggcggtatcggttgtttttatgctgccggtgccgttttcaaaaataacgtcctgccagcgcagggtatcgcttagcgataacgggatgttttgtttgttaaccgcaaacaccgccacatcgtacacgccgtttttaacgggctgcttgcccgggggcgtatggtcttgctggtaataatcccaagaggtatacaacgttacacccaccgcaacggccacaaacacggtttttagcactatacgggcaatgcgcatccattttttggggtaggtaaaatggtacaggctgcacacattggcgggcttgtttaaaataaaaaagcaaatgatgcggttaccctcgttggccagcaaaaacaggcaggtaaacaccagctgcatggagaatattttaaccggtatatcgtaacacaggttaagcatcattacgtttataaacacggcagtggcaaacataatgcccatggtggccgttttacggtatagcagcaaaaggccggcaatggtttccataacgccggagaacacctggtacggtgttgcgtagccaataaacatccacgaaaggcgcatgggcaaaaagtcgcccagcggggtggccagttggtgcaggttgggaaagggcatttgcagggcaaacaactttattataccataggcaaatgccattaaagcaacatagtaccttgcaaaaaggcagagccagtagtttaaatgggtataggcggggcgtttggcgtccagcagcgtccatactaggcagccaataaaagccaggctcaaaagcgtgcacaactgggcccagccgtacgaggtgtcgccgctgccgttcatgggcaccagcacagtttttacgtgaaaaagcatggcattggccaggttaaccagccattcggccgcctggccataatagcgggtaacgtagttaacgccgggcacttcgtcaagccaggtccatggtgccatttgcagtgccaggtaaataaaaaagaagcggaagagtagttttttccaggcaggccaaacaccggcggctggctgaagggcagtttgcatataatggcagtttgataattgttggtaaaataaaccgcacccgttggcgtatgcttacaagtgctgcggttttttggtgaggctaaatataggtaaaaaactgctttgtttaagcggatacggcgggtgcaatacataaaatggtatgtacttgccggaagtacacaaggtgaatttggtataggcatttatgaccgcagcgcagggcatgcacaaagccatacttgggctttgtttgcatggctatgatgaataaacataatggccaccatgggcaaatgggttacaacagaccaagctttttagcgcgggctttttccttacggtcgtgcatcaacacattaaatatgctttttgctgcggcttcctcagttttaaaacggtgtacctgttggtgtatgggtaggctttcgggcttggagccgtacagtgctaccagtttttcaatgtaactcatggcacctcctttaatttataagcggttacaattattgcaaatttagtgtaaatatcaatggcaattaacaccctcaatcttgtttcgttatctactatctggccggtgtagcgttttgcgcctgttttgtcccaatactttaccttggcggcaagctgttgaatgcgcaggtgctttaacgggtgtgttttggggttttgcaggtgattgtccattatatgttgggcggattcaccgctccacacgataccaatttttcgcagcctaaagtttatgtagccgctgttataatattgtaccatagtattagccaaagataaccaacaccaacattggcagcaaaaaaacaacagccccccaccgttcgctttgcaacaaggcccaaaccagctacctccgccaacgcgttaaactatacggttggcaacaacaaactatttggtacggccatttaagcaagggcatgcggacccaaaacgggctgcgcgggctactaaaataagtggctcgctaaaaaaacgggtacaaaaatactaacggccatcatatacatgatgagcactaaaaatacaatgcgtttactggtaaaatagggttttacagcggcgcggtgatgcaaggcggcataacgggataaccatttgggggttgtattggcaagcatggcgataaaaattgtactccaaagctatatagatattttattccatattattaaatcgttattaaaaacatatatggtttgttaaaatatacagagtgggtaaaacggccgcgggtaaggggtagttgctatttcaaacacaagctttttggcttcatgttgttctttttgtcttggcacaaaaagaaccaaaaaagccaaggcgaatcccgatcgctccgcgcgttttcgccttccctcgcctcccctgttgtaacggcgcactattttaccttttggcttgctgcgtgatgcgttggtttcggttacgtttcggtttttggctggtgtgcttgcgcagtttattcggtcttaccgctgtgagatttggtgtgcttaatggcgggtgtaaaggctgttattacaaacagtttttggctttatattgttctttttgtcttatccgaaaggactcctttggaggcacaaaaagaaccaaaaaagccaaggcgaaacccgatcgctccgcgcgttttcgccttcccacgcctccccatgtgcaacggcgcacttttttaccttttggctggctgcgtgatacgttggtttcggttacgtttcgttttttggctggtgtgcttgcgcagtttatgcaggcttaccgctgtgagatttggtgttcaaaagccgtcgttgccaaaaccttactgcttaaatattttggcatggtgttccaccagcccttcaatgggtgttttaataatagtgcctgcctgcatgttatacctggtggcggtttcggccagcaggtctttaaacgcataccctactgagccggtgcagttaaagctgtactgggcataattggggtaatgggttaccaggttattaaaaaaatggtcaaaagcagtttgtacaatattgcgggtatagccggcatcggcccggctggtagataggaaactggtaaaccctgcgcaaaaacggttgggcaggggctgcgtgtacaggcggtccataatagcctcgcgggttaggccgtaggtatgggtaaattcatgccgtacggcggcgggcatgtagccgcgtataaaatcgcccagcagcattttgcccatgtaaaagccgctgccttcgtcgcccagcaggtggcccagggagtcgatgttatcggtaattttttggccgtcgtacaggcagctgttggtaccggtgcccagtatggcggcaaaaccggggttgttgcccagcacggcgcgggcagtgcccaaaaggtctaaccccacatacagcgcggcattgtaaaaaatggctgccagggcatcggccactatgggtaccttatcgtcaaaacagcccgagccgtaaaaatataccgcactggcagtagcagcgtttacttggctgggcaactgcgccaatatagatttttttatatactgtgttccggtggtgtaggggttgtagccttcggtatcaaagtaaaaccggctgttgtcggggccaaccatgcaccagttggtagttgtagagccactgtctgccaccaatatcatgttattgtttttttaacggtaaaccaattttatggcctgctttggcatacagccaaatgcaaatatagcagggcaccaccaaccagtaggcataatgcggggtaatgccgcgctggctggcaagccagttgtacagcagcggcaacacggcgccgccgccaatggcaataattaacaatgaggagccaatttttgtaaacctgcccagcccgttgatggccagcggccaaatggctggccacaccaacgaattggccagccccagcaacgcaataaacgccaccgacaacaggccgtttgtggatagcgcaacgcctgcaaacaacaaacctaacacgggtgatatttttaacacgttggtttgcgatatatattttggtatggccacaatgccaattaaatacccggccagcatgcatatctgcgtacaactggcaaaaaaacgggcataggatagcggtatgccctggcttacaccatattttataatggtatcgcctgctataacctccaccccaacatataaaaaaagcgtaaacacccccagcagcaggtgcggaaattgaaagatgcttgttttgtgggtgttggcgttggctacgtgttcgtcctcggcatcggtatctagctcgggtaagctggagagtagtaccagcaatgccaaaaacagcaatacggcggcaataatggcatagggcaataccacccggtgggccaggctgttaagaatggctgttttttgtgccaagggcatagttactatttgggctttaatgccatctgccccgtctaaaatggtggcgcccagcaacaacggccccaccacaccggccacaccgttgcaaatgcccataatactaatgcgcctggctgcactttgctgcgggcctaggatagttatataggggttgctggcggtttgcaaaatggccaagccggtaccctgcacaaacaggcctgttaaaaacaacgggtacgagcgca

SEQ ID NO: 4139 - DNA, 17816 bp, synthetic construct
  source 1..17816: mol_type = other DNA
  misc_feature 1..17816: note = Synthetic
tcgcccctggtggtaatcaggatcggcgggggcggtgttctcaaagaaggattctattttaccgttctccccgttttctcccagccaggtgatcacctggtcgtagcctacaatgtagccattgatggtttcggacagggaggaaaaatcggtatagagcttttgttccctttcaatggtagcattggctgtagagccgcaacaatctgtaatgagcatccgctgggtataggtaaagtataagccctgcatgatcttgcccatcacctttccaccgatgtattcaaagcgtcttacatcaaggctatcagtgggatctctggcgtagattttctggatccttgcaccggccagcgggcctgccaccgaatgaggctcaaagaggaataccacagagcccccggttggatatacaatggattgtaagaggccggccgttccgaggtagttgctaaagccactggttttatctggcaggtaattgcccggataactgatggtaaaaggtttgaaagccgcctgcggtgttttttcgcgtatgcttaatagccttaaccgggttgacagatcggctgtgttaccactgccggaagaatagtaatcgtaggtaagggcaaatgtgttcagcaggctcaggttgtcacccacaccggcatagagctgtacgctatccagtttttttgccggggaggtacctgctactattttcaggtcggtacgtgaagaggtatagaactgtacggccccattgggaaaatcaatccttgaaaggatgacctcattggtttggagcgtagtggtactcctgttggaatcggggagtacggcgtcgtaacctgcagcgcagcaactctggttcaattgcgtgggtgaataggacaacgttttttcatcatcacccgatacaatggacttgctgatcttagtattgttatttgccaggtaagtaaagttgatccgggtaccattgaccagttcaatgctgctgaggaaccaggtagatatgaaggtttctgtttccgttggtttggctgtagctaccgtcgtttccgtggtacgctcaacggtttcaaaacggtagatgatgccttcaccggtggtgatggtaaaggttgcccggaggttgttgtattctattttcaggttgtctctcgtaaaggtgcgcactttgtaagtggccgatggaccgaggatgatgaatttaccggctttaccgttgaagttgtagtaaaacatatcgggctcctggtctacgtcttccccgcaggggcggctggaagtggtactgaaaaagccatcgttaccaaagtcgtctttatgccgtttgctgcgggtaattacaccacccgtttggagcgaccatcccaggcctgtccaggaggcctcatccgaccgcctgaaaccaccggcatggtaggataatgaaagtggaagggtaaacccgtttacatcgatgctatcaagcggaatttttatttcgggaataccgctgtactcacttaccggcacctggccatactggccaaggctggcggcattgggagaagggggaatgtaggatttaacatactgcgcctgcaggatatgggcaaggcatagcagtaagaggcaaaacaaggatctcatgttaatggttgattgtttaaaaggtgtaccccatgcggaacttaaccggctccgtagcggggagtttatattgatacaggaagtcatagtatacttgcaggcggtattttttaaaggttttcattttaacaggaacaatcttagtgaggcccaggaggccagcctgtttccagtgatctattttttgtagttccctgacaactacgacaggttgctggtaatggtattcccagccgccggacagccaccagttgccttttattttataatcgaggaaggagcgcaaggagataccctgccctgttacgtctatattgttccaacccttaccccagcctattttaccaccagcgccgatgccaacgatgcttttatcattgaggcgatagcctgcactcaacgctatatcagaggtggccggaaagaggtagctggattttgtagtttgtatgttggtaccgagttctattcttttcaggaatgactttactttctggtgattgggtttgaagccgggtagggcctcccccccaccctcccgctgttgcgggacaagctctccggtggagggggaattaagcagactttcattcaatgaatttaactgggtcggagcaggcaggttattttgcaactgtgcctgcaggttgaggttgccgctgttgttggcctggaggaattggtttaaggcgtctcttgtttgcaggctgctgttggccgccatgggattggtattgccgggcaactggaatacggcgccgaggccggagtactgatcaaagaactgcctgaactgtggtattttacaaaggaggctggccagtttttgctcaaggacggaaggatcttcccatagttgcttgcaggcgtccatctgcgcctggtaatagtataggtgctttcgtagttgttgtaaaccgggcaattgccattgctgtaattgttgctgcagcatttgctgtctttcggcgagcagttgcttaacaacatctgcattgttaagcaccccttgcaattcgctgtatttggtaagcagctcttttacctgctgtgcgctttgggcagactggccaatgacgccggtcttgtccaggaattgtacggctgttgttaaggagtcgagccgcgggctatagttatttgtgaatgcgttgttgttattaccagcgctttgctgtatcctgttgctgaactgttggtatatactgtctgtgttaccaaatatcttattggcagcggcactatctttgcgggccaatttctttttcagggccttttcgctacgggcgagttgccggcaatatttttctgtttgcttcagtatgttttgctgcactttatttacgcggcccgtcaacccatcgaggagtttacccggcaggcggtacacgcgatcgtataccgatggctggctttcctgtgcatacgttgccgtgaagcataagagcagcaaacaagctatgtaataggctttggtgttcacagttagttttggttggtcactttatgttattgacacggatggtgatggatagtaccatcttatgggtgttaagaaaatattacgccctgttcttattgttattgctcataaacgcaggcaggcataggcaaacgaatccctgcggagcggtatggctccgaaaaagaaagcgttatgatataacccctgttatatcatcctgtattgatcatgcattgatcaatatacaataagctttgggggaaatatagtactgactgatggaggtccacaagtaaagcggacaaggcttgcaggacaaggcatgtgtgttggttttggttggttgttcaataatacctgtaaagattattgtgccgaaagtttagcagcagtattcaagggttaaagataatagtgaatgtgatcgtattttaaatgtacaatgttctttgcgagaatttaaacttatcaagcattaattgtaaaaattacaggtatttgggtaaaatgggaggggaatggattcctgtttctccaagtgcagcagcgtgatgaatgacagcaaagttttctccagtatagagcgttccttcagcggttatgtgccaggtgctgagggttgctggtttcaggttactggttgctggttctttaggtgtaacggcgtgattgattcccggttcttcccgtgcaacagtaatactgtcagcaggcttctccgaagagcaggaggagagttcggttgctaatcttttcttttcttcgagctttttgatccaggcttcttttgcttcacaggctttgcgttctttttctgctttgatgagttccggatatttgggtttgccgtatttatcacgcttgcgcatcatggcttcgagggatactacccttctcttcctgatcttttttggtttgggctggaagatgggattgttgggatcaactgcttttatttgttcccagtattccacgtaacatttccaaagtatctgttttacctgttcatccgtataaggattctttttcaagagtgtaaatgcttcaccggtaaaggagcggtacatccagaactggcgccagccgggtggcagggctttgtagatctgtgagccgatctttgaggcgcgggccagcaggctggcataggccatcgtccacttgaattcatcactggttttgacccgctcactggtgagggagctttgggcacgggcgtaatactgcccgtccattttatagaaggtgatgccatgcatggtgccttcaaagcggcagagtccggcgatttgttttgccatagatttggattatatgtataaatttatgcatatttattgtccgaaccaagatttgggggattaatgggatttatgggattgggaggagagaccgggcgcggttttggggctaaaagccccgtaataggccttcgaggctaaaagcctcgaagagctgcggcactaagggtttggagggcacaagtactcttccgcacagcgccaggcggcctacttgcgccagtttgaagaatagtaaagtaattgattgtaaaacagttgaacgtttacccagatgtttatgcgggagatgtgacgaggttgcgattttagtaaaatgcgcctttaatatatcgttgggttaaggttggtatagctttgctatttagtacccatttagtatccccttactatcccaggcggaggagcgggaaaggacgccatgctgtatttactaaattattatatctgaaaagtaatattgccggaccggaaagcttgtgcaactttattttacctaagtggttatacaggaaatcctttattgcattttcccgtatatccttatagggctataaaaatgctcagcggcatggaagcgtatattacttaccttttggcagacatcctggaagccgaacgtcaggggcaacccgcctccccttctatttacccggaggtggtagaagattatgcggaagatgctgagcgatggccggagagtgatcctgtttatacttttggatattattgcggattatcgccggagcaattccctcctgctcatttattgtccagccagcaaatggaaaagctgtgcgacgctttcggcaagatgatgttcacctggaacctggatacagatatcccggatgatgtgccggtcagcaaaaaatatcaactgctggtaagtacactggatattaaaacggatattaacaatagtagtctgaccacttttgagctatgcagttatgatcctccctcctgccccatgggcgaatactgcacgtgtaaggagttcctgactgatgatgccctggaaaatattgatgattatttgtatggtgagtaatgggatcttctgctgagcgccacctatcttattgaataaacaaatttagctttaaagaagtagctccgttaatcaactccggctcaagcgccacgttatggaagcgcaaccccggcagggttatcttaaaggtaactttgtcaaagaattcactgtttctttgcaccaggtatccaatggctacactgtttgaaatggccaggcgtgaaggatccgtcttcgacgaagtcccaaatgtataccgcccacaaataaaggtgttgctctctatcaaccccttaccggtggcaacgttccgcgtgtacaaaggataggcatccacatacagtgctacggaccaccatttccgttgattcatcattcgcctcatctccaccccacctgcaacagaaggtatccagctatcatacacatattgaaggccaaaagtagaataaagcgaaaggaaggtgccattccctgttagcaggccctccttcttctgaggagcaacccgtttctgctctttcagattataccaggcatccatgcgcagggcaggattggtattttttgcatagccagacttccgcacatcctcccacacgaggctggtagctgcctgcaactcaccatccggcagggattctatatctgtaatgttattcaataccagcataataaaataaggtatggctgtagtatctcctttcctgcgcctggccggtggcggggttagctgcttaatccgtaaagtgtcctgtgccgttttgagttgcagaatttcattgcctgttatgctgtacatgcttccgttttgatgatattcggttattcttatccgctcatctaacccggtggtgtaatagtctacccggcggcttaccagtggtttggaaagactgtcgcggaagggagccaacgcggtccaaatagcttttacgagcgaatcggtgttgggcacagcagccacctgtgcaagattggtaaactcaaatatgatcttgttccccgctttcaggtcaattacagcacgcaggggcagttcacctgggggaggcgtgttgaagtgtgcttccatgtttgatttagtggtctgggcatagagatcctgtgtggcgcttgccagtgcaagcaccatgatccatacaatttgtttcatatttactctttggtgatttgaacggattttaaaaaacttcgtggcggagctcctacgaaaagtgtgttttcgttgagtattatatcgtttgcagcatttttgggcgaaaaccggaaggaagacagcagtggctttttcttcaccacctgttgcgctgttatggcatcattcctgttattatccagttcattgatatgcgcaataccaaacctcggcttccttactgtttttgtcaccagcaaactgtctacagccagtggcatagcagtaagctgttggttattgctatccgttacagcagccatagccttgttggcgctaataagctctaccaccatactgtcctgcttcaccggattaccggttgtggtatgagcagcaccgggccgttttacaacagtgtttgcagactgctgtaccggagtttctggcaggatggctttttgcgtggtatcgcgacctattgttgtgctactttggttcgaaacaggcatctttttctctgataccgggggttccacttttttatcattcagccaccaccagccagccaagagtaataatacagccgcagcagccccatacagccagcccatgggcttgcgtttcttttgcttttcctttaaacgggtttctacctgctcccatacgagggcctggcggaaccggaagctatcgggcacctggcacaatttatcgagctgctcccgtatactgctatcttgctttccgggttccataagcggcattgtttttaataagcaattgttgtaatactaacctggccttgctcaactgtgatttggaagttccctcgctgatgcccagtagtgcggcaatttcgcggtgtgtcatctcttccagtacgaacaggttaaacactgttcgatagcccaccggtagttctgttatcaattgtatgatctctgcggcctccaggcgatccagcatgttatcatcgccggctatctcgggtatttcatccatggtcacctgcaaaaagctattggcgctacgcagttccatcaggcattcattgatcacaatctttttaagccaggcaaaggtggccctttcattcacataggtaaactggtgtagcgaccggaagaatttcagaaaaccgttcatgagcatttcctcggccagttcgtcggtctttacataacgcctgcataccaggaaaagccgtgcggcatattgctcgtacagggcctgctgggcagtacggttattctgttggcatttcctgagcagtgtttccagttccatgtttaggcgtggcttacgaatataaatgcaatccacgacgaaagggttgcccggaggaaaaagaagtttattataggtatgttgtcgagatttactgttcttccgtagtagtatacctgaagtttattctttatgtgtgtggaagccggagccggataacaaaaggatgagcaacctactgctattggtctgcacaggttgctcaccccaattatagtggtttttcaatattattttatttgttaatcatcaaaatcctggttgtcttccctgcgtttttgattgcgctgctgtgtagcaggttgttttttcatctatcgataaatggctaaaaaacgatgccaggaaacgcttctgtttatgcgctttgtggcataggataattttccacactgtggaggggatattttatacattaaaaaaaaccggaagccatgcttagcggctcccggttcctgtaacccggcgtattatcaccggcgttgttcataggagtattgtgtaccgcttttaagagcgggaaccggccagatggtcatcgatggcttgtcccacgatgcggcttaattcactttctttttgtgtatccatgtgaacccatactttttcaccctgcatttcacgttgctgaatttttatttcaggcagtgcatcccgtggttgatcggaatgagtggtgaagcgtatgttgctgacggtatagtaaggggaagattgatgaagggttgcatctcctgtgagttcaatagagaaacttttccctttgaacggatacttaaagttaatcctaaatgattggttcatagccatgcttttggttaataatgctgttctctcgaaaagacactattcaatgcccgtgccaatagtgacgtgcggtatgtaggaagggccactttatcattgactaccaggaggttggagggatgttatttttgcaagttgttaacaagttgacgatacgggttcccgtaaaaaagccggttggaggggggctatttttgaagtgtcaaaagaggtgggtggccatttttcttgccattcaatgacattatcaaagaaatcgtctcgcctcattaaaaaaatttaaagactggccgggacaaatggcctttaaatccgttcctataagtggggaatacccgtatccggtcaaaatgtacagtgttgttggaagtctggtgtattatttattattttatgtagtctcacatttttaacccttaacgactgcttatgctaacgcttgctaagaaaagcaggatgctgcttgctttgaaatcctacaaaaaacaatttcttaaccgcgaccttactgaattagatgaatccggtacccgtttaatgatcaacagcttcctttgtgatgtgctgggctacctccctattgaagagattaagaccgagtacatgatcaaaggcacctatgcagattatgtgatccagataggcggtatccgtcatttcctggtggaggtaaaggctttgtctttacagttatcggaaaagcacctgcgtcagaccattaattatggcgctaatgaaggtattgaatgggccttgctgaccaatggtaagcatttcgacttttataagatcctttttaataaaccgattgagtccaggaagatattttccgtagacctgaccgatgcttccaccctgaaacatgatattgagcacctgcagtacctgcataaggaagcgattatgaagaagggcctgaagcagttatggaataaatgtgaagcgcttgacccgctgaatgtggctggcattatttatagtaaggaagtggtgggtgtgctgaagaaactcatccggaataagtatggcgagaagtgcgaagaggctgatattatcaagtcgctgaacaggatcgtcctggaaaagattgatccagcactgattaaggtgcaccggagtggtaaacccgatcggaaaggtaagaaagtggcagcagtggttgaggagccattggtggaggtgccggggggtgttaataatggacaggaggcagtgctggagtgagcaataaaaagccccacgttgtgcgcggggcttaagaaattcttcggcttatagccttgttgtgatttgcgatacaataatataatttaatacttaactccccaaataagatgacaaatattttagggatagatttaggaacaaactcaattggttgggcaataagagacttaaatagcgatactgatgatcaaatcgtagattatggtgtcatcgttttcaaaaaaggagttggggaaggaaaatcgggagaattttctttagcagcagaaagaagggttaacaggagcaaacgcaggctatataatgctaaaagatatcgtaagtgggccactttattggaattgttaagaaatggaatgtgtcctattactgaagaagaattaaggctttggagtattggcaactggcagaatggaaaaaacaagggaagaatctatccaacttctccggattttaccgcttggctggcaatggattttgaacgaattggaaaaaatattgatccagatgtaaaacttaagccagcatatgctaacacctatatgttacgatcagatttaatagagaatgtcaatgaatctgatcccttaagattatataaaatcgggcgctccttttatcatttggttcagcgaagaggatttaaaaccagtaggaaaagtgggaccacttcttatgccaataatgagttgtttaagaaattcaaagaaacatatcctgataagtctgattggaaaccatctcaaatctatttatatattcaatcaggaaaagatcccgatcccgaattaagaaagaacaggatccggaacaatgcagttattcaaagaggtctaaatgaagatgagttctttagcatttgcaaaaaacaaaatatcggtcaggacttagccaacaaaatacataaagcaatttattttgtacggccattacgttctcaaaaaggattggtgggcaaatgtaccctggagaaagataaaactcggattcccctaagccatcctgcttttgaggagttcagagcattggctttcatcaataacctgcattggcgggaagcacatacaagaaaacactttgagcctattcccattagcgtaaagaaacaaattttagagcaactattctttagaagattggagaaaggcaagaataaaggtaaggtaagcgaaagtggcactttatcttttgatgacattattaacgctttttcgggaaatggcaaatgggaatttaattttaaaaataagcctattatctcaacctgtccttttattgcgggtctgatgaatctattcgacaacgaatggaaaaccaagttcattacagatgaagacaggttcggcattgattggagcggtttgtcattggcttataatctaaaatataatggtgaaattgtaaaagaaagaaagttaaactatgagggaatatggcacctgctttatgacttcatacaaacaaaagatgatgaaaaagggttagccgatttctgcaaaggggttctaggctgggacgaagaaagatcaagtaattttattgaaataactgttgaacaaggctatagctcccttagtaagaactcgattgataaaataattccgttcctacaacagggttttatttactcagaagcagtatcatttgccaatctctcaaaagtattgggtaaagaattctttcaggccaaccaaacagatattacatcaaaggttgcagcgacaattaaaaaggcagataccattaaagaaaaattgaatattgtaaacagtttaatacaggaatacttcgcagataataattcaaccagagcaaaaggcgtagatgatcacataaaggaaatggcttatgaggaagtagagaaaaaattaagtaactattttggtaaaagtaactggaatgataaaacagaggatgaaaagaaagaatattttgatttcattttgaataaatatttaaccttcctcgatggaaatcaaataaaagacgaaaaggcctcagccggaataaataagaatcccgaaattgattattacaaaatcccacgtttagatgaagctatcaaacaagtactccgggaaaagtttaatgcaactgaaattgggttaaaaaaaatgtaccatccatctgacattgatatctatccaaaagcaaagggtaaccgtttaggggatcccaatcctccaagtaagggttggaaaaatccaatggcaatgcgtacgatgtatgaattacgcaaactcgttaattatcttttagaagcgggcaagataagtagtgaaacaaagattgtaatagaaatgtcgcgggaactaaatgatgcaaacaagcgctgggcaatacaaacccatcaacgatacagagaagaagaaaacaaagaatttgctaaagcgattattggagtagccaaagacaagtatcctaatctgaatgaaaatgatgcaactaatattgataaagtaaggttatggtgggaacagttggacaatggcgaggaagtttataaaacgattaaaacactaaaggaggatgtagaaaaatatcgtctttggaaagaacaaggttgtcaatgtctttatactggaaagatcataaggttaacagatctgtttgatggaacttcgtatgattttgaacatactttacctttgagccaatcattcgataattctttagcaaacctcacaatatgcgatgccgaatataataggaaggtaaagaaaaataggatgcccactcaattacccaactatgaagttgatagcaacggatataaagcaattgcacccatgattgaaagctggatcaaaaaagtggactcacttaaggaaagaattgagaaaaataaatccgatacaaaaaaagcgataagggcaggcaatatcgaatataaaaacgatttggttaaaaaaagacatttattacaatttgatcatgactattgggataagaaagtaaaaacattcaccctaacggaaatgccaaattggtggaagaacagccaattagtagatactcaaatcatttcaaaatatgcaagggcctatttaaagagtttgttttataaagtagaggtacaaaaaggaatcatcaccgcagaatttagaaaaatatacggtatcatgggtgaagaaaagaaggacagaagcaaacatagccaccatgcaaaagacgctgccgtacttacgttaatacccggttctgccaaaaaagaagatattttaaaaagatattattcagcaattgaaaaaagagtacaatatcaagaaaagccatatccaaattatgagatgagccatgtgcaaaaaatagaacaagctattttgattaatcatgttacaaaagaccaggcactcacaaaaaccataaagaatgtcaggcaaagaggaaaaataattcttacgaaagacaaaaatggtaaaaaaataacgatggttgcccagggggatagcataagaggtcagctacacgaagaaacatttctcggcgctattaaggtccctgaaagaaacaaggacggttttgctcttaaagaaaatgggcattatttgttaaaacaaaaaaatgatcaggatgaaatttggatagtggccaggaaagctattgaaaaaataaatattgaaaaagatataattgtagatgagctcttacaaaaatatataaaaaagcaaatcgaaaacggaataaggataaatgaaattacggattttaacaacaaaataattaggcatatccgatgccgggtcaaggttggagtaggttttatgtcaaaagaaaaagctattgaactaaaaaagcattcgcatccttcaaagcatctgcataaacagtcaatacttgcaaaaaatgattcaaattacctatatctagtttacgagttacaaaaaggcaataaactgatgcgtgcagacagaattatcaatttattcgagatagcttcgcttaagtcatttgttaatttaaactcccacctcgacatttataaagagaaagaatttaatatactcctgaaaggcaaagatgaacttacattaaaatacattatacgagttggagacaggataattttttttaacgaaactaaaaatgaattaaaagatttatcgactattgaaattaattccagaatatttaaggttaataaattcaatgagcaaggtaccgcttacctatatgtgcagaatcatttggaagccaggccagatagcgaattagaggaggaggaagtaatttttaacatgactaaataccaatcaagactaaaacttaaggtaaacaaacttaattgtgttgtggaaaactatgactttaaaataaaaggagatggtaaaatagaatggcttttttaaaatcaatctttgccgcatcctttttaaataaagagttacacaataaatcgcagacctttttgtttatatatgttctaaaccaatacccatgataaagcgaacgctttatttcggtaatcctgcatacctcaaaacagccaatgaacagttggtaattgagatgcacgatagcggagagaccaaagcagcgcctatagaagatattggtattttgatacttgaccaccaacagataaccattacccaagcattactagccaaactattagccaacaatacagccgttattacctgcgaccatacccaccaccctaccggcttgatgctgaacctcgacggcaatactttgcaaagccagcatttccaggcacaactggaagcatctgcccctcttaaaaaacagctttggcaacaaaccgtggctgccaaaatacagaaccaggcagctatactggctatacaaagagaagaaaataagctgctgctaaactatgctgccaacgtaaaaagtggtgacagtgaaaaccatgaagcccaagcagccgcctattactggaaacggatcttcccggacttcctagaattcaggcgggaacggcatggtccgccgcccaataacctgctgaattatggttatgccattctccgggcgttggtagctcgtaaccttgttgcatccggtttattgcccactttcggcatccatcaccgtaatcaatataacgcttattgcctggccgatgatattatggaaccttaccggccctatgtagataaggtagtatgccatattatccgcggcaatggccggttcctggaaatgacgcccacgatgaaaaaggatctcttagccattccggccatggatgtgatcattgatgaacagaaaagtccgctcatgaatgccgtacaacgcactacggccagcctggtgaaatgttttgaaggaaaagcacgcaagctattgtatcctgtattacaatgaatatacgcttcttacgctcacccataggaggagcgggaggaggctttgaacgcctaaatgcctaccgcatcatgtgggttttagtatttttcgacctgcctaccgacaccaagaaagacaggaagaactatgccctgttccgtaaaaagatacaggccgatggcttccagatgttccagttcagcatatacctgcggcactgcagcagcagggaaaacgccgacgtgcatatcaaacgggtaaaaagcatccttccgcccaaagggcatgtaggcattatgtgtgtgaccgacaagcaattcggcatgatggaaatattccgggggcatgaattggtacaaaacccggacacagtacagcagttggagctattctgaaataacaagacatcaaaaacagcagccgtactttatcgggggatcacccgtacatgagccggggataagccggggatcaaccgtattaaaggcgcactttcataaaaatgctttacacataaaatgtccgccctcaataatctattgtaaatcaaacggacaaccggctgaagccgaccatcccacccaccaaaatcactccaacccttagtgctggcgcgacctgtcctgttccgcgagaagcatgcagttcaggcaatgtgcgagagcgtgcttgtgcctttcccttcaatcccaaaaatccaataaatcccggtccagacaaattagacctgtcattacctgtcatttcctgacatttcggtcatgcttatactgtttacagtataagcctccctaactttaccggtaaatctgataacatggcaaagcaagtcggacccatattcctcgaatgcacctgggacgaccttaccttctacaaaatggatgggaaatattatgcccgtaaaaagagccgcctcacccgcgaaaaggtgctgaaacatccccgttttgcgaagaccaggcattatgctaccctgttggcctgcgcctcaaaaattgcttcttccatttacaaagacctgccccttcactggcggcagttctggatgttccgcggttttaccggtgaagcgctcaccatgctacatgaatgcttcacagcccaggacgcctatgattacctgtgggagacttatgttgagtactgggtcctttatcaacagaaaactggcattcagctaagaaccggcaggaaggacaaaccattcaggcgcgggaaaacctacaaaacccgtttaaaacacctcaccgagaactcaaaatgccggcgctacctgaaaatactgggcaaaaaccactggaagagcagctacgaccatacagccgaccgactgcagcaggaaagaaaacgcctcgcccgccaggcgcacctggaatggattgaagaacaaaggctcaaaggacgatggaaagaacaagaggaacgatggcgcatcatgcaggcatccaataagttagtagcctgatagacaaaaatctccggaatccgctccggaatgccgcggcagccaaaagcgggataatagaattcaaaaaatacccggccaaacgggattttcaatcctataaaacggctcaaaatcacaacaggactgggttttagccaatcctgttgtgtgtagccctaagctactgataatttgaaagcaaatcacaactatgcgcttcctacggtaatatccgagcaggttgtgtgtagccctaagctactgataatttgaaagcaaatcacaacctgactatctcctgttttacgatgaatggcgttgtgtgtagccctaagctactgataatttgaaagcaaatcacaacacggcacgccctacataaatcggtatgtcagttgtgtgtagccctaagctactgataatttgaaagcaaatcacaacacgaagagtattataactcctgcaaaagaagttgtgtgtagccctaagctactgataatttgaaagcaaatcacaaccacaaggcacgctggtgccaacagtgatcgggttgtgtgtagccctaagctactgataatttgaaagcaaatcacaactgatctgcctttggctccccaggccgtcacgttgtgtgtagccctaagctactgataatttgaaagcaaatcacaacatcaggaggtggacaagctctgacccttgagttgtgtgtagccctaagctactgataatttgaaagcaaatcacaactggtcaagcgacatctgctcacttattagggttgtgtgtagccctaagctactgataatttgaaagcaaatcacaacagggataattgcggaaagaaatagaatatagttgtgtgtagccctaagctactgataatttgaaagcaaatcacaaccgtccacaccctgcccaggctgattttatggttgtgtgtagccctaagctactgataatttgaaagcaaatcacaacccctggtagatgacaactgatcaccattaggttgtgtgtagccctaagtgtaaattcttggcatgttgacccatcattcctcgatgttgacccacccctgatggtaggcaataaaagaaagagcttgatgcgtgttaaaaatacaaagggttattgattggcttttgatttttttc

SEQ ID NO: 4140 - DNA, 13923 bp, synthetic construct
  variation 2456..2459: note = note, n is a, c, g, or t
  variation 4870: note = note, n is a, c, g, or t
  source 1..13923: mol_type = other DNA
  variation 6453: note = note, n is a, c, g, or t
  variation 2088: note = note, n is a, c, g, or t
  variation 4669: note = note, n is a, c, g, or t
  variation 2453: note = note, n is a, c, g, or t
  variation 6365: note = note, n is a, c, g, or t
  variation 3066: note = note, n is a, c, g, or t
  variation 4654: note = note, n is a, c, g, or t
  variation 4129: note = note, n is a, c, g, or t
  variation 5866: note = note, n is a, c, g, or t
  variation 6783: note = note, n is a, c, g, or t
  variation 2974..2975: note = note, n is a, c, g, or t
  variation 4519: note = note, n is a, c, g, or t
  variation 6555: note = note, n is a, c, g, or t
  misc_feature 1..13923: note = Synthetic
  variation 5521: note = note, n is a, c, g, or t
  variation 5047: note = note, n is a, c, g, or t
atacacatcaggcgcagcaagttaccagaccctgccgagacgggtaatgccggcagttttttcaaaaaccccactattcccacgcttcagtttgaacaattgcaacaatcattccccacaattgttggctatcctgcgggtgcaggccaaacgaaagttgccgccggttggctgatagagcaatgcggctggaaaggttaccggaaaggcgatgcgggctgtcatgcacggcaagcgctcgtattggtgaattacggtaatgccacaggcgctgaaatagtgcaactttcaaccgatatcatcaacagtgtgcaagaggaattcggtattcaccttgaacgggaagtgaacctggtttaatgattcacaggtgtttgcgctgctgttgaatcccttacaggcgctatggaactgatgtagatatccatcacctgcccctgcctgatcttattgggtactttttgtcctgttggccccagcacatcagacaaaaccgtgggcgactgctttactataaaagctgctgctgaatctttgacggcatcggtagcaacaatagaaccaatgttcacattcaccgtagcgaggtaagtacgcgcttccagcaaggtcatgcctaccaggtcgggcacaggaatatcgctgccgcctacaccgcttcccagtacaaagctaatggtactgcccaacggtatcttggttccggctgttatctgggcgccgttgtaatactgttccaacacagagttacgcgctatatcaggcttgtaggtcacttcacccagtttcaatcccaggctgcgcaggtacatttccgcgcttctgatggaaaagcctgccatattgggcatttctacctgcggtggaatgctgcggttgacggtaagataaacagcgcggccggatttcacggtagcgtctgcctcgggagattggcggatcaccgcttgtttgggaatgctatcgatatacaatgaatcctgtatcactacatcaaatcctttggcttgcagtatctgttgggcggccagcacgttttgtcctgttaccgatggcactttctccactttcccatagcccgtaagccatcctaatgaactgaaaaaaaggatcagtaatacaacgaggataccgatcgctgcgagtatgtttacccaaatggattttccagtaattcttttaaccaggttgctcatgcttacttattaattaaggacttcatctatcaatgcagaataaaaatctttcaggttccatcccatggtcttcacctgttgaggaatgatgctggcttcactttgtcccggaaccgtattcacttccagcatatagggttgtccctgtgcttcgttgtaaataaaatcgatgcgtaccacaccgcggcagttcaacacctcatacacttttttagcggccgcttccagttttgttttcatcgcatcatcaataagcgcaggtgttgtttcaacgcttttgccctggtacttcgcttcaaaatcgaagaactcgttttgcgtgctcacttccgtaataggcagtaccatgatctttcctttcgacttgaatacaccgatcgtgaactcgcgtccgctgatatattcttctaccagcacctggtcatcttcccggaaagccttatgcagcgcagcttccagctcagccgccacactcactttactcataccgatgctgctgccgccgttgttgggtttcacgaacacaggtagttttaatgccgtcagtatggcttcgggggatacgggtgtatgcctgaaaatatgtttggagtgtgcaacatgtatgccaccgaatgctgcaacagccactgtatatcttttgttgaaagtaagcgctgaagtagccgcatcgcaactggtataaggcaacccaagcatatcgaaatatccctgcaacttgccatcttctcccggcgtaccgtgaatgcaaagcaatatcgcatcgaaattgatcttcttgccgctatcaataactgagaaatcgtcgcggttgactttcgatttttctccctgcacaggttcataccaccagccggtggcattgatatcgatccggtacacatcgaaccgntccctgtctacattgttgccaacggtaatagcgcttttataactgatctgtgcttcgttgctcaagcctcctgttaccagggctatcttttttttcatttccttgtttttaacgtcatcccgagtgcaaccgggggatctcactgaaggttcggcagatccttcgactcgcttcgcacgctcaggatgacgaacatgtaggcaaatatagggatgaggatgataaaaaaaggtgaagaaactccccgtctcttcacctcacgttggcaggaaatatcacccgccgttacaagttgttgtctctttgaatggcaacaattaattaggactaagctaagtaaatccacgcgcttttgcaagtatttnccnnnnaaagtttagcacaggcgcctgtgcattagatgtgcattttttccttcttggccagcagttcgtctactgtttcgcggtacatttcatcaggtacacagcagtcaaccggacatacggctgcacactggggttcttcatggaaaccctggcattcggtgcatttattgggagttatatagtaagtatctacgctgatgggttcaaaacgcttatcagcttctacaaccgagccgtccatcagggtaaattcgcctttaacagtggttccatcggcaatggcccattccaccccaccctcgtagattgcgttattcggacattcgggctcacaggcgccgcagttgatacattcttctgttattttgattgccatacaaaaaaagagtttgttggattagtgattttacatttgcagttccaaaaatacggttgacaaatgactttacaagaacgaattcagctgatggccagattgggtgtctacatgcagggaacggatgccggatgggagaacnncaaagcaagggcttaccgcgaaaatgcctggttcatcccggaattcatcaaccggtcggtcgatagtatctgtacccggttcttacaggcncccctgctggaggcttgggtgggatcatataacctgccggatacgcctgcaaaagtgcaaacagtaggattggtcatggcaggtaatattcccctggtaggctttcatgattttctctgcgttttcctgagcggccattctgtattgatcaaagcttcttctaaggacgaagtcctgatcaggcacctggtggaacagctcagtcaatgggagccgtctgtagccgaaagggtagcttttgccgagcagttaaagggttgcgacgcttatatcgctacgggcagcaacaattcgggacgttatttcgaatattatttcggtaaatatccgcatatcatccgtcgcaaccggacttccgtagccgtattggacggttctgaaaccaggaccgaactggaagcgctggcagaagatatacagctgtatttcggactcggatgccggaacatcacgcaattgtatgtaccggaaaaatatgatttcattcccctgctgaccactttaaaaaaatatgaatattttcttgacttccataagtacaagcacaattacgattaccacctggcgctgctcatcatgggcaataagtattatatgaacaatgattccgtcattttgactgaaaacacctctcctttctcgccagtaagccaggtgcattaccagtattacaacgatgcggcagccgtatgggaccggttaaaaaataacaacgatatccaatgtgtggtagggcatggcgcccttgcttttggcgaagcgcaacgcccttccctgggcgattatgccgatggtgtagataccctccggttcttaacggcgctgtaaaatttgctaactttaatcaccggatctacgaggatcgccgtaaaacatttgttaaatgcgttgaccggtgtactgacaattaaacagctttgtttatttgctatccaataggcatatcatttgacgtacctgaattaatttaaagaccatgaacatgaattttaaaagcattttagccgttgtagccatcagtgcaggcactgctgttgctagtgtttggggatatggtaaatangtggaacaccagcatgcaggcgtacaggaggctggcaaattacctgtgaactatgcaggctttttcggaaatggcagtaataatggcgccatcgtagactttacgcctgcggctaccacaggcacacccgccgttgtgcatatcaaaacaaaaacaaaggcccggcaggtgaacaataacaaccgcaaacagcgtaatcctttctccgatctgtttggtgatgatctgggtgatttctttggaggtcccagggtgatacccgagcagctggccagcggtagcggtgtgttgattacggatgatggttatatcgtaaccaataaccacgtgatcgacggagccgatgagatcaatgtaacccttgccaataaaaaatcttataaagcttcngtgatcggcgccgaccccagcagcgatctggccgttatcaaaatcgaagggaagggattcccttacctggtatatggtaatagcgacgaattgaaactgggtcagtgggtactggctatcggttatccgcttacnctcgatgttacggtnacagccggtattgtaagcgccaaatcaaggtccatcggcatcaatggccgtcaaagccaaacaccggtggagtcatttatccagaccgatgcggccgttaatcccggcaacagtggtggcgcactcatcaataccgctggtgaattggtgggcatcaactcggccatcgcttctcctacgggttcttatgcaggatattcntatgctattccagtaaacattgtgaagaagatcgtgaccgatatcgtgaaattcggcactgtacagcgcgcttatatcggcatccaatatgctccgctagaaaatatgagtgatgatgacaagcggcagttggaaaaagagctgggtgtttcactgagagaaggcgaaggcgtgtangctactgcaattccggcaggaggcgctgcagcaatagcgggactgaaaaaaggcgatatcgttaccaagatcaatggcgttccggttaccaatggtccggaactgcaggagcaggtagcgcgttacaaacccggcgacaagatcaacatcacctacaagcgcgggggcaaggaaaatactgccagtgttaccttgaagaacaaggccggcaatacggatgtggtgaagaatagcagcctcatagaaaaactgggtggcacgctggaaaacctcgataagaaagtggcgcaggccaatgaaatagcgggcggcgtactggtgaaaaaagtaggcgatggtatcctgaaaaaaagcaggatgcaggacggatttgtgatcacaggtgtgaacggaaaagaagtgaagaacctcgatgaattgaaagaactgttgtccgtatacaagggcagcaatatacgcctcgatggcttctancctggctttgaaggctcatatacttatcctttgaacctgggagacgataattaaattgattgcatttcccttttattgaaaagcggttgttcttttggaacagccgcttttcttttggtgtcatgaccaccgcagtctctttcttaaattatgccagtgacaattgtttacccccgagcgtaacggagaaatgtatctctgcttgcagtgcctggaatatcctaagaatggtgtcgatggtagcgctgttggcgttgttttccagcttggatatttgtgctttctgaacacctaccagttctcccaattgttcctgcgtaagattgcgctctttcctcgcttttntgatcatgctgcttagtacagccatgttgagtttgtgctcgaaagctcccctggctttggtgccacgtttgcctacgtgcttgtctatcatctcggacaggctatacgatttcatttttgttttttccatatcgaatactctttaggtatttttttcttcgaaataattttccctgatgcgcaaggcccttgcaatctcattagctggcactttatctactttctttataaagccatgcgttgccagtaccaacgtgttattggcatctgttttatcccaaaatgccagcagcctgacttgttgcaacgcatacctcacacgtatttcccaaatatcgttgtgaagttttttaaacaaccgtggatcgttagattgctcagctaatgctatattatacaatagcttgtttatgatcttcggattcaacccattgataaaagaagatgcctcctctaaaaacctcgtttcaaaatacctcacagtttagattttacaaanttaaacaatagtttccatatttagaaacttattttctttcctttccccatcctgtgttcggtacgattgtaattaacagaaaaaatanccgttaacgcaaactcctgcacaaatcaggtataaaccgcaaatctgtatatttaaaccttaatcactttttatgcgattcgtgtatgttgttttatttgcntttgtattattaacagcttctttaaactccaaggctgcagcgatcattttgcctggaatgcagctttctgctagcattaaaacgggggctgatcaaacagaaaaatatttgccttatctgaaaggaaaacgagtaggcatactggcaaaccctacatctgtcatcggtaagcacaatgttcacctggtagacagcttattgaagttgggcattcacattgtgaaagtntttggtccggagcatggctttcgcggcaatgccagtgctggcgcccatgtggccgatgaagtagattccgctacgggtataccgctgatctctttgtatggatctggcaaaagcaaacccagcaaagccgatatggccgatatagacatcatggtatatgacctgcaggatgtcggctgccgtttttacaccaatatcaatgcattggccaggctgatggaagcctgtgcagaaaacaataaagagttgctcatactggacaggcccaaccccaatggctacctgatagacggccccatactcgatatgaaactgaaatcgggcatcggcatgttccccattcctatcgcgcatgggttaaccatcggcgaatttgcgcaaatggtgaatggagaaggctggttgcccaatcatttgcaatgcaagatccgcatcatacctgtggccaattacaaccacaatatggaatatactttacctgtaaaaccatctcccaatctcaatacacaacaatcgatactactttaccccactttatgcctgtttgaaggaacagtgatcagccagggaaggggcacttattttcctttcgccgtattgggtaaccctgatttgaaagggtattctttttctttcacccccaccagcatcaagggaatggcggaaacacctttacacatgaacaacacctgttatgggctcgacctgcgcaaatatgatgttgctgcattacgtaaaagcaagcagctgcatattgaatggatgattgaaatgtacaaagcctacccccacaaagaaaaattcttcgattataagcagagtaaggagatgggtaatattgataagctggctggtaccactgtttttaaagaacagatcattgccgggttgtccaccgatgaaattcgcaaaacctgggagccggggttggaggcttataaggagatgcggaagaagtatttattgtacccataaacttgttagaaccagcagtaattaaaagggagcgatgcttgagcctaagcgttgcgcccttttaattacattatttttatttattaaaaaaaggtttaaattagctaacaagttacttacctcccccaatgtaaccgaggcgcaacatccatatgtcctaaaaaaagaaagccccacagaagtatgcggggcaatagagtaatcactcttcggcttatagccttgttgtgatttgcaaagcaaacataccagtaaaaaagaattaaatcaaaatatatggcgaaaattttagggcttgatcttggaacaaactccattggttggtgtattcgtgaaactgaactatttgaaagagaagagtatagcaaattgttttcgaaaaatattactgattttcaaaatgagatcattgactatggggtagtgatatttaaaaaaggagttggagaaggaaaatcaggcgaattttcgctggctgctgagcgaaggaaaaacaggagcaagcgtcggctttataatgcaaaacgatatagaaaatgggaacttttaaaagttctagtagaaaataaaatgtgccctctaacactggaggaacttcgactgtggagtattgggaactggaaggaagttggagggaagaaaaaaaatgtgggcagggtttatccattgggaaatgaatattttcaaaaatggctggcattggatccatttttttttgggcaaaaaggcacatcagacaacatgaaaccaatacgaaagaccccatatgatctacgttatgaactaattgacattgaagaacaaaatgaggatataaaaaagcaaaaattaggcagagctttgtatcacttcgcccaaaggcgagggttcaaatcaagcagaaaaaacgggaagtccaggtatgctgaaaattctgaactagaaaagataaagtctgggaacccaaattttcatattgccactttagctaaagaaaaaatagataacaggaaaagatttagagcaagtggtgttattcaaagaaaatattttgaagatgaattttacgccatctgccataaacagaacattgatattgagttaacaaataaactgcataaagccatttacttcgtcagaccgttccgatcccaaaagggattagtaggtaattgcactttggaaaaaggcaaaacaagaatacctgtaagccatccaaaatatgaggagtttagggcgttgcaatttatcaacaatatcaaatggcgggagaaagggatatcgacttttgatcccatccctttgttattaaaaaagaaaattttcaaggaattgtttttcagaagattagaaagtggcaaaaacaaaggaaaggtacatacagaaaactatttcaaatttgacgaaatcattgataaatattctgaaaatggaaagtatgaattcaactacaaaaacaaacctaatatatcggcttgccctacaattgcagctttgatgaatgtgtttgataatgaatggcaaaacaaatttattgaagaagaaaatagttatggaataaattgggacgggttatttatagattatattgtcaaatatgggagaaaaaatggacaaccccgttctttaaaggtaaatgagatatggcaccttttgtttgattatattcaaacaaaagataagcaagaagaattaaaggcgttctgtaaaaacgtacttggatttaatgatgataaatcaaattcattttcaaatattgacattttacaaggttatggctcattaagccataacgctgtttgtaaaattatgcctttcttacaaaatggatacatttattccgatacggtttcctttgccaatctcaaaaaagtgctaggtccaacatttgaaaggaataaagaaaaagcaaaaaaaataatcgctacaactattaaggaaaccagtgaaacaaaagaaaaactagctattgtaaacagtcttattcaacaattcttttccaataataatgcaatacgggcaaaaggactagataatcatattaaatcggtggcagctcaggatacaacaaataaactacaaagttattttagagaatctcattgggctaacaataccgaatcagatcgagaaaactttaaaaatgaaatactaaatctctatttaaagtttttggatgggaaacaaaacaaggaagataaggcatcctcatgtgcaaataagaatcctgaaatcgattattacaaaatacctcgtttagatgagactattaaacaaaatctgaaaaatgaatttaatttatcggattttgctttaaaacatttataccatccatcggatatagacatgtacccaatgtcaaaacgagaaataaatacccgcgtcaacggtgtagaacaatacgtaaagcaattggaaagtccacaacctccatccaaaggatggaaaaacccaatggctatgcggacgttacaggaattacgacatctgttaaactacttgttgaaagtcggtaaaatcgcccctaaaactaaaatcgtagtggaaatggctagagagttaaatgactcgaataaacggtgggcgattcaaacttatcaaaaaggcagggagatagaaaacaaagaatttgctaaagctattgttggggtagcaaaagaaaaataccccaatcttgatgaaaataatattgaaaatatcaacaaagtaagactttggtgggaacagattgaaaaaaatgaagcggtttatacgcagattaaagatttgagggaggacgttcagaaatatcgtctttggaaagaacaagagtgcgtttgcatgtatactggtgagatgataagtctgaccgatttatttgatggatctcaaactcattttgaacacacgctacctatcagtagttcattcgacaactcattaactaatttcacaatatgcaaaggatactataatacaaatatcaaaagagataagattccaacacaattagataattattcaaaagatgctaatggttataccgccattgaatctcgattaaacaaatggaaagaaaaggtagaacatctgaaaaatcttatcgaaactaacaaagtaaaaacaaaaaaaatacaagacccggaaaccaaaagaaatttaattcgagagagacatttactacaatttaaccatgactattggaaaaagaaattagatacgtttactgtaaaagaagtccccgcctcatggaaaaacagccagttagtggacactcaaatcatttcaaaatatgcacgggcttacctgaaaactgtttttgaaaaagtagatgtacaaaaggcatctattgtgattgattttaaaaaaatctatcgaatacacggtaatggaacaaaagatcggagcaaacacaaccaccatgccgaagatgcagccacattaacacttatcccaggttcagcaaggcgcgaagttatcttaagcgaatattataaagcaattgagaataagaaaaaatacaatctcgatccatatactggctttgatacaagacatattcttgatatcggtaaaaatataataacatttcatgtttctaataataagtacatagttaatacaaagaaaaaaattagaaaaagaggagagattgtctatctgaaagacaagaaaacaaagaagcgcatacttaatgagtcaggaaagcctattcctataattactaccggcgatacaataagaggccaaataaatgaagaatcttatctgggagctatcatgccgcctctatatcagaatggcaaggctgtcaaaaaagataataaatgggaaattcgcagagataaaaatggcaaccccgaaatttggatagtgaaaagattactaattgactcaattaacttcgaaaaagatataattattgacgaacggttaagacaatgtattaaagatcagatcaatggaggtagatcagcaaccgaattaatggatttgagtggaaacagcatacgccatattcgttgccgtgtaaaaactggaaaaggatttcagtctaaagaaaagaccatcgaattaaagaaacattcacacacatcaaaaaaagagcacaaaaaaaatgttttatcaaaaatatccgacaactttttatgtctattctatcaaaataaacctaaactagatgaactaattcaaagacaagttcgtattgttagccttttccattttcgagatttaggatttgattctttaagagacgtttgggacgatgaggattggaacaattatagaataaatgataaaataggtctaccattaaccaaaatcataacacagggaacaaaagctttgttctatgaaagatcaaaagatgaattaaggtatttaaatacaagagaaatacaacaacggctattcattgtatttaaatttaacgaatcaatagttagcaataagtattacaattatatttattttaaaaatcacctggacgcccgccctaatcctgatatagataaggaatgcgaagacaagtttgatcctcagaaatatcaatcagggctatgcctaaagcccgaaaatatggactgcctctttgaaggcattgattttgacatgaagccagatggggaaattaaatggattgaaaaatgatcaaacgcaccctatactttggtaaccctgcatatctcaaaacccgaaatgaacaattagtatttgagagtcctgatactggtgaaaccaagcaagtgcctattgaagatataggggtactaattgccgatcacccacagattactatctccacagcattattatcaaaactattatctaataatgtggcttttattagctgtgatgctacccaccatcctactggattgttgctaaatttagacggccatactttacagagtgcccgcttcactgcacagatagaagcatcagtaccattaaaaaaacaactttggcaacaaactgtaagtgccaaaataagtaaccaggcggcagtgctaaactggcaacgactgccttgccaaaacttactgaactgggcaaaagaagtaaaaagtggcgattcagataaccacgaagcccttgccgctgcatactattggaagcatttatttacccatacaggtgtggaagaaagtttcaggcgggaacgggaaggtatatcacccaataacctactaaactatggttatgcaatcctgcgcgccgtggtagctcgtaacttggtcgccagtgggcttctacctaccttaggaatctttcaccgaaaccaatacaatgcttactgcttggctgatgatattatggaaccctatcgtccctttgttgataaaatggtttgggacattgttcgaatgaatggaccagtagcagaattaggcacctctattaaaaagaacctactcggcattccggtaatggatgtaaagatacgagacgaaaaaagccccttgatggtggcggcacaacgtactactgctagcctggcgcggtgttttgaaggcaagacccggaaaatagactatccagaatttactattctaccgtgagtagttattaccatacccgtttaaacgcctaccggatcatgtgggttttagtattgttcgatctaccaactgacaccaaaaaagaccggaaagcctatactaatttccggaaaaaacttctggctgatgggttccaaatgttccagttcagtatttacatgcgccattgccccagtagggaaactgccgatacacatattaagcgggttaagagttttttgcccgctaaagggcacgtaggaatcttccaatttactgataaacagttcggtatgatcgaattattttattgtagagagccaaaaagcacccacgcccccgttcaacagttagaaatgttctgaaaatagaaacaggatgaaaaaagggcactcggaggctcgttttttcatcctgtttttcagctcaaacacagtctggataagcattttatcaaatcgagttgtgtaagaactaaggtacaatacattttgaaagcaaatcacaaccaattccccacgcgccaacaatagcgtagtgttgtgtaagaactaaggtacaatacattttgaaagcaaatcacaactcctgaactcgctaggctttttatggatgtgttgtgtaagaactaaggtacaatacattttgaaagcaaatcacaact

SEQ ID NO: 4141 - DNA, 13015 bp, synthetic construct
  misc_feature 1..13015: note = Synthetic
  source 1..13015: mol_type = other DNA
aggaggggaataaaaaacacagtcattccgcactccgatgcggaatctcatcatcataccctctgctattctgcgcctgacacagaatctcataaggctacaaaaggagattgcggatcgatgcccgcaatatcaggggtaagaccaccccgtcttccttcgtcagccacccctccaaaggaggggaataaaaaacagagtcattccgcactccgatgcggaatctcttcatcataccctctgacattctgtgcctgacactgaatctcataaggctgcaaaaggagattgcgggtcggtgcccacaatgacatatcatattttttgtggtgggtgccctccaccaaaaaaatattttccattaacttcccacaataaaaccaaataaatgaacaccacgatcaaattactcatttgctgtttcctctctattaccattacacgtggtactgctcaaacacatgctttctccagggacatccaaacctttaaggcggaggacaacaaccaaatgccacccaaaaattcaatcctgtttgtcggcagttcttcctttaccaaatggaccgatgtgcaacaatatttcccttcatatcccattatcaatcggggattcggcggctctacacttaaggacgtaatctattatgcagacgatatcatactcccttaccaccccaggcaagtggttatctattgcggcgaaaacgatttagtattacccaacattggcgctgatgtggtattagatcgcttttcaacactctttgaactcatcaggaagcactatcccgatatcaaaatcacttatatctctatgaagccaagtccaagccgaaagaattttcgcacagcaatggaagccggtaatgcaggtatccaatacttcctgtcacaacagaaaaacacttcctacgtggatgtatatcacaaaatgctgaatgataatggagccccgctcccacatatctttctggcagacagcctgcacatgaatgcgaatggatacaaaatatggcaaaaggctatcgagcctcatttgttgaaataggattcatacgatatttctgattaacccacaatttgctctcctacattctccctacctggcgcaattgccaggtcataattcctgtattttcctcagaaagttcaagaaagccatcttcccaaaaaagataaaacagaaattgaaaattcttttaacttagtgtttgtcttccatatcataacaatatctaacacacgtaatatttacactgcaccattcagataaaaggaatatcaaacaagcactcaaaccctgacctatgaaacgaaacaaaatttacctcttagggattctcatttcccttctgatcttttcctgtaagaaagaaattgtagaacctccggtattaaccggcaacagtcttatcagcctcacagctacaaaggccgacaatccggtattttcagaggacgcattcgtatatatcaagaatgacaaagcatatattaccctccctcagaatgcgaacccatcaaatattgtattgcacttccagataagcgaaggagccacactaagtctgaatggtacagtcatcaataatctgaatggaagtttcgacctgaccaatactgtgaaagcagaaataaaatcaggtgcaggagtggtcaacacttattatatccttgcccaaccgggaatagcaaagtatgatgccatgctctataagtttatggagaaatatactatcccgggagtgtcatatgcggtaatgaaaatgcaaaacggatcggtggagtataaatcaggattaggattcgccgacaagaatctccgaatcagaacaaaacccaattacctctttagacttggaagtatctcaaagcagtttactaccatttgcattatgaaactgatggacgaaggtaaactgactttatcatcgacagtctttggagcggggggtattctaggaaatgattatggcacagtatccgctcttgcggccaaagtcaccataaaaaatctgctcaaccacacttcaggctggacaagcaatcccgaccccatgtttacctcaagtttcagaggccaaacactggatcaaagaataagttatgtactctcttcaccgcagaccgatccctccactgccagttactcctacttcaatatgggatttggcattctgggaaaggtcatcgaaaagcttagtggcaaaacttacgaagcctatctgacgcaggttctatctgaagcaggaattacagacgttcatgtggggaaagatctgagtggcaagaggtcaaacgaagtggtatattactcacaggatggcacaaacggttatcttaacgaaatggatgtaatagcagctgcaggcggacttatagcttctactgaagagatgatgaaactcattacatacatcgacggcaaaagtaacccgaccgacattatcagcgcaagcgctcgcacccaaatgctcacaccgtcttcttccaacggacgctatgcgttggggtggagagcaaatcatccttttttccctggtgcattttatcacggaggcaatctggccggtacgggtgtcttttgggtaatgggtacagattacagcgtagctatcctttgcaacagccgatcctatatcgatggttttgatgacgaattttattttatcgcaagggatctgattgatgatgcgaggcagcggttttaagatttctaccggagtggcatctgaaagaagtgctttagtctatagtataaggctgcacattacccggttgagttagggaaagagttgcaatacacagtttagaattgctgatatgcaaatgaaacaggattgatggctgccgaggtttcttttgtataaaattaataaattagcaattggaactgtagataccaaggctaaaaatactggaacaaatcaatttccaaggtttgaaatagaggaaaaaagggaaggcgactcgcgccgccttaaatgttttcacaacggaataatccttattgtgaattcgattttggaatgatgaaaaactattgatgaaaaaatccccacagtgtttgcggggaaatagagcaaaaaactcttcggcttatagccttgttgtgatttgcaaaacaaaaataaataaaaacgattaaaatatacggaaatggcaaaaattttagggttagaccttgggacaaattcaattggatgggcaattagagaaactgataagattgaccgtgaatattattgtaaacaattctccaagaccaatatagagtcagaaagtgaaattgttgattatggtgtagtggtatttcaaaaaggcgttggagatggtaaatccggagaattttcattagctgccgaaagaagaaaaaacagaagtaagagaaggctatacaatgcaaaacgttatagaaaatgggctcttctaaaattgctaattgaaaataatatgtgtccttcaaaaccagaagaattaagactatggagcgtcggtaaatggcaggatgaaaatggaaaaaagaaaaatgttggcagaatttttccattggacaacgtaacctatcagcaatggctagcatttgatccaatattctttggttctaaagaaacttctaagaatggaaaaaatattaggaaaaatccatacgatctacgatgtgaattaatcagggaatatgaagaggatgaagattctcgtaaattaaaacttggaagagtcctctatcacctagtgcaacgaagaggatttaaatcaagtagaaagaatgggaaatcaacttatgctgaaaatgcagaattagaaaaattaaaaaatgaaaattcagatttccatattgcagtcttagcaaaaaataagattgataatggtgaaagatttagaaaaagtggagtaatccaaaggagatactatgaagatgagtttagagccatttgtgataagcagaaagttgatgagagattgactgaaaggcttcacaaagcaatctattttgtaagaccactcagaagtcaaaaagggctagttgggaattgtactttggaaagaaataaaccaagaatcccattaagtcatcccaaatttgaagaattcagagcacttcagtttatcaacaatatccagtggcgggaggaaaatggaacgaaaagatttgagccaatcccactaagccttaagaaaaggatacttgaggaaatattctttagaagacttgttagcggaaaaaataaagggaaaataagcttagacaattcatttcaatttgaagatataattgagaaatattctgaaaatgggaaatatgaatttaattacaggaacaaacctaatgtgccaacatgccctgttactgctgcacttatgaatatatttgatgttgattgggaagataaattccttacccaaggggatacttatggaataaattgggaaggattaataatccagtataaccttaaatatggaaaggtaaaaaggagaactgaggagggcaaaaaaaaatattaccagaagaatattggcgagcatagggcccttaatattgactctatttggcatttgttattcgattacatacagacaaaggataaggttgaagaactcgaaagattctgcaaagaagttttactatttaaagatgaaaaagcaagggcatttgcaaatattgatattcctcaaggatacggttcactcagtttcaaagcaatttccaagatacttccctttttacggtttggatacatttattcagaagctacttactttgctaatctaaaaagtgttttaggcgatgaatataaaaatctgatagatagagccaaaagaattacagataaaacaattgcggatgttaagaacaaaaaggaacaattatttattgtcaacaggcttatccaaaaatatttttcaacgaatgctagtactcgtgcaaaaggtgttgacgaccgtataaaggaaatagctgctcaagagaccaaggaggtattgaaagactggtttatgggggaatgggaaaagatgaccccagaaaagaggagtgattatgagaataatatcctaaaatactatttacgttttctcgatggaaaacaagagaacgatgaaaaagccactgcagactcgataaggcaaccacaaatagattattataaattaccgcggttagatttggcgataaaacgaagtttaaaagattcattccaaattcaatatcgaaacctgaataaattatttcatccttcagatattgaaatgtatcccgtttcaagaactgaagttaaagttaatattgaaggcattgataccgtaataagaatccttgaaagtccacaaccgccttcaaaagggttgaagaatcctatggctatgcgtactcttcatgaattaaggcatcttctaaactatcttttaagaatagggaagataaatgaggaaaccaaagtcatagtagagatggcacgtgaacttaatgatgcaaataaaagatgggcaattcaaaaatatcagcgggatagagaagaggagaatatagagtttgcgaaggcaattgtcggagttgcaaagcaaaaatatccaaacatagatgaaaacaatattgaaaacattaataaggtaaggctctggtgggaacaaatagaaaataatgaagaagtatatgaacaaattagagcattaaaagaggatattgataaatatagactttggaaagaacaaggttgcgtatgtatgtacactggggaaactattagtcttgctgatttgtttgatgggaaccaaacaaatttcgaacatacactgccggtcagcatttcttttgataattcattatcgaatttgactgtatgtaaggcttattataatatccatataaagaaaaaccaaatcccttctcaattagcaaattattctcaacacgcaaatggatacacggctatattgccgagattagaaaagtggcaagttaaggttaaaaacctaaagggattaattgaagataacattaaacgatctaaaagaatccaagatcctgaaacaaaaaagaggctaatacaaaaaagacatttgcttcggtttgaattcgactattgggataagaaagttaaaaccttcgaagtaaaagaagtcccaaacacatggaaaaacagccaattggtggatactcaaatcatttctaaatatgcgcgatcttaccttaaaacattgtttaatagagtcgatgttcaaaaggggactgtggttaatgacttcaagaagatttatcagatcaaaggggatgagcaaaaggatagaacaaaacatagccaccatgctcaggatgctgctatacttacactgataccgggttcaacaaggcgtgacactattttacaaaattattatgaggcggaggaaacccaccaaaagtatccaatcaatccttatccgggatacaaaccattgcatattctggagattgagaataatgtgcttattaatcacattccccacgataacactttcgtttcaacttttaaaaatgagagaaaaaaaggtgtaaaaacgggacggattgcaaaaggtgataatatcaggggaagattacataaggaaacttttttaggtgctattaagccaccaatgagggatgaaaatgggtttgcttttcgtgaagaggggaaatataaagtaataactaatccaaaaacaggattggatgaaatatggattgtctcaagaaaaccaattactgaagttaaattagataaaggaaaaataaaggatgttattatagatgagatattgagaaaacatattcaactacaattagataatggagtaaacttggaacacgttgttgattttagaaataatccaataagacatgttagaatgagggtgaaagctggggttggttatctgtctaaagaaaaagcaatagaaataaagaaaccagtgtatccttccaaatatgaacataagaatgatgttcttacgcaaaatgaagagaactatttgtttcttttgtatgaaggaattgatgctgggggtaaggccattagatcctataagatcttaagcatatttgatattgccaaactgggcattaagagtttcaagcagataaagaatgaacaagagtttcaagcgttaaccaagagaaatataagacttcccttaaaggtaatcttaagggtcggagaccgtgttatattttttgaagaaaacagagatgaattgacggataaaaatataaaagaaagaatgtttaaactttttaagtttaatgaaatgggaactccctatttgtatttccaaaacattttagaggcaagacctgataaagaccttaatgaagaagtggaatttgaccccaaaaaatatcaacccagattatctctgaaaatagataaattaaagtgcctgtttgaaggagttgattttgaggttaatcccgatggaactttagtttggaaatgaagtattgtgatcaactatttctgattgttcacgaaatggattactagtattaagccaaaccatcaaagattatgttattgcccgaaaattattatcacatctataatcacgccaatggtgatgataatctttttagggcggagagaaattattcctatttcctggagaagtatcatcttcatatagatccggtagctgatactatagcgtggtgtctgatgccaaaccattttcacctgttagtaaggataaaagatgcggaggatttaattcaaacttttccaaagtttcgaactttggaaaagttgaaggaagcccccgctgcgcttccgcatcttttatcgaagaaattcgccaactttttcagcagctatacccaatcgtttaataaagtttacgaaagaagaggctcgctgtttctaaaaaattttaaacggaaacttgttgagtcagaaagttatttgattcaactcattctatatatacatttaaatcctgtaaaacatggctttaccggaaacactgaaaaatggcagtggcatagcaagaatgagttctggaaaacaaatccggtattagccgaatcactctttaagaataaagacacatacgagctcctccacagtaccaggcaaactgagttcgctgattatcagctaattgaaaatgatatccaaaccagcatgaaatgatcaagcgaacaatctatttcggaaatcctgcctacctgaaaacaaagaatcagcaattagtagtttctaaaaatggggaagaggacaaaacagttccaatagaggacatcggcatattaatacttgatcatttacaaattaccataacccagccaaccctgaccaaacttctccaaaacaatgttgccataattgcctgcgatgaaacccaccatcctataggtctgtttctaaacctcgatgggcacaccctgcagagtcaaaaatttcaagcccagatagctgcgtctgctccactaaaaaagcaactttggcaacaaactgttgaggcgaagattaccaaccaggctatgctactgaaaatccagcgaatagaaaacaaactgcttctcaatcttgcaaagcgtgtcaaaagcggcgacagcactaataatgaggctcaggctgccgtttattactggaaaaatctatttcctgaatttttaaagttttcgcgcaatcgagagggggcgcctcccaataatcttctgaattatggctatgccatattgcgggcgacagttgcgcgtagccttgtggcctccggcctgttgcccacattgggaatctttcaccgcaaccagtataatgcttattgcctcgctgacgatatcatggagccatatcgcccttttgtggatagaattgtatgtgatattgtaggcctgaatggcagattccttgagatgactggtactatgaaagaacagttactgtcaatcccggcaatagacgttaaaatcgacggaaagaaaagcccgttgatggtagcagtacagagaaccacagccagtctggcacaatgctttgagggtaatacacgaaaattagtgtatccggcgttatgataacaaataatgctaagcagttcattaactcatgatgctgtcacgattaaacgcttatagaattatgtgggtaatggtgatgtacgacctgccgatggtcactgaaaaagaaagaaaaatatactccagatttcgcaagcggatgctggatgacggatttatgctttttcagtttagcctgtatctacgccattgcagcagcagggaaaatgcggatgtacacattaatcgggtaaaagccatcttcgctataacagacaaacagtttggtaacatcgaaatatttaatggcaaaacccacaccaaacatgagcccacccctgtacaacttactctattctaaaaaatctattagaataataaaaaaacagggtaaaaaaagccctgtttttttattgagttaaaacagctgtaatcctttcctatactgcatcgtagcgaatcgtgatgtgaaagaactaagctaagacaatttttgaaagcaaatcacaactgctcaaccgcgaacaatatccgcggctttggatgtgaaagaactaagctaagacaatttttgaaagcaaatcacaacttatccacctgagagagttgaaaatctttggatgtgaaagaactaagctaagacaatttttgaaagcaaatcacaactaaccaccccatacgcccggaggagaaattgatgtgaaagaactaagctaagacaatttttgaaagcaaatcacaacaaggatagcaagagaaacacagtatagaggatgtgaaagaactaagctaagacaatttttgaaagcaaatcacaacttgcattttcatacactaaacgactatcgagatgtgaaagaactaagctaagacaatttttgaaagcaaatcacaaccgtctttttcatcgctgttgaggcacaagagatgtgaaagaactaagctaagacaatttttgaaagcaaatcacaacatggagccgcacctgcacagtacacgaattggatgtgaaagaactaagctaagacaatttttgaaagcaaatcacaacgaatcatcaattccgccatcaaaatgccatgatgtgaaagaactaagctaagacaatttttgaaagcaaatcacaacgagaagagttagaggtattaagacagttaagatgtgaaagaactaagctaagacaatttttgaaagcaaatcacaacaaagatttatatatgatgttggcgataaaagatgtgaaagaactaagctaagacaatttttgaaagcaaatcacaactttgcctccactttgtctaacggcactgccgatgtgaaagaactaagctaagacaatttttgaaagcaaatcacaacgtaatggcaattcaggattaagatcggcatgatgtgaaagaactaagctaagacaatttttgaaagcaaatcacaactactactcccaaatggctgccgttgcagcagatgtgaaagaactaagctaagacaatttttgaaagcaaatcacaacgcaacgaatatcctattgcccggtgcatcagatgtgaaagaactaagctaagacaatttttgaaagcaaatcacaacataggggttgaaaatgtgttaaatgcctttgatgtgaaagaactaagctaagacaatttttgaaagcaaatcacaacagatttctaaatctataccaggacaagtagatgtgaaagaactaagctaagacaatttttgaaagcaaatcacaactagggtcttttgtcgccacgctgctggcatgatgtgaaagaactaagctaagacaatttttgaaagcaaatcacaacataggcggtatgaatgcaattaatattaaagatgtgaaagaactaagctaagacaatttttgaaagcaaatcacaactgggtgctggtgctttgttgtttttattagatgtgaaagaactaagctaagacaatttttgaaagcaaatcacaacttcaataacttcttttgtaccggctcaaacgatgtgaaagaactaagctaagacaatttttgaaagcaaatcacaactaaaaatccggtatagatgaaaaagatagcgatgtgaaagaactaagctaagacaatttttgaaagcaaatcacaaccgcttagaatttacaattaaaaattttatgatgtgaaagaactaagctaagacaatttttgaaagcaaatcacaacaagattggttttgttgttttcattgtttaagatgtgaaagaactaagctaagacaatttttgaaagcaaatcacaaccaaacacttactggaatgttttcgcaaacggatgtgaaagaactaagctaagacaatttttgaaagcaattcaaaagaggcctttttctctggaatgaaaacctatgcatctatgagcgaagccagcagccttctcttagatgatgacggcaatctgaaaccattgaataagtttaccgaggatataaagaagctaaacgatacctacaacgacaattatctgcgtgccgaacgaaactttgccagccgatccgctcaatccgccgccaaatggcagaagtatgagacaggtaaagatcgctacgacctgcgctatttaacggataatggccccaatgttcgcgacagccaccgcgctctggaatttactacgctgccggtggatgacccgttctggaaccaatacacgccgccaaatggttataattgtcattgcttcctggtgcaggtacgcaagggagaatatcctgtaagtgatagcacggatgccattgcgaaaggagaccaggctactacccaaatcggtaaagatggcagcaataaggcagcaatattccgcttcaatccgggcaaggaaatgaaggtgatgccacccaaccatccctacacatctggcaattgtggtaatctaagcgcggtatggcatacgctttctgtaagtcaaaaaatacagcttgccggacaggcagataagtgtagggcaaagaaggtggtggaggagatgtcgggaaatatcaataaagaagaaacaaagactttacaaaagcaaataaagaaaactgaaatcggaattattgaaacaacccatatcggctcggtcgtcttaaatagtaattcagtcaataaaacatataatgtaaacgccgccgaatataaaaaagatgctctgaagcaactatacaaggctggaaaaaaccttaaaaaagtaaaggagctcccggatcttgaacggcctgcgacaaagaaaaaagccttaaaaaaaccaaatattgaagggtactaccgcataattgttaccgatgaaaagaaaagatatgaatatcttttagaaaaagataaggcagaaaaaagaggcttaaagctttactatataaaacgaaaaaagtaagtacatttctatagatggaactgaccagtgacggttcagcggcccatcagaactacttactttcagaaacaaatatacaaactttttaaataaacaagatggaacagacaattgaaccaaaaactcccctggaacgcattttatgggataccttatggagccttaattgctccttacacgactgtcagaaagctgtccttcgttacagagacgcagtagcttcaggcaaacctcttgaaacgccgccagggggatcgcgccggtaccggttgtggcgtgcaatccgccaagcaagtgagcaagactgtcaagttgaaactcgtataaacggataggatgagtacaatatttttgaagaaatgtaagcaccacatccgcagccagtttgtaatcgggaggggcatcagcatcattatcaaattcgaccacgcagaataaatattgcttatgcagcgattgccattcttcgtcagaaagataaaacacaggcattagtttcaaccaaaaaataaatatacaaactttttaaatatacaagatggaggctaattaaggctaattaatattttgatgtgctaggagtaacttagcagttaaaatcacaa

SEQ ID NO: 4142 - DNA, 24578 bp, synthetic construct
  source 1..24578: mol_type = other DNA
  misc_feature 1..24578: note = Synthetic
agatggagaattgaaagttagcgtaaatgttaaaaatattgggaattatgatggagatgaagtggtgcaattgtacatcaatgatgtttacagtagcgtaaccactccaagaaaaacattaaaaggttttaaaaggttattcatcgaaaaaggagaaacaaaaaaggttgagtttacattgacggctgatgaactatcactctggaacagagatatgaagcgagtggttgagcctggcgattttgaggttatgattggagggaattctgtagatttacaaaagttaagttttaaagttctgtagtaacccattgtttggtgtagaatcgaaaaatatttagtgttttggatgttttggttagaattcttttatcaatttaacaaatagccaattttaataatgtttaatgctggaaaatgtaaggattttgaaaggaaatacgttgtttttagttaaattttaaccaacaccttttgaaagctgtcatttgtcgaaataatgatttagttaacaaaacagattcataaatttaacatcatattaactcaaaaaacaatttaaactatgaatcaaaacgtactaaaattactgttcttgtttttcctgttcgggtttcagaaccttcaggctcaaacagcgacagtaacaggaacaatcactgatactaatggaatgccaattccgggagtaaatgtgaatgttaaaggaactaaaaccaatacatcgtcagactttgatggtaaatacagcatctctgttcccaatcaatcagcaattttgatattttcttatgtaggttctgctacaaaagaagttcctgtttcaggacagacgactgttaatgtagctttaagtgcagacagtcagcaattaggagaagttgttgtaactgcacttggccagtcaaaagagaaaaaggctttaggatacgccactagtgtgattaagtctgaggcaatcgttaagacaggttcgcctactgtggctaatgctctgtatggtaaagcaccaggggttcgtattacttctactccaggtggagctggaaatatcaatattaatattcgtggtatcaactctattacacagaaaaatcagcctcttatcattatggatggtgtgccaattcgagatggggcggctacaaataatgattattggggtgatcagcgtattagaagtaatggtctggcagatatcaatccggaagatattgagagtatctccattcttaaaggagcttcggcggctgcattgtatggttctgaagctgtaaacggggtggtattaattacatctaaatccggtaaaggaaaaaaaggattaggtgtagatttcagtaccagttactcacaaaaccaaattgcatatttaccaagatttcaatatgaaagaggtccgggctggacaaatgcaaattattctacgggatacttagctcctgatggttttgcctactatgatacagatggagataatattaatgagactagaggggtttcagcaagtactaataactttggtccgtggttcgatggtaagcctattatgtcatgggacggtgttattcgtccatattcagctcaaaaagacggctataaaaatatgttccaaaattcatgggatggcgtaacaaacattgcactttctaataatacggataatagcagtattcgtttttcttacacacacaatgaatcaaaagggttgagtatgggtaacatgaataaaaaaaatacccttaacctgaatgcatcgttcaaaacaagtgaaaaattaaaaacagatgtcatcgtgagttatatgaaccagaatgttcacaatcgtgctgttggtacagatcgattgataaacaactttacgggtatgataagcccgtttgataatggtgattggtataaggctaaatatcaaaccagtttaggatacaaatatgttactggtggaaataatagtttgactccggatgaaaatattatccgtaatggtttcaaggcagatgtaggtgattatttctggaatacgaatgcaaatcagcaggacgaaattacaaaccgtttgattgccagtgttactgaaacctatactatttacccagatttgaagctgcgtggtcgtgcttctacagatttaacttcgataaatgtagaaactaaaaatccggttgaaagacctctggtttacggatttggtaccggttcttttcaaatagattctaaagattataatattctttatggggatttaatgttaatttataacaaaaaaattaatgataagtttgacattggagctacagttggttatacagcatcaaaagaaactggtttgagtttgtcacaatttacagatggagggttgagtgttgaaggttggtatgatttaaattcttcagtaaacaatctaaaagttaaccataaaagagaaaaagttgtaaaagacgcagtatttggaactctgactggaaactataaaaactatttgttcctcgaaggaacaataagaagggatcgcacttcaactatgaatcctgataataatgcatttacgtatccttcagtcaattcctctttcatagtatctgatgcgtttacattaccgcaagtaatcagttatgcaaaacttcgtgcttcctggggaattgtgggtaactatgcagagatgtacagaggtaacgtagccttcaacccaacaacattaggaaatcagggaacagctactcctgtattaattacaacttctatggataagtatggtaatgaaagtttaaaacctgagatgaaaaacgaatatgagcttggttttgaaactaaattctttggaaataggctaggactagatgtctcttactacaatgcaaaagttaaggatcaaattttagatttgacattggcatctacaacaggagcttcagtaataatagcgaatgttggagaattaagtaaccaaggagttgaaatcgctttgactgctactcctgtaaaaacgacatctttctcgtgggaccttactttgaactggtcgaaaaatgcaaacaaagttgtgaaattagcaaatggtgcaaaagaattattacattttgactatgatggttctgccgctcagttgaaatcagtagtaggtgatccaattggaggtatttatgcacatcctgttaagacagataccaatggtaataaaatggttgattctgatggattttatatgattgatggcgataaatgggaaaaatacggtacggctatacctaaaggtattggaggtttattgaacacattcacttataaaaatttcactttagatgttaatattgattattcttatggagggtatttgatgccaactggaattaattggatgacttcaagaggattgacagaagaaagtttgaattacagtactaacgaacgtggtggtcttacatattttgtagatgctaatggtaagggtgttcaggttcctaatagtgctacaagtggaccaggtggtcaaacattatatcgtgatggtatgttgatgaatggtgtgacagcagatggcgcaacaaatacaaatgtaatatctcaggcaggttactataacatgacttataactggggaggccctcaatacagcagctcacgttatgaattgtatatcaaggaaaacaactatgtaaaattgagagaagtctcattaacttatagtttaccaacaaactgggctgctaaaattggtgcttcaaaattaaatttttcagcttacggacgtaatttgttcttcatctacagatcaattaaggatatggacccagaagcaactactgcaggttctaaatggtatcaaaacataaataatgcaggaacgaatccggctaccagaagtattggatgtatgttaagagcctctttttaatttgatatttcataatttaaaaaatataacatgagaaaattattatatatatcgctaacaactgcagctgttttttttagctcttgctcaaaagacgattttgcagatgcgtacccaaatccgtctacggttgaaataactactgtgtctaaacagtttgccggattcatgaaaattaactttgaggatgtaattccttcttactggaattattataccgttctaaaatctacttctcttagctacacgcaggcacatggatttatgaactcatccgggcgctatgtttcaggagctgcaccagttaacagatgggataggttttataagtttatggctcaatatagagagttagaaaaagtaatggcttctttgcctgctgctatgcagactgaaaacagaatctataccattacttcaactatttatttatacgatcatactcaaaaaatgattgataactatggagatattcctttttctcaggcaggtaaaattagtttaacgggaggtaattatggtgctgcattagcaaagtatgataaccaaacagaactatatacccttatgttggatcaattgaaagctttttctactgaattgaattcgattactttgtctgctggtgtggcaacagaattcaaaaatcaggatttgatcaacaaaggagacctggtaagctggaaaaactattgtaattccttgcgcttaaaaatcttgaacagagtttctgctgttcctgtttttgcaacaagagcaaatactgaaatggctgaaatcattgctgctggagaaattgtagatgaaaattccgaaaatattgctttcagggtttataatcaggatggtgatttagatacttcaggttttattaatgctttagaagatgatttaaataatcttgctccaaaagcaatgattgatcacatgaatgcaaataatgatcctcgtaaaccctggctgtttgaaaagggatcacgtgtagtaaacaacgtggtgatagtggctcctacttatgaaggactagatccggcattggcatccggggctcagacacaatcaataacagaaggtaaaattgctgtttacaatcgttcggttctcagtagaaataaatggttgccgggaacattaataaatgctcctgaagtaaacctgattcttgccgagtactattcaagaaatggaaatgccgcaacagctaaaacacatttcgaaaaagctatcagacaatctgtagagtattatgtaagattaggagataaagcagatgttttgacctggaaaccaactacagaaccaacaactgctgaaattgacgcttatattactgctataaactttgcaggagctacaacacctgcagctcaattggaattaattgcttttcaaaagtacattcattacaatatcatgcaggctgatgaatcctgggctgagcaaagaagattgaaacttccggctcttacattccgtgaggatgaaacaagcagtattagaaaaacaccgccaacacgctggacatatccaacgtcagagagtgtttataatccggataattataatgcagtaaaagcaaatgataatttaagtaccaaaatattctgggatataaagtaaaattccaataataatgtgcaattaaagcacctataagtttaaacagaggtaagatgtaattcttacctctgttttttccagtttaatatttgtcaaaaattagataataaatgatttgtaaatacatgataaaatttttcaataccatattgttgttgttttctttagtactcgttgctcaaaccaaatcagaggtatataaaattaagtatgataaatttgaaaacggaaaaaaaacaggcgagaatatcgaaatctatctatacaatcaaatggtttttttatcaaaaccaacagataaaatacaacaatacatcgatttaaaaaacaattataacgttaccaccatcaaggatggaaatactgttttcaaaaaaataattccatttgacagcttgcctgttcctaaaaaagaaaatgatacccgtgtcatacttggatataattgtcagcatgtttctttttcttatttttcaaatagaattgatatctggtatactgaaaaggctgccgtaaaaggaactcctaacagtaattatttacctagtaaaaatgcacttgtactggaaatggtttataatggaaatcagactttgacagccaattcgataactaaagttaaaaattatgagccatttattaattatgatgagaagacagtagtagttgataaatcagaatttgaagaaattctcattaactccagatatactaaattgcatatttttgagaatgaaaatataaacttcgatcctaattcaataattccaaacgaaaaagaccttcttacagacaaggtttatcatttttctaaaggaagtgtagttttgaaaaagataaaaattactcctgaattaaaaaatagtaatgccatttttgcaaaactaaccagtaagtctactggtgatgcatatgacagaaccggttcagtattcattatcccagcaaaaaaagaggaaaacagtactacgttattagatgcttacttacatggattagataaattaccaatttatacagataataaaaaaaacaaatatcagggaattaaaaaagaaaaagactattcgccggcaatagaaatactaaggttttttacgccatttggagttaattattttaatgataaacgaaaaataaataattataactgggcaaaagacgttgtttataaagaagatgtcacttctcttattcctattgatgaagatgaaatctggattggtgtttttattggcaattatgatgctggtggtcataccataagtctggaactcaatgtttatccatcaatgaaaaataacgaagagaaaccaaataagaaaaagtatgtagcacctttattttcaacagtaaatacgatggaaatgtcaggtcagaattacggaggtctttttgcgaatgatactttaaaagtaaattttgaaattaaagaaaatctacaaaatttacagcttttgtataccacaactggtcatggaggctggggaaatggagatgagtttgtaccaagaatgaataaagtgtttgttgatggtcaggaggtttttaaaattattccgtggcgaactgattgtgcaacctatcgattatctaatccggcttcggggaatttctctgatggtctatcttccagtgatttaagtaggtcaaattggtgtccgggaacattaactcctccttatattattccgctgaacaaactgtcaaagggcaatcatataatagaagttgttatagaacaaggccccaatgaaggtccgagtacaaaccattggaatgtttcaggagttttggtgggcgaattgaaagattaattgtgaaatgaaaataattttaaaatttaattctgtaatcctgctattagtactaactgttttttcctgcagttcattacaaactaatccggaagcagttaatatcactcaaaattatattgcagaaaatcctgttacaacagcgagccatgcctcaacattggttgaaatagagcctaacgttcttttggctgcctggtttggcggaaaacatgaaggtgcaaaagatgtgagtatttatatttcttcttatagagaaaaaaaatggtcagcgcctaaaaaaattattgagccactaattaaagatggcgatacgttgccttgctggaatccggttttatttaaaagtaaggctcaaaatttatatttgttttataaagtcggcaagaacccgagagaatggtttggtgctatgatagtttctaaagataacggaaacacctggagtgaggcaaaatatcttccaaaaggaatattagggccaattcgaaataaaccaattgaaactaccccaggagttattttatgcggaagcagcaccgagagtatcgatgataataaatggagagtatttatagaaacttatagagaatctacagacagctggacaataacggatattaatgacaggaaaaatttcgacattatccagcccacttttttagttcattcggctaaagagattcagattttatcacgaagcagacacaataaattaatttcaagctggtctaaagataatggtaaaacctggcagaaaacagacagtatcaacgttgttaattcgaattcaggaattgatgcagtgaccttatccaataaagcatttttattggttaataatcctttaaaaatgggtaaagactggtttaacggtagaaatgtactggatgtagaatattctaaagatggcttgtcttggagcaaattatttgatttagaaaaccaaaaagaaggcgaattcagttacccggccattatccggacctcagataaaaaagtacatgttttatatacttataatcgtaaatttattaaacacacaatttttgatttaaaataaaaaaagatgcaaaaattttgcctggctctggacttaaaaaatgatccggatttaattgccgaatatatagaatttcataaaaacgtctggcccgaaatacagcagagcattttagattccggaattatcagtcttgaaatttataatgttgccgaccgtttgtttatgattattgaggccaattctgatttttcattccaagaaaaagcaaaacgggatgcagaaaatccaaaagttcaggaatgggaaactttgatgtggcaatttcaaaaagcacttcctcaggcaaaaaccggagaaaaatggcttttaatggataaaatttttgaacttaagtaatttatataaacgatgctatttttaagaaacttaaaatatcaactctttttcattagtgtattattttttaacagcactataaatgcccagaacggtatcaatgccaaaacattttacaaacatgataaatatctttcttcagataagttagaaggacgttttccgggaaccaaaggcaataatgacgctactgcctatatcaaaaagtattttaaaaaatacgggttgaaaaaatttgataacaattattaccagccttttacactttttgtgaaagaaggaataaacaagatgaaatcagatagtgtttcgactcaaaatgttgtgggatatcttgaaggttctgatgaaaaacttaagaacgaatatatagtaataggagctcattatgatcattggggatggggaggacaaaactcaggcagtaaaaagaaagaagcttttgccattcataacggagcagatgacaatgcttccggagtttcggctttgctgtgtatactgaaggaattatcaaatgctaaagtcaagccaaaaagaagtatcatttttatctcttttagcggagaagaggaaggacttttaggttctaaatattttgtgtcccatttaccggttcaaaaagaggctgtaaaagtaatgttgaatatggatatggtgggaaggctaaatgaagagaagcaaatttacatgggaggcgcaggaacgtttccagatggagtagaattgatgaagaaattaggcgaagccagtacccttaatccggttgtacatgcgggtgaagtgggaggctctgatcatgtctcgttttataaagctggtatatctgctgtgggatttcatacaggaggccacccgcaatatcatacacccgaagacgatattgatttaataaatattgagggaggcgctttggtgtctcaatatatttataatgcattagtagcaattgcaaatgacccgcaacaactgtattttattaatcaggattagggaatctataagtatctatatccagatttatataaataaaaagtcccaccgaagctgggctaaaggttttcattctatataaaaagtaaatcccacggagtacgcgggattttagatttctacggcatatagccttattgtgataagattaaagattagaaattttaatcagtaacaaatatatagaaaaaataaattgttttgaatgatgaaaaccataattgagttaattttttttgtggtagatttcgtgcgtattaaattttaaaaattatggcaaagattttaggattagatttaggcacaaatagcgtaggatgggcgattgtggataaggaagggaataatttttctcttgtagataaaggggttagaatattttcagaaggtgtgaatattgaagccaaaaccaatagcgaaagttcaagagcagcaaaaaggacagagtacagaagtgctagaaaattaaaatatagacgaaagattagaaaaatagaattacttaaggttttatctgataataatttgtgtccaaaattatctgatgaagaacttaatgattggcgatataaaaagatttatccacaaaatgatgaattcagaatttggctaagtacagataatcaagaagatgaagaagaaaggaaaaagcaaaacaaaaacccgtattcatatcgatataagtcagccaaagaaacacttaacttaaatgataaggaagacagatatattttaggaagggctttttatcatattgcccaaagacgtggttttttgagtaatagactagatagttccgataattcaattattgaagaaaagaaaaatgaaataacagctgtaataaatgatgcaacttcaattgcggaatttttagagttattttcagaatttgtgtcaagttttgataaagacgaaactagtaataaaccattgtttacactttcaagagctttcaattcaattttcaaagaaaattcagcattggtctataatgatttaaaagaaaagttgctcgaacgtttaaataaaaaagaatttcttggacctgttaagagagcaataagtgatttgtctgagaaaattgaacaagaaaaatgttcgactttaggccagtatttttacacgttatatcaaaaaggtaaaaaaataagaggtgaatatactcatagaattgatcattatttaacagaattcaattatatctgtgacaagcaaaatgttttagctgaagcaaaagaaaaaattgaaaaagcaatattttttcaaaggcctttaaaatcccaaaaaggtttagttgccaaatgtccattggaaaatattaaaacatgtgtgccaatttctcatccagattttgaagaattcagaatgttgagttatttgaataacgtaaaaattaaattgcctactgatgagaaattaagattactaaatgaagatgaaagagaacaaattggaactttatttttcagaaagtccaaagccaattttgatttctctgaaattgcaaaaaaacttacaccaaaaagcttaaaatttggatattacaaagacaaaaacgttgctgaatatgatgtattattcaattataatttaggaagcaatgtttcaggttgcttaacaattgcaaatttaatagatgttttcggtacgaaatggaaggaatatttgttttcaaattttgtaaaaaacactaaaacagaaaacaatgtaaaagttaaaaagtcaatagatgatattatcgatgatatttggcatgtattatttcgttttgataatgaagaacttttgaagcaatttgctattgataatcttaattgtaatgataaaacggcaataaagttttctaaaataaaactgaaacaggactatggttctttgagtctaaaggcgattagaaatattctaccttacttgagacaaaatcttatttattcacacgctgttttcttggctaatatgaaaaatattttgccaacagaaatttggaatgatgaagaaaacagaaatgttatcaaccaagaaattaagtcaattattgaaaattataaagtatatagtaataaaattgagatagttaatggattgattaaaaatgcaaaaaaagaaaatggtacatggagttctgataataaatttgttgcagaagcttatagaaacggattagaaaaacaagttaaagacttttttggaacaaaaaaatggaatgaaacaccagaaaactatcaaaatgaaattttgtcggaatgttttgaacttttttcaaatcaaatgaaacttaactctggtcgaggagaattcgttaaaaaacaaactattgatgaaatattaaaaacattcttgagtgataattttaatatcgatgaagatagtttaaaaaaattatatcatccgtcagccattgaagtatataaaaaagcaaaacggagtgaagaagatgggaagaaatatttaggaagcccattaatttcatctataaaaaatccaatggcaatgagatcgttgcatcaattgaaaagagtagttaatcaattaattaaagatgatatgattgatgaagatacttttattcatatcgaaatgccaagggaattaaactctgccaacgaacgagttgcaataaggcaatggaatgaaaatttaaaaaccagaagagataaatatactgaggaaattaagtcaatttttagaggtgaaaccaacattgaaggttgcaatgatgcaaatgcaagttacaacgattatgaaccaacggaaacagatattttaaaatatcaactttggatagaacaacaaaaagtttgtctttatactggaaaaactatttgtttatctgattttattggaaataatccaaaatttgatattgagcataccattccaagaagtagaagtttagataattcacagcttaataaaacattatgttgtgctatttataatcgtcaaactaaaaaagacaaaataccttttgaatgttctaatcacgatgagatcttaccaagaataaaacattggtatgcaaagtacaaatccatagaagagcaaataaaagatttgtccaaaaaagtaaaagcagcttctactaaagaaaaaagagataaatacattattgacagaacaaaattgcgttttgaatactcttattatttcaaaaaatataaatcattcattatggaagaagttccagaaggatttaaaaatagccaatctgtagatattggaattattagtaagtatggtaatttatttttaaaaacagcattcaataaagtatatccaattaaaggaaaaacgacttccaatttgcgacaaatgtgggggttagatgaaaaatcaagagataatcacgcacatcatgcaaaagatgccgttgtggtagcttgttgtactagagatattaatgatgctttggcaaattattatcacgaattagaacagtttgaatattatggaaaaccaaaaccatcattttcacatagaattccgtgggaaggttttcataaagatgttgatgattttgacaataatactttaataagtcatcacacaccagataatctacctgttcaaagtaaaaaggcaattcgtaaaagaggaattattcaaagaaatggaaaaggcgaaatcaaatacaaacaaggggatactgtcagaggagccttgcataaagaaagtttttatggtgcaattttaagagaagaagttgataaaaaaacaggtaaaaccgaagaagttgtaaaatacgtaaaacgtcaagctattgatttatttaaagatacagatttaaaaaatattgttgatgataaaatcaaagagattgtctcaagtggaagagaacaagaaaagcaaataaagaaagaaattgaagacttagaaaaacaattaaaaaatctaaaagaagaagaggaacaacctataaaagaagaaattcaagctcttaaaaataggattaaaaatgaattgtatgttttaccaaataaaagtggaaaaccagttccaataaacaaaattcgttattacactagtgatgtaactaatcctttattcataaaaaaacatcgagatgtttcaagacatgagcataaacaattttatcatgctaagaatgatggtaattattgttatgctatttatgaaggagttgataaaaaagggaaaaaagaaagagcttttgagttaattaattttcttgatgcgggaaactattataaattaaaaaacaaggatgatagagaaagcgagaatatttctttaattcctgaaaaacatttggagacagggtttaatttactgaagtctaacaataaacctatagtgttgaaaaaaggattaaacgttattttatataaaaatcaaaaagaagaattagattttttagtccctaatagcttgataggtagattatataaaattacgggtttagatgaagatggtattaaattaatttacaatctttcagccaaaagcactactgcaaatatatcttacatgaatgaggttgttaatgaacaaaagctctatgaagttaaagaggatttagaatcattagatttgtgggataatgttttttctgatttcaaaaaacaaacaacaaaaagacctgatttttttaagaatttgaataatgtcctgaataaatattatttagaaaatgaaatttttgatgcaagagggaaaataaaagaagttaaattaaaagaaagtggtttgacaacaccaaaaggaggagatgttattgataactttaaagaatttccatatataaaatttaaagtaaataatttcaatgctttagttgaaggaattgattttaatatatcttctacagggaaaattgtaagaatataaatcttgagatttaagagttaagttctttgatataacgtttcatagtgttaaaccacaactgaaaatctgttgacagaaaataatatagatttcagttgtggtttgattaaagattagaaaacacgatattttatttcaaattcttctgataaagtatgtggttgtggtttgattaaagattagaaaacacgatattcttttcttcaaatgaaatcatattccaaaggttgtggtttgattaaagattagaaaacacgatatttattcatgttctgaaccgttcaaacaatctgttgtggtttgattaaagattagaaaacacgatatttgccttttatttcagaaaccacctgttgtagttgtggtttgattaaagattagaaaacacgatatttgggagctacaaaagacacaactaaccaatgttgtggtttgattaaagattagaaaacacgatattcatcttcctggcttaatgcgtaagtgtaatgttgtggtttgattaaagattagaaaacacgatatttcttttaataattttattttcataactatgttgtggtttgattaaagattagaaaacacgatattaaacaaatcaaacgctaaatcttcatcatgttgtggtttgattaaagattagaaaacacgatattatttaggaaatatcaataactatactaactgttgtggtttgattaaagattagaaaacacgatattgctaacgcctgttttttcgttaccgtagttgttgtggtttgattaaagattagaaaacacgatatttaatggtatttcgtcagtatgctttatcctgttgtggtttgattaaagattagaaaacacgatattaaaagttagctgtccataatgctttgaaaggttgtggtttgattaaagattagaaaacacgatatttcttggattgcttagatggataaacagatggttgtggtttgattaaagattagaaaacacgatattgtctgtttgtttatgatagaaaatacagtagttgtggtttgattaaagattagaaaacacgatattataataagtcaatgctcctgatcctgaatgttgtggtttgattaaagattagaaaacacgatattaagaatcatgcgtgtcatttaattcacacagttgtggtttgattaaagattagaaaacacgatattttctgaaacaatgtttaggttgcgtgtcaagttgtggtttgattaaagattagaaaacacgatattgacgatttatttaacgaacttgataatgttgttgtggtttgattaaagattagaaaacacgatattctttagcttttaattcgctctcaattccttgttgtggtttgattaaagattagaaaacacgatattatttgaattatctttattgtggaagttatggttgtggtttgattaaagattagaaaacacgatattcaaaagataaaatattaaaacaaatagtagttgtggtttgattaaagattagaaaacacgatattaaatgtgctgagttatgaaaacaactaaatgttgtggtttgattaaagattagaaaacacgatattatcgatgtaatgctcgttttttaatattttgttgtggtttgattaaagattagaaaacacgatattggtaattaatttatatatttgtacgtaaatgttgtggtttgattaaagattagaaaacacgatatttaaatgtttagatccttgcaaaggagatgggttgtggtttgattaaagattagaaaacacgatattacttgttcgatatatcttgttcctaaacgggttgtggtttgattaaagattagaaaacacgatattcttttgagcagttaggaatgattagtagttgttgtggtttgattaaagattagaaaacacgatatttctgtcataattgttaccttttttcctgttgttgtggtttgattaaagattagaaaacacgatattgtatggtaagtacgggacaaaatataactggttgtggtttgattaaagattagaaaacacgatatttggaacgaacattttttacatcaagtagctgttgtggtttgattaaagattagaaaacacgatatttggtaattatgttgaaatttacgatagagagttgtggtttgattaaagattagaaaacacgatattgagttcatccagtaaaaaaaagacccgtaggttgtggtttgattaaagattagaaaacacgatattattttctgtgtcagttaccgtttctaatggttgtggtttgattaaagattagaaaacacgatattattgttacttttcgcccgtctgaataataagttgtggtttgattaaagattagaaaacacgatattggattactctgatgctttaatgatgcgtatgttgtggtttgattaaagattagaaaacacgatattattgttacttttcgcccgtctgaataataagttgtggtttgattaaagattagaaaacacgatattaactttttttcttcaataaacgtatatcctgttgtggtttgattaaagattagaaaacacgatatttcattgtctaaataataatcaaagcaaatggttgtggtttgattaaagattagaaaacacgatattatttgaaaaatgctctttaaagtccttagtgttgtggtttgattaaagattagaaaacacgatattctacacgcaggcgtttattttcgttgtcaagttgtggtttgattaaagattagaaaacacgatattacccggaacccacctctaaaacagtagtgtgttgtggtttgattaaagattagaaaacacgatatttatttgtaatgatttttgtatggttatcaggttgtggtttgattaaagattagaaaacacgatatttcgttgggctatcgtcataagcatcacgaagttgtggtttgattaaagattagaaaacacgatatttactttggttgtggttttgttcatttctgtgttgtggtttgattaaagattagaaaacacgatattatgtagcagagtcttggtaaagctcttgctgttgtggtttgattaaagattagaaaacacgatatttcattgacgaggtttcaatgatgcgccctggttgtggtttgattaaagattagaaaacacgatatttccagcaagagctttaccaagactctgctgttgtggtttgattaaagattagaaaacacgatattatatattgctatttcttttaataattcgtggttgtggtttgattaaagattagaaaacacgatatttagcttcattaggtaaaattctagttattagttgtggtttgattaaagattagaaaacacgatattctgattgttctgattttgcaacttccaacggttgtggtttgattaaagattagaaaacacgatattaaggaaatgcacgcttatgtaagagatatggttgtggtttgattaaagattagaaaacacgatattgaaaaacctttatcaatgaaagataaaagggttgtggtttgattaaagattagaaaacacgatattagttggcttgttaccttctagtaatcaaaagattaaatttaaatatcgtataaaaaaatgcttcttttttggattgataacccacgattgaagcatttttttgtttctaaacaataatttagttcagtttgggctaaaacaattccagttgtgtaggctgaggagcagatggcacggctgcttttccccagaaattcaaaatattaccaaattgtttatcggttattcggagcacgcttactttgcctaaaggcggaagcagtttgtgaattctcttttcatgaacatcggcgctttcactacttgcgcagtgacgtacataaacagaatactgcatcatcgaaaagccgtccttcaataaattagttctaaatccggacgcatttcgtctgtctttttttgtttctgtgggtagatcaaaaaaaacaaacagccacattattcgatatccgttaagctccatagtacaggatatttaattttttttcgatttcccgtgaagcattgttggagagaacttgacgttttttgtaatgcgatcatcaaaggacttttctcatctttaaaataaactgttctcgttaatatttgtaataattcagatttgatagcagtgtttagttcctgttcactaaaacgctgcataatttcaaagactttttcgtctacaataggacgaaaaggctccataatatcatcggcaagtgcaaaagcattgtatttacttttatggtggattcctaatgtattcaataatccgcttccggaaagagctcttgcagttgcagctcttaaaatggcataaccataattcaggaaattattaggatagtcgccatatcgttcccgttttattccgtcaaattctaaattaggctgagggaaatatttccaatattgctgtgcagcaactccttccatatttgtagaatctccacttaagactttactggccagaaacgaaaaactatttttggattcggttattttttcaagtaactgcccctgatttttaattttttcaattatggtttgctgccataactgtttttttaaaggtatggaagcttcaatttgatttttgaatatttcctgctgaatatgatggctgttcaggtttaagaacattccgttgggaagatggttttttccgcagataatgatagaagtgttattgtcaaccagtaaattcatggccggtatgctgaggtagatctcattatgatcaagaacgagaaagcctatatcttcaatgggaatagcgctttccttcatttctgattttaatacaagctgattgtttttagctgttatagaaaatttgttttcaattaaaatggttctctttagcataaatttaacttgaaattatacatccccgttattgtcgtcttcaacaggtatctttaattattgttttaaatttaggctttaaggtgatgttgtttttacggttttccttaattcacgtgtttttaattttgaccttatctaaaaagagataagctaatctatcaggtaaatactttttactcgttatttttcttgaaccatcttctgggcgcatcactttcatgaagtacaatttcggaatgtaagaactctgcggcatcggctgaatcttgcacttttgaggcactgcgtgtcagcatttcggattcaaatccggttaatacactttccctcaaaccggtttttttccagtgagataaagatttacatccttttgcaatttcccgtgcaagcgcaagggcgtccagcaacgcctgattcgcaccctggcctttaaaaggactcataggatgagcagcatctccaatcagagtgacttgtcctgagttctctaataattccggggtgagtaattcgcggtcatacacaggatatcccgaaatataagcttcctgggtggctaataaaatttgaggaatcggtttgtgccactgcgttcttcggcaggcttcttccttgagtgcctgaggacctttagcacttaacttttttgcctcatcttcgggcattggaaagctaagctgccacattacagaatcgcctgtgtaaggcatgacatagattcgttcattgccattagcagtttggaatacagtagcggaatctaataaagcactattcagattttggacagtactcaaagggcaaattcctaatattacgatacagcccaaataagataggggagtaatatcttctccaataagtaatttacggaccgaactacgaataccatcggctccaactacaagatctgctttggcactcttcatctttccatcgacctgaaagttgagatgaacattaccatcactatgtttaaaatctattaactgatgtccccattgtatgttatcgtttccaccaagttgctccaatagtgcgaatcgcaaagattgtcttgcgatatgaatattactacgttttgggggcattctctcttctgactgaagccactttctgactccccattcaccgataacttttccttcgggattatgaaccagatgtctggttgaaaatactccttcttttaaagaaataatacctaagccctgaattgctttactggcttgctgtaatgttagtccataaccctgagatcgggcattaaagtctttatcgcgctcataaagagtaaaagggattccacggtgtaaacaagcaacagccagggcgattccgcctataccgccgccaataattgccacgtgaggataattctctttatttgcaacaggaggcatgtgggcaggaagcagcccggttccggaacagtttacgcatgaatataagttgcctttaggctgaacaggagctgtacctttaccattagttttttcaaattcatctaatgcgatttggtaatggagtcttacttttttagttagccttcgacttttttttccgcgtccctggcattccggacaaatagtccagctttccatttcattttgcactttttttacttccactttttaccggatcttgatttacataagaaaagaaacacagatactattgatgctgagttcaagagtctaaataattataactcttatttctaatagatacatctgtaagttatatttccatgtttttgcttttacaggtgcgcaaagttactataaaagataggtctctgccgaagcaggagtaaagattttcatctatggatatatttgacatcagattaagactgaaaaatatcctaatcgtttaacaacataaagcaattatataaaaagaattaattatttgaaatcttcattgattataggttgttttctctaagatttcaattcttttgtatgacgcaatctattggattccgtcgcaaataagtcagtgtaattcataggttttgacttatgtattgtactcaacgggttaagtgagtgtattagaatctctaaaccaatacaattttgtgtttcactgcatatagaaccaatccaattcgggtttttatttctagtttatcaaataaacattcccggtatccgtcgattgtttttggacttaaacacatttctgaggcaatctctttatacgttttttcggtacaggcatgttttataaaaacaatttctttttctttcagattgatttttttagagtcatcattggctttttttaccagcatccccgaaactaattctgttaaataaaagcctttttcaataactgaaatcatggcttccttaaatatttccggagaagtatcttttagtaagtaacctttggcaccatttgtaatcattttgatgattatttcttcatcatcattgacagaaagtgcgattaccttcaaatcaggtctgttttctttaatccatttcatggtgctaacgccatccaaaaccggcatattgacatccaataaaattaaatcgacatctgcattttcattatcttgcaggtaggaaacgaagactttgccattttcgaatcggtttattacctcaaaatccttaaaactattgattaaaagttccagtgattgtgaaaaaagctgatgatcatctacaataataattttgtttttaggtttcattgttttgggttaaaggatattctaaaattacggttgttcctgatgaatttgattccattattaagattgctccaattaacttggctcttaatttcatgttgtttaagcctaatcccgaatttatctgactggtatcgtagccaattccaaaatcttttatttttaatcgaaaaacagtatcagttgtattaatggctacttcaaataaatcactgtgagaatgtttaaggctgttgtgcagggcttcctgaaaaatacgataaataaacaaatcatgttcctgatcaatctggggaatttctcccgtaacggtataattgtatggaatgttttttagtttttttatacgctcaagatcttgttttatggcttcaataaaattgctgtgcagtagattatctttattgatgatccgggataaaatccgaatctcatccagtgatttggctagtatttctttaagatcattaagctcatttaccaggacaggttttccattgttaagatacatattgagctgcataatacccacagaaactatctgacctatattgtcatggagttctttactaatttcgctgagagtctgatctttaatttcaatcctggttttaattaactcggattgaaaatacaattctgattccattttctctaccagataattgtttttcttttttaaaaaataaaagaatatcacaagcaaagtaatcagtaaagttaaaaaaacaatacttaacgaaatgactaataattgtatttcttttcgctccataagaatccaataatatagcagctgtgggccaggacatttaaaataaacactactaagctaaaaatagattcgtcatgtttgatcaggaaccagtttaaagcaagcataaagggcagaaatggtacatgaaaaactaaaattcctaatatgtaccaaaaaaagactgattttttaaaatttaatattttgtttgaattaaaaatttcgactaagtataagcaggataatatcataattaacagtacaccaatggcaaaactataggtatatgattggttaatatcttctttaaaatataagatattcagaaaaaatgaaaggataaacagtattaaactgagaagtcctattattcgataatttgttttggacaaaacactccttaaaagtaagataaaagcacaaaaactgaccagcatataaaaattaaaaacataataatttaatatgcctgtccatgccgtaaaataataacctactctttctattgcggcagaaaaccaaatcaaaattactaaaaatttagctttattcgtaggaagtttgtgccaggaaattaggccgataattccggaaaataaagctaaatagacagtataaaatcttaaaaattcaaacataatcttctagtatgttttgctgggaggatttccgatacttccgtaattcattggttcaattcctggtatttcttcgatacctatttgacgaaccaaagcaaaaggttgtatatcatcaggtgcagtttttctgatttttgttcctgtaggtgttaaaaaaatggtcatccggcctgctttttcttcatattttctttcatcaggatatacaccatagtaaaaacggattccgtttacatcatatccttttttcttgcctttagccttaatataatgaatataattttcaagctcttctacagaaaaccaaacattattggcatcttcttttgtaatgtatttagcaattacccgggcacggtatttcataaaattcaaatgcaattccttcgcgaatctttttgtaattaattgagtgggtctttctggttctctttccatgatttttttaatagttaggggttaattaattgttgtttaatattttaaatacgtttgtttgagcaaaattattttaaattcttacaaaaacaaaggggaaattcaccctttttttgtagggtaaatttatttaaaaatttgggttataacactgttttgtaggaaaataaataaaatcaattttacatcgttcatttggtgcacaaaatggataggtgaaatctgaaaagcctagttaaaagagtaagagttaattataatactaaagttatgagtttatatcacgaagtttttgcaggagaatcattcagcgaagacaattattttgaagctgtacgatatgttttaggaccggaatatgctaatttgaatgaaagtgaattagaagatgtccttttatcaagagtagatcaaatgtctgaaagtgaagcagaagggttttggtcaagtttaggaaatgtagccagcagtattggttcaggagttttgcgaggtgtttcggcagtggctccaatagtaggaactgctgttggtactta

SEQ ID NO: 4143 - DNA, 24404 bp, synthetic construct
  source 1..24404: mol_type = other DNA
  misc_feature 1..24404: note = Synthetic
ttgtaaaaaaattcatttacgccacgatgctttttggagtggtaggaatgctagtagggctcacattagcctttatgtttctttttcctaacatgaccgatggtatttcgtggttaagttatggtagattgagaccgctacatacaaatgctgttatttttgcctttgtgggaaatgctttttttgctggaatgtattattccatgcaacgattgctaaaagcgagaatgtacagtgattttttgagtaatgttcacttttggggctggcagttaattattgttgctgcggctatcacgttacctttaggttatagttcttcaaaggaatatgctgaattagagtggccaattgatattgcaattacgttgatttgggtggtaatgggaatcaatatgattggtaccatgatcaagcgaagagaacgccatttatatgttgcaatttggttttacttggcaacattcgttacggtagctgttttgcatattttcaataatttagaattaccagtttccgcatttaaaagttactctgtttatgcaggtgttcaagatgctttagtgcaatggtggtatggacacaatgcagtagcctttttcttgacaactccttttttagggttaatgtattattttgttccaaaagcggcaaatcgtcccgtatattcttacagattatcaatcgttcacttctggtcattaatttttatttacatctgggctggaccgcaccacttattgtattctgcattgcctaactgggcgcaaaatttaggtgttgccttttcaataatgttactagcgccatcttggggtggtatgattaacggtcttttaactttaagaggtgtttgggataaggtacgagtagatcctgttttgaaattctttgtagtagctattacgggttatggaatggccacttttgaaggacccatgttgtctcttaaaaatgttaatgcaattgcacattacacggattggattattgctcacgttcacgtaggtgccttggcatggaatggatttatggcttttggtatgatttattggttggttcctagaatggctaaaacgaatttatactcattgaaattagctaacttacacttttggattggtactttagggattatattgtatacgattccaatgtatgtagctgggtttttacaagcttctatgtggaaacagtttaacccagacggaactttaacctatggtaattttctagaaacggttactcaaattatgcctatgtattggatgagagcgatcggaggaactctctatttaattggaatgctcgttttagtttataacattgttcaaacattaagagtaggttctaaaattgaagatgaattagcagaagctccagctttaataagaattagctctggaagaataaaaggagaaaaatttcatccttggttagaaagaaaaccaattcaattgacaattttagctaccatagctattttaattggtggtgtgatccagattgtacctacgattatggtaaaatctaatatcccaacgattacaagtgtaaaaccctattctcctctagaactggaaggacgtgatttatacattcgcgaaggttgtgtaggatgtcactctcaatctgttcgtccttttagaagtgaagtggaacgttatggaccacaatctaaagctggtgaatttgtttatgatcatccattcttatggggatctaaacgtacaggacctgatttattaagagtaggtgggaaatacaatgataattggcattttaaccatttctggaatccacaaagtatatctgcaggttcaattatgccagggtataagtggttatttgataacaaaccaatggatatttctttgactcaaaagaaaatgcaagctatggttacattaggagtgccttatacagaggctcaggtggcaagtggtttgaatgatttgagaaaacaagctctttcaattgaagaaaacttgaaaaatgatcctgactttgttaaaagttatgaggaaagcaagaaaaaagcagcagcaagaggagagaaatttgttccaatgaatgaaagagaaattgtagctatgattgcatatatgcaaagacttggaacggatattaaagttaaaaatagtgctaaaaattaaaagtcatgtttgaacaaataaaacacaatatggagacaatcgatggtgtgtcgatatatcccatcttatcattattaatttttttcctcttttttgtaggattaggtatttgggttttctcctataagaaagaaactattgatgaattgagtgaaattccattgagagacaattaaaaagtataattttttaaaattaagagaatgaaaaaatttattccagcatacgttagcgtacccgttattttctttgctgtatttggagcaatcgaattctttatagattcaggagatcgacctgcttttataaaattcccaatggtttccgtattcttattcgtgtttcttttccttgttatagcaatagaaattactatgagagcagtagataatatcacttttcatttattgacagaagaagaaaaaatcaaattaaatgaaaccaataatttgagcttcagggataaagaatggtataaaaaattaatggaaaaattgactaaaacagctccattagctgatgaaggtcaattattactggaccatgactacgatggtatcaaagaattagacaacaatttgccaccatggtgggtctatttattctatgcttcaattgtttttggtgttgtttatatggttcgttttgaaatattaggagctgatgatcaggaaatggagcttaaaaaagaaatcgctcaagccaaaattgaagttgcagagtacatgaaaactgccccagatatgatggatgaaaaaacagtcactttgttgacagatcctgcagatttagcagctgggaaagaaatttatactactaattgtgcagcttgtcacagggcagatgccggagggcaaattgggccaaacctaacagatgatcaatggattttaggtggtggaataaaaaacatttttcatactctagtaaatggagggcgcgatgggaaagggatgatttcttggaaagggactttaaaacctaaagaaatgcaaaaagtagccagctatattctatctttaaaagggagtaatccacctgatgctaaagcagcagaaggggaagtttgggtagatgaaaatgcaacagttgcagttaaataaaaattagaaacacacgtttttgcttaacttaagaatagtaataattatttgcactgtgttttaaataaaaaaaaatgtcaaaattaccagatgaagcttttagagatactataggaacaatcgacgaagagggcaaccgaaaattcatttttcccaaaaaaccctcaggaaagttttacgattacaggaaatgggttagctatgttttactgattgtacttgttgcaaacccatttgtgaaaatcaatggcaaccagttcatgatgttcaatattttggaaagacgatttaatatttttggatttcctttttggccgcaggatttttatctttttgttcttttcatgattgtaggggttgtttttgtaatactatttaccgttatttttggacgaatattttgtggatggatttgtccgcagaccatctttctagaaatggtttttcgcagaatagaatattggatagaaggagatcgaggcgctcaaatccgtttagaaaaacaggattggaatgcagagaaaataagaaagaaagggctaaagtggactttgtttttaattatttctttttttattgccaatgtattcctggcttatcttatcagcagcgacaagctattactgatgattgaagaaggacctgcaaatcatattagtaccctagtttccttgttgatttttacgggtgtgttttactttatttttgcatggtttagagagcaagtttgtattattgcttgcccatacggcagactacaaggtgttttgttagacgataaatcgatcaatgttgcctatgattttgttcgaggtgaaaaagaagccggaagagctaaatttaataaacaagaagatagagcatcaactggaaaaggagattgtattgattgtaaacagtgtgtaaatgtttgtcctacgggtatcgatattcgaaacggaacccagatggaatgtgtcaattgtactgcttgtattgatgaatgcgatacaattatggaaaatgtgggtttgcccaaaggactgattcgttatgcctctgaagaagaaattgagaaaaacgcaaagtttaagtttactccaagaatgaaaggctactcagcggtattgtttattttaacgggtatcttaattggacttttgtttttacggactgatgttgaagctacaatattgagattaccagggcagttatttcaacacaaaggggagaacattagtaatgtctatacttttaaaattttaaataaaactaacaatgattttaatgacattcattttaaattagttggtataaaaggaactttaaaagtagttggaaaacaagctttaaaagtgcctagacaaggaatgagcggaggaaccttatttgttgaaatcaatcaaagtgtattggacagtgataaaacaaagctgaagattgaagtttacaacggaaaagaaaaaatcgaaaccagtacaactagctttttaagtccgcgaagttttgactgacatcaaatatattgaaatttataaatagaaattatgaaaattaattggggaacagcaattgtcattgcttttgggttgtttatgaccttcattttgtattttgtttttatggtacagtcggattccaaatacgataatgatttggtagtggaggaatattataaacatgatgcacgttttggagaggaaatggagcgggttcaaagtgcagaggatttaaaagaaaagccggtaataacggcaggagcatctggaattacaattgtttttccaacagtatttgttccaataaatattaaaggaaaagtgtccctttatagaccgtctaacaaaaaattagattttgagattccaatttcattatctgatgctactactttgctcatacctaaaaaaagtttggcaggcggtcgctgggacattaatatggaatggcaatatgaaggaaagtcttatttgtccaaagaaacaatatacatcaattagtcaagaagaataaaacttttaagtttacagtaaactttaagactttggacttctggacattaccctacaaaaaatgctttactctgcctttatttttggtttaataagtagttttcattgcattggcatgtgtggtcctattgctatgatgttacctgtagatcgcactaatcagaccaagaaagcaattcaaatcatcacgtatcatttaggaagattaacggcttacggtaccattggatttgtctttggactgctggggaaaggatttttattggctggtttgcagcagaatttatctatttttattggcgtagccatgattttaatagttttgattccagacaaaatttttgcgaaatataacttttcaaaaccagttttcaaattgatttctaaaattaaaactgctttaggaagtcagtttagaaacaagagttttaaatccctctttaccattggtttactcaacggtttcttaccatgcggaatggtttatgtcgctttatttggagctattgctatgcaaagcgaaagtttgggcgtcttatacatgattttatttggattaggaactgttcccttgatgagcagcgtggtgtatgtcaactcctttataaccttgcccattcgcaacagaatccaaaaagcaattccttatgtggcggtatgcattggttgtttatttatcttgagaggattgggattaggaattccttatatttccccatctaacatgagcttgtttattcaagctgatccaaactgtcactaaccttttcgcaatttttcatataaaaagcacgctgaatggcgtgctttttatatgaaaaaggttaaaaattatatcgtcatcgaaaataattctgtttccggcgcttttcttttcaatcgcaaatcaaatgccatacagatattgcgaacataaggtttacccttttcagtaacctccatgaaattatctttaatgagtagtaaaccatcattttccatttcttttaactgatttactatttcggggatctcgttgaaatagccttccgtatcattccaagacgttttaaattggcacatcagattcaaaatatgttttcttatgatgaggtcttctgtggtcaatacgtgtcctctaaaaacgggtaatttatcccattctaatatttgataataatcttctagattttttacattttgagcaaaactataccaactatcactaattgcggaaacacctaatccaagcatcaacttcgttttagaggaactgtatcccataaaattacggtgtagtgtgcccttttgaaatgcttcatacaaactgtctgtttctaaggcaaaatgatccattccaatttcatgatacccattttcgaaaagtaattttttgccagtttcatataaccttctttttttgtcgtcttgtggaatgtcctcgtctttaaatccgcgttgtccatttccttttatccaaggaacatgagcgtaactataaaatgccaatcgatttggctgtaatgatttagttttctcaatggtatcaacaatatcttcgacctcctgaaatggcaaaccaaaaataatatcgtgaccaatagaagtatacccaatttctctagcccaaaacgtcacttttgccacattatgaaagggctgttctctatgaattgctttttgaacttttacggagtaatcctgtacgccaaaactgactcttctaaaacctaaatcatacagcttttgcaaatgttcatgagaggtattgttaggatgtccttcaaaactaaattcatgatttggcgctttcgtggcatgagagaaaataccgtttattaagtcctctaagtttttagtggagaaaaaagtaggagtgccaccgcctaaatgaatttcttttatacttggtttttctccaaggattttacaataaattgtccattctttcaatactgcttcgatgtaagggtgttctacgctatgattttttgtgatgcgcttgttgcagccacaaaatgtgcataaactttcgcaaaaaggcaaatgaatataaagactgatgccttctggtccattactttctatgaatgatttttttagagttgctgtccaaagttcgtatgagaaatcaacttcatcccaatacgggaccgttggataactggtgtatctgggtcctggaacattgtatttttgaattaaagaatttttcatagcagcgtcatttaatatttatcaaaagtaaaacgactgcgcaactattaaaatgataattatcataaagcgataagctagaacaaaaaaaagaggctgtctataatggacagcctcaagtttttatacgtgaaaaaatataattattcgattttcaagtttcgcaattgttttagtttttctttccacacatcaagactttctttatgaatagcaatatttttacgaacttctaatacgatagaattttcttttttagcattacgagtattggtaaaaaactgaatattgttttccaattgtaaaatttcattctgtacttcatcaatttttcgcatcaagaaaatcttttcattttccagtttgcgtgtgtcatgactttcagataaatgatccattctattggcaaaacgcatcatatctgtgtcttttttactcaaactcaatttttcaaacagagcatccagaattttattgaattttccctcaatgtgtcttcttgggaaaggcacttttccaaagtttttccaagtttcgatatgcaatttaatagcgtctaaatcagttttatgatctccactcaattggaattctctcaacgtttccaagtatgcttttttgttgtcaaaagcttctacctcttcgctattttcttcgtttttttgttcttttaacttttcaaaataatgattacaagcgtctttgaattccttccagattttgtctgaatattttcttggcacatgtccaatctgtttccactcctcttgaatttgcttcatgataggtgttgtagcagcaaaatcttggctttcttgcaattctttagccttgaggaccaaagcagtttttagacttaaattatcattttgatcttttttaatgtctttgtaaaacgaatttttaaacgaattgaaatttctaacagcagttttaaaactagcccaagtctcttcgtttacatccgaaggaacttttccagctgagaagaaagcggtgcgcaaagcctctactttttcgatctgtgccaaccattgagcgtgtgcattgactttttcagtcgccaaaacttcaattttagcaataatctcctttttcttttctagattttcaagttctgtacctctttgattttcaaataacacttcgcgtttgtcatgcatttgttttgttaaatcactgaacttgttccatatttcatcacggtgttctctcgaaaccggtccaatgtcttctttccaaattcggtgtaagtcttgtaattctctaaaagccttgttaatatcagcttcatttaccaattcttctactcgggctacaattttttgcttttgctctaaattgtgcttgaaatctaagtctcgagcctctcgatccaggtgtaaataatcgtagaaattttccacatgaaaatggaagttgttccaaacgtggttgtatttgtctttaggaattggaccagcatttttccatctttctcttaaatcattaaaatgtttcaaggtatctttgatgttctcttgtggattaattagctcttttagttcttcaacaatagccaatcgattctctaaatttgtttttaggttggtttgtaaactcttgaaatgagtgtttttagtatctctaaattgagagtagaacttatcaaattgagtttttaaaggcgagtgatattgaaaatcctcagtaggatcttggttttcagcaagaaattcctctttcttctcttctataaggtggttgtatttagctaagaatgctttttttacttcttctatgtgatccttaaaagacatcactttttcattggaaactaaatttttcaattcctcaacaagttgttctaatgataaggtatcataatcttgcatagaaatttcatgacgatctttaagtgtgtcgtcttcactttcctctgcgtttgtgtcagcaatggcgtctagagccatctggttgttagtgtccatagcagtatcagtgggggatacttcagcaggaacaactacgttatcttcggctggcatatcacttggttctgtttcaggtgttgcttcaaggtgttccttttggaattgatcggatgccgtagcattgttttctaagtttccatctgcttcgttttcctgacgagacaggttatcattcttttcttctaacattttttcaatgtgtaaggtttgtatttatatctattgcgaaagatactaaagcagtatgaaagtacaaaataaaaccattattaatagtcgttttatgttgaaaaatgttttcatttgaagccatttcctgctgttcgctgtattcccgattaataaaaaactaaggctgaaaaagccttgtttttctatatcgggagatgccgctgccatcagggctagggttttggtgtgaaattatgagttgttttcaaaaaaaaagtcccaccgaagcaggactaaagattttcatctacggcatatagccttattgtgataagattaaagattagaaattttaatcagttacaaacctaaacaaaaaatagttatgttgcaatgaggaaaaccgtaaaatggctaattattttatacgtatttttcaaaactcttacaaaacacagattgaaatggcaaaaatattaggattagatttaggaacaaactcgattggatgggcgattgtggataaagatggaaatgatttttctctagtagataaaggtgttaggatattttcagaaggagtaagcatcgaagcaaagacaaatagtgaaagttctaaggcagccaagcgtactgaatttagaagtgctagaaaattaaaatacagacgaaaaatcagaaaaattgaattactcaaagttctttctgataatgacttatgcccaaaattatcaaatgatgaattagcagattggagatataagaaaatttatcctcaaaatgatgaattcagattctggttaagtacagacaatcaagacgatgaagagaatagaaaacttcaaaataaaaacccatataaattcagatttagggcagcaaaagaggaacttgattttagtaaaaaagaagatagatatattttaggaagagctttttatcatatcgcccagagacgaggttttttgagtaatagattggataattctgataattctattatcgaagaaaagaattctgaaataacaagtataattaatgatgcaaattcaattcttgagttttcagaatctttctcagaatttttatcaagttttgacaaagatgaagtaggtaataaacctttatttactctatcaagagcttttaatgcaattataaaggaaaattcaaattccatttatgcaggtgtaaaagaaaaatttcatgaacgactaaataaaaaagaatttctaggactagttaaacgtgcaattagtgatttaacagaaaaaatattggaagaaaaatgttccactttaggagaatatttctatctattatatcataatggtgaaaaaatacgtggcgagtatacacatagaattgaccattatttaactgaatttaaatttgtctgcaacagacaaaatattccgaatcatataaaagatgcgattgaaaaggcaattttttttcaaagacctttaaaatctcaaaaaggtttggttgccaaatgtccgcttgaaaatagaaaagcatgtgtgccaatttctcatcccgattttgaagaattcagaatgttaagttatttgaataatgtgaaaattaaattgccaacagatgaaaaattaagattattaactgaagatgaaagagaacaaattcaatctttatttttcagaaaatctagagccaattttgatttctcggatattgcaaaaaagttaactccaaaaggattagttcctaaatattataaggacaaacaaatttcaaatgaaaacgttttgtttaattatactttaggaagtaatgttgcaggatgtccgacgattgcaaatttagttgatgttttcggtgcagattggaaagagagtttacttttaaattttgtgaaaaatacaaaaacacaaggtgatttgaaaatccaaaaatcaattgaagatatcattgatgatgtgtggcacgttttattccgatatgataatgaagcattgctaaaacaatttgcaattgaaaatttgaattgcgatgaaaaaacagcaccaaagttttctaaaataaaactgaaacaagattatgggtcattgagtttgaaagcaattcgaaatattctaccgtatttaagacaaaatcttatttattctcatgctgttttcttggcaaatatgaaaaatattttgccgatggaaatctggaataatgaagaaaacagaaatgtaataaataatgagattacttcaattataaaaaagtataagttatatagcaatgatattgatattgttaacggattaatcaagaatgtaaaaaaagaaaatggaacttggagttcaacaaataagttcgttgcagaagtttaccgaaacggattagaaaaacaagtaaaagacttttttggaacaaaaaaatggaacgaaatgccagaaatcttacaaattaagattttatctgaatgttttgaattgttttctaatcaaatgaagctcaattcaggcagaggagaatttgccaaaaaacagacgatagatgaaattttaaaaacttttttaagtgataattttaatgttaccgaagaaagtttgaaaaaattataccatccatcagcgattgaggtttataaaaaagcaaatagaagtaatgttgacggtaagaagtatttagaaagtccgttaatttcttccattaaaaatccaatggcaatgcgatctttgcatcaattaaaaaaagttgtcaatcaattaatgaaagacgacatgattgatgaagaaactttgattcatatcgaaatgcccagagaattaaattcatctaatgaaagagttgctataagacaacggaatgaaattttaaaagacagaagaagtaaatatagcgaagaaataaaatcaatttttagaggcgatcttgaagttgaaggttgtaaggatgcaaattcaaatgatagcaattacgaacctactgatactgatattgtaaaatatcagctttggatagagcaaaacaaagtttgtctttatacgggaaaaacgatttgtttatcggattttataggcaaaaatcctaagtttgatattgaacatactattccacgaagtagaagtttggataactcacaaatgaacaaaactttgtgtagtgctgtgtataatcgtcaaaccaaaaaagataaaattccatttgaatgtcctaatcatgaagatatcttaccgagaataaaacattggtatgctaaatataaaggaatagaacaacaaatcaaagatttatctaaaaaagtaaaggcagcatcaaccaaagataagcgagataagtatattattgaacgaaccaaattacgatttgaatattcttattatttcaagaaatacaaatcatttattatggaagaagttccagaaggatttaaaaacagtcaatcggttgatattggcattattagtaaatacggtaatttatttctaaaaacggttttcaataaagtctatccaatcaaaggaaaaaccacagcaaatttgcgtcagatgtggggtttaaatgaaaaatcaagagataatcatgcacatcacgctaaagatgcagttgttgttgcttgttgttctagagatattaatgatgctcttgccaattattatcacgatttagaacaatttgaattttttggcaaacccaaaccatcattctcacacagaattccttgggaagattttcataaagatgtcgatgatttcgataataacacattgattagtcatcacacaccagataatttgcctgttcaaagtaaaaaagccattcgaaaaagagggattattcagagaaatgaaaagggtgagataaaatacaaacagggagataccgtgcgcggcgcattgcataaagaaagtttttatggagctattttaagagaagaaataaataagaaaacaggagaaaaccaagaaattatcaaatacgtaaaacgtcaaggaatcgaaatgtttaaagatgcagatttgaaaaacattgttgatgataaaataaaagaaattgttagtagtggacgagaacatgaaagattaatcaaaaaagaaattgaagaattaagaaagcaattaaaaaacgttaaagaagaagaggagcaaccaataaaagatgcaattcaagtttttgaaaataaaatcaaaaatgatatatatgttttaccaaacaaaagcggaaaaccagttccaataaagaaaattcgttattatacaagtgatgtaaccaatccgctattcataaaaaagcatcgcgatgtttcaagacacggacataaacaattttatcacgctaagaatgatgggaattattgtatagcaatttatgaaggattggataaaaaaggtaaaatatcaagaagtaatcaacttattaatattattgatgcaggaaagtattttaaattaagcaatgaagataaaaagctatatccaattgctccagaaaaagatgaaaatctaaatccgttaaaatacatcctaacgaaagggaaaatggttttaatctatgataaatctccaaaagaattatttgaaatgtcagcagataaattattagaacgattatttgaaattactcaaatggatgttgaaaaatatgctgaaattaaactgttacatcattcagaagcaagagataagaaacgaataaccgaatttatgggcttaaagacaggtatgaaaggtggaaaaaatgttggagaacataaaaaatatccatggattaaaattggtgcaaattcatttgattgtttagtggaagactatgaattcaaattaactcctactggaaaaataaaatttttaaaataatttagtggtttgtcattccgccgagggaggaatcaaataacgataggaatttggttctttttcaagaaaccaaaataaaacaatatgttgaatttactggtaaaatggaaaattatgtagtggtttgtcattccgacgaataaggaatcacataacgagagcaactgatgtgatccctcctctggtcggaatgaaaaaaaaaataaaagttctttgacatacagtttttcaacgtcttaagcatctcaaaccacaactgaaagttatggcgtccgcccagcagggacgcgagaactttcagttgtggtttgattaaagattagaaaacacgatattctgtttgtgttttctttacaagtattctcagttgtggtttgattaaagattagaaaacacgatattttttcggtagtactcacactttgatctactgttgtggtttgattaaagattagaaaacacgatattagtagcgcctgcttttagatcaggaaacaagttgtggtttgattaaagattagaaaacacgatattttcctaaaggttctacaattagcgttacctgttgtggtttgattaaagattagaaaacacgatattggtgctattgtctatgtaaaaaggaccaaggttgtggtttgattaaagattagaaaacacgatattatagaaaatacgatagatcaactatttatggttgtggtttgattaaagattagaaaacacgatatttcatgcaatatcataatatactgcatgatggttgtggtttgattaaagattagaaaacacgatatttggaacatcaaaaattaaccaaagacattggttgtggtttgattaaagattagaaaacacgatattaaaaaactcgatgtgcaaaagaaagggattgttgtggtttgattaaagattagaaaacacgatattgcaatgatgtaaataatggatttaacatgtgttgtggtttgattaaagattagaaaacacgatattacttgctaaattcgcctttaaatctagttggttgtggtttgattaaagattagaaaacacgatattaatttcactttttcgcattgcaattaatatgttgtggtttgattaaagattagaaaacacgatattctttggtttacccacatttatccccttaagttgtggtttgattaaagattagaaaacacgatatttggctttggctttttgtgtttttattttaggttgtggtttgattaaagattagaaaacacgatattggtataaactacggtaatagaataaataagttgtggtttgattaaagattagaaaacacgatattttttcggtagtacttacactttgatctacagttgtggtttgattaaagattagaaaacacgatattattactggtttgaatacttgcatctcagcagttgtggtttgattaaagattagaaaacacgatatttgattgttctacagaatataattcagatggttgtggtttgattaaagattagaaaacacgatattctcaaggattaacatataaagttggctgtagttgtggtttgattaaagattagaaaacacgatattattgatactctaatgcccttggcgtagaatgttgtggtttgattaaagattagaaaacacgatattttttcggtagtactcacactttgatctactgttgtggtttgattaaagattagaaaacacgatattagtggccgtatcaatatagatcgtgttccagttgtggtttgattaaagattagaaaacacgatattacggtcatccaagaagtgcgcaaaggtgctgttgtggtttgattaaagattagaaaacacgatattggtctgctgctattcaaaatgtaatagcaggttgtggtttgattaaagattagaaaacacgatattatttggatagttggtgacggttacggaggtgttgtggtttgattaaagattagaaaacacgatattgcaagccaaatctaattttaattggtcaaggttgtggtttgattaaagattagaaaacacgatatttcaattacaattccagttgagttattaactgttgtggtttgattaaagattagaaaacacgatattaattgagaatttaactaaggacgctttaaagttgtggtttgattaaagattagaaaacacgatattcgtagcattagacaacacggcaatagtcacgttgtggtttgattaaagattagaaaacacgatattttaaattgctctaaccattcaataagcatagttgtggtttgattaaagattagaaaacacgatattctttagatacaattgaaccattataaaatagttgtggtttgattaaagattagaaaacacgatattaatggagtgttaacgcccgttccaaataatgttgtggtttgattaaagattagaaaacacgatattgttcattattgtagcagttaaggaaaagtagttgtggtttgattaaagattagaaaacacgatattataaataaataatttgtatatcaaatttaagttgtggtttgattaaagattagaaaacacgatattacgttaccttataataataaacaaatataggttgtggtttgattaaagattagaaaacacgatattaaaactttcaaataaacgaaggtgcattaagttgtggtttgattaaagattagaaaacacgatattctttttaaagaactttacctcaaagaaaccgttgtggtttgattaaagattagaaaacacgatattgttgtatgcattattggaccactttcgctggttgtggtttgattaaagattagaaaacacgatattgggcaaggtggtgtttattgccctacaactgttgtggtttgattaaagattagaaaacacgatattaatcccattcacgagcgaagcgtctccgtagttgtggtttgattaaagattagaaaacacgatattcacgtttgttttttaaattagcacgttgtggttgtggtttgattaaagattagaaaacacgatattaaacgatactaaattgaagtgtaaaagatagttgtggtttgattaaagattagaaaacacgatattctgttacaggtacaggtactgttaatagaagttgtggtttgattaaagattagaaaacacgatattgtagtaagttcacgtttggtagttcgcaaggttgtggtttgattaaagattagaaaacacgatattccccaaatttgttaaccatgtttacaaatggttgtggtttgattaaagattagaaaacacgatattacgtttttcaaagcattttgagcgattgctgttgtggtttgattaaagattagaaaacacgatatttatgctttggagttataatgtttctaaaatgttgtggtttgattaaagattagaaaacacgatattttaataccgcatttagtgatgtcaaaaatgttgtggtttgattaaagattagaaaacacgatatttatccagttccctttgatcgtcctcacttggttgtggtttgattaaagattagaaaacacgatattaagatcacgttcgcacagatggaacttgtggttgtggtttgattaaagattagaaaacacgatattacagaaccacggtagataagatcaactcaggttgtggtttgattaaagattagaaaacacgatattccaactaaattattaaccaattcgttaatagttgtggtttgattaaagattagaaaacacgatattgaatatgtatttaatgacgatgctccggcagttgtggtttgattaaagattagaaaacacgatattttttattcccgacatccttcgtcttgaatagttgtggtttgattaaagattagaaaacacgatattagttggcttgttatcttctgattttcatagtattaaaagtaaatatcgtataaaaaaatgcctctttattggtttgataacccaatattgaggcatttttttgtttgtagcgaccgccccaccctttatgcattcctccagaggaggggaaatttagaacagttcgagttgtgtgggttgcggtgcttttgggacttcagctttgccccaaaagtttaaaatatttccaaattgcttatccgtaattcgtaaaacactcacttttcctaaaggtggtaagagtcggtgtatgcgtttttcatgtacatcagcactttcactgctcgcacaatggcgcacataaacagaatattgcatcatgctaaaaccatctttcaagagattacctcgaaattgtgaggcatttcttttatcttttttggtttctgtcggtagatcaaaaaatacgaacaaccacattattcgatatccgttaagttccataatttaggatattttatttttttacggtcaccggtataacactgttggagtgaactagctgttttttgtaatcctaccatcaacggacttttctcctctttgaaataaacagtttgtgtaagtaattgcaatagttctgctttgattgccgtattaagttcttgttcttgataacgtttcataatatcaaaaactttttcatcaacaataggtctaaacggttccataatatcatctgcaagagcaaaagcattatacttacttttgtgatgaatccccaaagtatttaataatccgcttccagaaagtgctcgtgcggtagcagctctcaagatagcataaccataatttaaaaaattatttggataatcgccatatcgctctctttttataccatctttttcatgattgggtagcgggaaatgtttccaatactgttgtgccgcaacgccttccatatttgatgtgtctccgctcagaaccttactggctagaaattcaaaagtgtttttgctagccgttattttggctaataattctccttgatttttaattttttcaacaatagtttgctgccataattgttttttaagtggaatggaagcttcaatctgatttttgaatatttcttgctggatgtggtggctgttgaggttgagaagcattccattgggaagatggttgctaccgcaaataataatagcggtattatgttcaacaacaagattcatggcaggaatactcaagtagatttcagcatgatcaagtactagaaagccaatatcttctattggaatagcactttctcttatttctgatttgattactaattgttgattttttgtagtgattgaggatttgttttcgatgagaattgttcttttgatcataatttaagtggttaaattaattgcaaataattgattttcaatcaaattaaagcattaagtatttaactgctttacggtattcctcaatttgtattttatttagtcacaaaaaaaatcgtcttgttttgaaactgttgaactgttaagaagtaattcagttttaaaacaagacgatttatatgtttacagtaaaacttttttattacttattccaaattttccatgctttttcggcttgaaaaatcagcatgtccaaaccgtttttaattttggctccttgttgttttgctttttttaggaattgcgtttcggcaggattataaatcaaatcataagcaatatgcttgtctgtgaaatattcatacgggattaatggaaaagcttctacattaggacttgttcctactggcgtagcgtttatgatgatttggtaattatcaaatgtggtcgcattgattcggtcataatcaatcccattttctttcgcctctctagaaacaaaggtgtagggaatgtttagttcatccagagcaaaagctactcctttagatgcgcctccagtacccaaaatcagggcttttttatggtgcggttccaataacggttgtaatgattttttaaaaccataataatccgtattgtatccttttagctttccttttttggtaattttaattgtattgacagcgccaattagcagtgcttttttcgaaagtttatgcaaaaatggaagtactgcttctttatagggaatagtgacactcattcctttgagatcaggcgtgtttttaacaacttcgggaaaggcatttatttctggaatatcaaaattctcatacgtgcagccttcaaaattttcactatcaaatttttctgtaaaataccctttcgaaaaagaataacttatattacgacccagtaatccaaagcgctttctaacgatatcaatcattattattttttatgttttgcaatataattctgtaccattttttttgcccaaactactgggaataaatcttctaaaagaatgtaattctcaaaattcaatcgcaaggcattgcttaaatggaattttgcttttgtattatccgttagcataaagtacaaccctgctaaacggtattcgacttcattctcttctggaaaatattcggatgcttgtaataaagtctgaatagcactttcgaattctcctaaaaattgtaatatgtccacccagaacaaccaagtttctaaggaatgatccccaaattctactgcttttctatagccaaactctgcttcttcaaagaaattcatttgtttatttatggaggcaaaacgcttccagtacaaccgattttggttgtcaattgctaatgctttattgacataaaacagcgccttttgaaagtttttttggcgaacatagaaatcagttatagcgatccaacctttgtctaaaaggggatcttcatgtactgtttcattaaagtattttaaggctaaaacagagttaccaagcttttcatagcattttcccattcgcagtagcgcatacgaagtagcatcatccaattcgattgttctgctgtagctttcaatagcttcttcatatttttttaatcgttcaaaagctttcgctttttccataaacgctcctaggaattcatcgtcaattaacgtggcgtaatcaaaggcgcgaatggcattttcatattctttaaccccataatgtaagcgacctagttggtgccaagcgatttcgctgtatggatttttatcgatgtatttttttaaataactgatagcctcttgattttgatctaaaaattcaaaacaatacactacgttatacagtgcagattggtcttctaaatcctcttctaaacacttgatgaaactttcttttgccatttcaaggttgtccataaaaagatattccataccaattaagttataaacatcagcattgtcatcagtatattttaatgcgattcttaataactcaacagctttttcgtgttggtctcttttcgagtatatattcgctttttggatgtaaatttcttcatttgttggctcaatagcatacaattcattcaataatttttcggctaattccagtttgtcatcaaagactaacatctccacttgaactaatttaagtccagttgattttgggtgttggtctagtgctagttttaacgctttttttgccaatgcggacttacccatatcgagataatgaagaataatttcttcaaattcttcagagtcaaaaaagagcactttgttggttttcaacatcgactcaaatttagacagggataagttatagtcttcttcttcgttgcttaattgcatactgtgtgtttttaatttagcctaaataaatttaggtaatcgtacgtgtactgtgaggtaaagttggaattgttgtgaacaatttaattaacaaaaaagttttggttaaaacagatcccatagccctgataggagtggaaatccttttactttttgctgccaaaaagtaaaagattgtatcggatagcaggattagctcccaattttttttaatagttttgaataagtgttttgatgtttcttcaatactactaaatgttgcaatcaaaaatcgttaattatcattcttcaatcattatttcatccattacttcaagtataatgctacaaccttctcttatttcttcttcagaaatagtaagtggaggcgtgatacggattgcagttccttcaaatagtagccagaataaaatgagtcctttgtcttgacatttgagaatcactttattagttgtatcggcacttttggtcattgcggcaagcattaaaccttttcctctaatctcttctatcaaaggatgtaccaaaagtgatcggaatagcttttctttctcgatcgcttcggtcattagattggtttcagttatttcctgcagagttgccaaacaggctgacgcaatgacagggtgacctccaaaagtagtgatatgtcccaattttggattgtcgcttaataaatccatcattacagatgaagccgtaaaagcgcctactggcataccgccacccattccttttcccatgactagaatatcaggaaccacatcgtaattttggaatccaaaaagttttccggttctcccgaaacccggttggatttcgtccagaatcattattgcgcccatttcatcacaacgtagacgcacttttttgagaaaatcattgtgcggctgaataaatccagcaccaccttgaatggtttccagaataattccggctgttttggtagttatttttaataaatcttcctcattattgaacgtaataaaatcaacatctgggatcaaaggacggaagatttgcttgcgttcttcaaatcccataacgctcaatgaacccatagtgttgccgtgataggcattgtgacacgagatcaattggcttctccctgtggttcgtctggcgagttttagagcgccttcgatggcttctgtgcctgaatttaccaagtacgttttgtctaaaggagcgggcaggagtgatgctaataatttgcaatattctactgcaggactttgtgaatattcaccataaaccatgacgtgagaatatttatcaagttgatctttgatggcttgattcactcttggatgttggtgccctaaggcacaagcggaaactcctgccacaaaatctaggtattttctagagtttgttgcataaatgtaagaacctatagcgtgtgacacctccatacctagcggatagggtgaagtttgtgcttggtattttaaaaaatctgtgttcacaaattgttttttaatcgtttatttgatacttttttaaagtctgtaactgttcaatgtgactatttcttaaccttctttttgtcataattcaaggtttcttttctgattttcatcggaatagcttcttttgcttcggccgcttttgtcgctttttcaattttatcattgtcttcattttcttcaggaggaaaaatatcgtccttagattttatccgttcgtctgcgcgccaaactaacccccgcagttttctggcattttcaggtaaatcttgttcggggaaaatatcgccatccacttgctgaaaaaaagtaatggtttcgatttcatttttttctaagataagattgattttactactcacatttttattgattccaataagttcttgcgcttcgttccgcatataatagatgacttctgcattttttacaatatcgacatcatgtaattttccttcctcaaatttaccgtagagattttgtcctttgacctgattatagccagttcccagagtatctcttgaaacgataaaggtattttcgagtacttttagcgaatctagtttttgtgtattattattgcctatcaagtgcatgacgtcaccagttatttggttttcggcgttccaaagtattggattgccaatcatttttgtcaaagcagtttttgaactcgaatgtattgaatcacatttgccgctcatatccgttttataaaaccgagcattattgaatgctctaacgattcggtttccttctttaccggtaaccattaatttttttccgtgaatataaacagagtcgttttccacaaaattcactgctacagctcttttagtcacgtacatagagtctagttttttgtatacttcggcataatgtccttttacgattccgcgattgatggagtctg

SEQ ID NO: 4144 - DNA, 24383 bp, synthetic construct
  misc_feature 1..24383: note = Synthetic
  source 1..24383: mol_type = other DNA
gattattttatatacaataccaatgtatgttgccggtttcttgcaagcttctatgtggaaacaatttaatcctgatgggacgttaacttatggtaacttccttgaaacggtaactcaaattatgccaatgtattggatgagagctattggtggaactctttatttaattgggatgttttctttagtgtataatattatccaaaccgttagattgggttctaaaattgaagacgaattagctgaagctcctgaattaattaaaattagctcaggtagagttaaaggagagaaatttcacccttggttagaaagaaaacctattcaattgacaattttagcaactgttgctattttaattggaggtgttattcaaattgtacctacgattatggtgaaatcaaatatcccaacaatagccagtgtaaaaccttattcaccattagaattggaaggacgtgatttatacattcgtgaaggttgtgtaggttgtcattctcaatctgttcgtcctttccgtagtgaagtggaacgttatggaccacaatctaaagcaggagaatttgtatacgatcatccattcctttgggggtcaaaacgtacaggtccagatttgttaagagttgggggtaaatacaatgataactggcattttaaccatttttggagccctcaaagtatatctgcaggttcaattatgccaggttataaatggctttttgataataaaccgatggatatttctctaacgcaaagcaagatgaaagccatggtgacacttggagttccttatactgatgctcaagttgccaatgggttgaatgatttaagagcgcaagccattaaaattgaagaaagcttgaaaaacgatcctgattttgtaaaaagttataatgatagcaagaaaaaagcagaagcaaggggagaaaaatttattccaatgaatgaaagggaaatcgttgcaatgattgcttacatacaaagacttggaacagatattaaagtaaaagatatcgctaaaaaataaagtcatgttcgaacaaattaaacacaatatggagactatcgagggagttgcgatatatccaatcctatcgttattaatcttcttcgtctttttcattggacttggaatttgggttttctcttataaaaaagaaaagattactgaattaagccaaatccctttgaacgacaataaaatagtataattttttaaaatttagaaaatgaaaaaattaattccagcatatgtaagagtaccggttattttctttgctgtatttggagcaatggagtattttattgactcaggtgacagaccggcttttataaaatttccaatggttgctgtctttttgtttgtatttctattccttttaatagcgatcgaaattactatgagcgcagttgataatattacctatcaattgatgacagaagaacagaaacaaaaattggaaaatgttacttcgatcagttttaaagaaaaagcatggttcaaaaacttgatggaaagcttaacaaagtcagtgccattagaaagcgaagatcaattattattggagcatgattatgacggaatcaaggaattagataataatttgccaccatggtgggtatatttattctatgcttgtattctttttggggttgtttatatggttcgatatgaggttttaggagccgacaatcaagaaatggagcttaaaaaagaagtggctcaagccaaaattgatattgctgaatacatgaaaactgctccagatttgatggatgaaaaaacagttgttttattgacagaaccagcagatttggcagctggtaaagagattttcacaaccaattgtgtggcttgtcacagagctgatgccggaggacaaattggtccaaacttaacggataatcattggattttgggtggcggaatcaagaatttatttcacaccattacaaacggtgggcgtgatggaaaaggaatgattgcctggaaaggaactttgaagccaaaagaaattcaacacgttgcgagttatgtattgtctttacaaggaagtaatccaaaagatccaaaagcaccagatggtgaaatttgggttgatgagaatgctccaaaaacagatgctactgttactttaaaaacagatagcactccaattaaaaaataaaaaaatgtcaaaattaccagacgaagcttttagagataccatcggaacgattgacgaagaaggaaatcgaaaatttatttttcctaaaaaaccttccggtaagttttacgattatagaaagtgggtcagttattttttgttgattgttctggttgctaatccttttgtaaaggttaatggcaatcagttcatgatgtttaatgtgcttgaaagaagatttaatatttttggatttcctttttggccacaagatttttatcttttcgttctttttatgattgttggagtcgtattcgtgattctttttacggtgatttttggacgaatattttgcggatggatttgtccgcagactatctttttagaaatggtatttcgcagaattgaatattggattgaaggagatcgtggcgcccaaattcgtttagaaaaacaagaatggaacgctgaaaaaattagaaaaaaaggtcttaaatggtttgtatttctaatcatttccttttttattgccaatgtttttctggcctatcttatcagtagtgataccttgtttttaatgattgaagaaggaccggaaaatcatgtaagcactttggcttcactattgatttttactggtgtattctattttatttttgcgtggtttagagaacaagtttgtattatagcctgcccttacggaagattgcaaggggttttattagatgataaatcgataaatgtcgcctatgattttgttcgtggtgagaaagaatcaggaagagctaaattcaataaacaagaggatagagtcacaactggaaaaggagattgtattgattgtaaacaatgtgtaaatgtttgtcctaccggaattgatattcgtaacggaacgcaattagaatgtatcaattgtactgcttgtatcgatgaatgtgatactattatggatagtgttggattacccaaaggcttaatacggtacgcttctgaagatgaaattgagaaaaaaatcaagttcaaattcacaccaagaatgaaaggctattctgcagtattgtttattttgacaggcattcttataggattattatttttacgcacagatgttgaagccagtatcttgagattaccaggacaattgtttcagcacaaaggagataacatcagtaacatctatacgtttaaaattatcaataaaaccaacaatgattttaatgatattcatttcaaattagttgggataaaagggactttaaaagtagtgggaaaacaggatcttaaagtgcctaaacaaggtatgaatggagggactttatttgtggaaatcaatcaaaatttattggacagtgataaaacaaaattaaaaattgatgtctataacggtactaaaaaaatagagacaagcacaacgagttttttaagtccgcgaagttttgattaggaaattaggtttaggattaaaatatataaataaagcaacatgaaatttaattggggaacaggaatcgtcattgcatttggtctgtttatgaccttcattttgtattttgttttcaaagttcaatcggattcaaaatatgataatgaattggttgttgaagagtattacaagcatgatgtccattttggagatgagatgatacgaattcaaaacgcacatgatttagctcaaaagccaataataacgactacttcagagggtgttacaattgtattcccagatgtatttgttccaaaaaacattaaaggaaaagtgtccctttacagaccgtctactaaaaaattagattttgaaattccaatttcgctatctaatcctactttgctcatacctaaaaaaagtttggcaggcggtcgttgggacattaatatggaatggcaatatgaaggtaaatcgtatttgaccaaagaaactatatacatcaattagacaaacacaatgctatacacagctttccttttcggtttgataagtagttttcactgcataggaatgtgtggacctattgctatgatgttaccggtagatagaacgaatcaagcaaaaaaagtcactcaaattatcacgtatcatttaggaagattaacggcgtacgctactattggttttatttttggattggtgggtaaaggtttttttatggctggtttacagcagaaattatctatatttattggcgttgccatgattattatcgttttaactcctgataaattatttgctagatataatttttcaaaaccagtttttaaagttatttccaaaataaaatcgactttaggaagtcagtttaaaaacaagagttacaaatcactatttactatcggtttgcttaatgggtttttaccttgcggaatggtttatgtagccttatttggtgctattgccatgcaaagtgaaagtctgggggttttgtatatgattttatttggattaggaaccgttcctttgatgagtagtgtggtgtatattaattcatttttgacagtttctattcgaaacaacattcaaaaagcaattccttatgtagctgttattataggcgtattattcatcttgagaggattgggattgggaattccatatatatcaccatccaatatcagtttgtttgtacaggcaaatcctaattgtcattaatttttgattcatagtacataaataaaagcacgccattaagcgtgcttttatatttttaaacagcaataaacactagattgtcatcgaaaataattcggtttctggagctttcctttttaaacgtaaatcaaatgccatacaaatattgcgaacataaggtttccctttttcggtaacctgaatagtatttttatttatgataactaacccatcttgttccatttcttttaactgaactaaaacttcaggaatttcttcaaaatactcttggtttttttgccaagaagtttcaaattggcacattaaattcaagatgtgtcttcggatgatgaggtcttcatcagtcaatagatgccctctaaaaacaggtaatttgtcccattctaatatttgataataatcctctagattttttacattttgagtaaaactaaaccaactgtcactaatagaggaaacacccaatccaatcattaattgagtttttgaggaactatatcccatgaaattgcgatgcagttttccgttttgaaaagaatcatataaactgtccgttttcaaagcaaaatgatccattcctatttcatgataaccattttcatataataattttttgcctgtttcataaagtattcgctttttatcatctttaggaatatcttcatcattgaaaccgcgttgtccgtttccttttatccagggaacgtgtgcgtagctataaaaagccaatcgatccggttgtaatgattttgttttctcaatggtatcaattacatcttcaatttcctgaaatggtaatccaaatataatatcatgacctatggaagtataaccaatctctctggcccaaaaagtaacttttgcaacattatgaaaaggctgttccctgtgaattgctttttgaactttttcagaataatcctgaacaccaaagcttactctgcggaaacctaaatcatagagtttttgtaaatgttcatgcgttgtattatttggatgaccttcaaaactaaattcatggtctttagctttattggcatgtgagaagattccgtttattaaatcctccagattttttgttgagaaaaaggtaggggttccaccgcccaaatgaatttcttttatagttggtttttctccaagaatcgtacaatagatagcccattcttttaaaagtgcttcaatataaggatgttcaacaccatggtttttagtgattcgtttgttacaaccacaaaaagtgcataagctttcgcaaaaaggcaaatggatatacaaacttattccttcagcactattacttgatgtaaatgatttttttaaactttcaatccatgttttttctgaaaaatcagtatcatcccaataaggaaccgttggataacttgtgtatcgaggtcctggaacattgtatttttgaattagcgaatttttcataataagatcattttacacaaccaaaagtaatagtactacttataatttaaaatgataattatcatgttaaaaaatgcatttataaaaaaaagaggctgtcttttggatcagcctctcttagtgaataataattaatagtttaggaaatgcaatctgtaatgagttttgtccatttttgggctaatacatggtcttcgtaaaggcattcttggtcaattatttcgttttcaatagtgtagaattgaatcagttcttttttatgattttctttataatcaaattcaaattcaatttttgtgattttagtcgaattgttttcatttgtcgcaaccagtttacaagaattgacggtattcaaattgacaaaagaaactacttcttccgtggagttaaaatccatcaaaagaaatcctttatttttttcatccaaggccaatacttttttgttttgtgattcggttaattcaaaattgaaatgattattctggctgtattttttctttatctctttgattttgtttttgttaatgacattggagcgaaatacaaagaaaagaggaatagcgataagtattgttattattaggcctattatagttacggatgtatccatttttttattttttgagttatttgtaaagcatgataaattcgactgaataccaaaaggaatccattcgaaaaaaagataagcatatcttttaattactaaatcagggctttaaatcaccaaaaataatgaaaaggaaagagtaggagcgaaaccatttcacatcgattaatgtcttgtttcgcataacgactaaaaggttttattactttaaaatctagaattgcaacttgaaatttttctagatatttggcaattgtataattagttgttttatgatataatacaaagatactggtcgcgtgaggttgaataaatactgaagaatggatgctgtcaggagaaaaggaaggattgtttttttctatttcaattttttcaaccgcagattcgtttgcattaaaagcaaatagcaaaactattgaaagtccaataaaaaaaactgttttctgaatccaattcattttgcaaatttaaaattaacagctgacttttattaattttttctgataaatgaacgttaaaatttcaaagcaggatattcttttgcataaaaaaacctcgaactatttaaagaacgaggtttgtaatttaaaaaaattgatgaaaattattctattttcaaatttctcaattgttttagcttttctttccaaacatcaagactttctttgtggatggctatatttttacgaacttctaatacaatagaattttctttttttgcatttctggtattagcgaaaaactgaatattattttccaattggaaaatttcattttgcacttcctcaattttacgcatcaggaatattttttcgttatccagtttgcgagtatcattactttctgatagattatccattctattggaaaaacgcatcatatcagtgtcttttttacttaaactcaatttttcaaaaagggcatccagaattttattgaattttccttcaatatgccttcttgggaaaggcacttttccaaagtttttccaagtttcaatatgtaattttatggcatctaaatccgttttgtgatcaccagtcaactggaattctctcagggtttctaagtaggcttttttattgtcaaaagcttctacttcttcgccgttttcttcatttttttgctcttttaatttgtcaaaataatgattacaggcatctttaaactctttccaaattttatctgaatattttctaggtacatgacctatttgtttccactcatcctgaatttgcttcattattggagtagtcgcagcaaagtcaagattttcctgtaattctttggctttagcaacaagcgctgttttcttgcttaaattatcgttttgatctttcttaatatctttgtaaaacgaatttttgaaagaattaaaatttctaactgcagttttaaaactcgcccaagtttcctcatttacgtccgaaggtacttttccggcagagaagaaatcagttcttaaagcttctattttttctatttgggccaaccattgcgaatgagcatttactttctcagtagctaaaacttcaattttagcgataatctcttttttcttttctaaattctcaagctctgttcctctttggttttcaaacaaaacttcgcgtttatcatgcatttgcttagtcaaatcgctaaacttattccatatttcatcacgatgttctctagaaacaggtccaatatcttctttccagattctatgtaaatcctgtaattctctaaatgctttattgatgtcagcttctttcaccaattcttcaacacgagccacaattttttgtttttgctctagattgtgtttgaaatctaagtctcttgcttctcggtcaagatgtaaataatcgtagaaattttcaacatgaaaatggaagttattccacacatggttgtatttatccttaggaattggacccgcatttttccatcgttctcttaaatcattaaaatgctttagggtatctttaatattttcctgcggattgattagctcttttaattcctcaacaatagccaaacgattatctaaattagtttttagattcgtttgtaagctcttgaaatgtgtatttttagtatctctaaaaagagagtagtacttgtcaaattgagtttttaatggagaatggtattgaaattcttcatttgaatcttgattttcagccaggaattcttcctttttctcttcaagtagatggttgtatttagctaagaatgcttttttgatttcttcgatatgatcctttacagacatcactttttcattggtaactaaatttttcagttcttctaccagttcttcaagagataatgtatcgtaatcctgcatcggaatatcatgacgttctttcaacgtgtcatcttcactttcttcagcattagcctccgtaatagcgtttaataccgattgattttcagtttctatagtaggttcatcatgtgccaactcagcccctgcaagggttacaacattttcgtcaatagaatgaacagctacgctatcgttactttcgtcgattgtttcagtttccataatagtatctgattgatttaattcaagtgaattattctctaaacttccatctgcttccagcaggttatcattcttttcttctaacattttttcaatgtgtaaggttttattttttgtatcgaacacgaaagatagtgaaggagcatgaaatttcaaaataaaacctttatttagagtcgttttatgttaaaattttcttttttttgaagcaatttcctgctaatcgctgtatcttttttatctcaaaaaaaagagataaaaaaggatgccgctcttatcagggctagggatttagagtataatcacgatttttttctatacgatagttcaattctgctacaaaaaaacacttcttatcaagtggtttttttacttacatggagtagtgtacgaaaagaaggttttcttgttatttattccaaatttcccaagccttctctgcttgaaaaacaggtgtttcgagcttaagtataatattgaaaatatgtttgttaaacgaaaaagtcccaccgaagcaggactaaagattttcatctacggcatatagccttattgtgataagattaaagattagaaattttaatcagttacaaatctaaacaaaaaatagttaggttgcaatgaggaaaaccgtaaaatgggtaactattttctccgtaattttaaaaaattcttacaaaatacagattgacatggcaaaaatattaggattagatttaggaacgaactcaattgggtgggcgatagtggataaagaaggaactgaattttctcttttagataaaggggttcgcatattttcggaaggtgtgaatattgaagcaaaaaccaatagtgaaagttcaaaggcagctcaaagaacaggttatagaagtgctagaaaactaaaatatagaagaaaagttaggaagattgatttacttaaaattttatcagataataatttgtgcccaaaattgtctgatgaagaattatctgattggcgttataaaaagatttatcctcaaaatgatgagtttagaaaatggttaagtacagataatcaggataatgaacaggagagaaaagagcaaaaatacaacccgtattattttagattcatttctgttagaaattcacttaatctaaataataaagaagatagatataatataggaagagctttttatcatattgcgcaaaggagaggctttttgagtaatagattagacagttcggataactcgattattgaagaaaagaaatttgacataacttctctaatcaatgaatctcattcaatagttgaattttcagaaatatttagtgattttctttcttcattcgataaggatgaagctattgataaacctttatttacgttatcaagagcatttaatgcaataattaaagataattcgaaatcggtttatgatgatttaaaggaaaaattaattgagagattgaacaagaaagaatttcttggtccggtaaaaagagccataagcgatttatctgaaaaaatcgagaattcaggatgttcaacgttaggtgaatatttttacaccttatatgaaaaaggaggaaaaattagaggtgaatatacacacagagaagatcattacttgaaagagtttgaaactatttgtaaaacacagaatatttcaaatgaactaaaagataaaattgaaaaagcaatattttttcaaagacctttaaaatctcaaaaaggattggttgctaaatgtcctttagagaacagaaaagcgtgtgtgcctatttctcatccggattatgaagaatttagattgtatagctatttgaataatattaagataaaaactccaaatgacgataaacttcgggttttaaatgctgatgaaagagaacagattgattttttattttacagaaaatcaaaagccaattttgactttctcgaaatagcaaaaaaactgactcccaaaaatttaaaatcaggttattacaaagataaaaatagtaaagaatatgacattctgttcaattataatctaggaagtaatgttgcgggttgccctacaattgccaatttaagagaggtttttggcaaagattggaaagaatacttatattctaatttcttaaaaaatactaaaaccgaaaagaataaaatagttcaaaagacagtagaagatataattgacgatgtatggcatattttgtttcgttttgacaaggaagaacttttgaaacaatttgctattgataatcttagttgtgatgataaaacagcaattaagttttctaaaataaaattaaaacaagaatatggatccttgagtttgaaggctattcgtaatattctaccttatctaaagcaaaatttaatttattctcattcagtttttctggcaaatatgaaaaatattttaccagctgaaatttggaataatgaagaaaataaaagggttatcaataacgagattaattctattttagaaaattataaagtttatagcaataatattgagattgttaatggattaattaagaacattaaaaaagagaatgggacttggagttcagacaataaatttgttgccgaggtttataaaaaggatttagaaaaacaggtcaaagatttttttggcacaaaaaaatggaatgaaacaccaatagaatatcaaacagcaattttaactgaatgttttgaacttttttcaagtcagatgcaattgaaatcaggaagagcagaattcgcaaagaagaaaacaattgatgagattttaaaacaatttttgaatgataattttaacgtagatgcggaaggtttaaaaaaactataccatccatcagccattgaagtgtataaaaaagctaaaagaagtgaagaagatgggaagttgtatttaggaagtccattaatttcttctatcaaaaatccaatggcaatgaggtctctacatcaattgaaaaaagtagtcaatcaattgattaaagatgatttaattgatgaagaaacagtaattcatatcgaaatgccaagagaattgaactctgctaacgaaagagtgtcaataagacaatggcaagaagaattaaagaataaaagaaataaatatgctgaagaaattaaatcaatttttagaggtgatattaaaatggatggttgtaatgatgttataagtattgaatatgaaccaaccgaaaatgatattttaaagtaccaactatggattgaacaacataaaatttgtctttatactggcaaaaccatttgtttatctgatttcataggaagtaatccaaaatttgatattgaacacaccattccaagaagtagaagtttagataattctcaaataaataaaaccttatgttgttcgatttacaatagagaagtaaaaaaagataaaattccttttgaatgtagtaatcataaagaaatcctacttagaattaatcattggtttgctaaatataaaactttagaagaacaaattaaagatttatcaaaaaaggttaaagtagcatcaaccaaagagagaagagataaatatattattgatagaactaaattaagatttgagcattcttatttgtataaaaaatataaatcattcacaatggaagaagttcctgaaggatttaaaaatagtcaatcggttgatattggtattataagcaaatatgggaatttatttttaaaaacagctttcagtaaagtatatccaataaaaggaaaaaccactgccaatttaaggcaaatgtggggattagatgaaaaaacaagggataatcacgcacatcacgccaaagatgctgttgtagtagcttgttgcacaagagatataaatgacgctttggcaaattattatcacgatttagagcagtatgaattttatggaaaaccaaaaccatctttcgcacacagaattccttggaaagggtttaataatgatgtaaaagagtttgataatagcatattgataagtcatcatacaccagatgttttgtcaacacaaagtaaaaaagccattagaaaaagaggtataattcaacgaaacgagaaaggtgaaatcaaatacaagcaaggagatacggttcgtggagcattgcataaagaaagtttttatggtgcaattttaagagaagagttagataaaaaaacaggaaaaaccgaagaagttgtaaaatatgtaaaacgtcaagctattgggttatttaaagacaccgatttaaaaaacattgtcgatgataaagtaagagagattgttgagagaggtagagaacacgaaaaacaaatcaaaaaagaaattgaggagttaaaaaaggtaatgaaaaatataaatgaagaggaagagcaacaatttaaagatgcaatagagcttcttgaaaatagaataaaaaatgaattgtatattttgccaaactcaaaaggttctcctgttccaataaaaaaaatacgctattttactaatgatgtaagcaatccgttattgattaaaaaacatagagatgtatcaagacacgaacataaacaacattattttgcaaaaaatgatgggaattattgttttgcgatatatgatgggaaagataaaaaaggtaaaattattacagaatacaaagttgtgaataattttgaagctggaaaatattataattcaaatgctaacacgcataaatttccattagagtttaatatagaggataaaaataaaaacattttagaattaaaatttctattaaaaacagggactttagtcttattttataaaaattttaaagatgaaatatgggaattagataatttagatttagcaaaaagattgtataaaacggtcgctattgaagctgatggtagaattcagtttagattgcattcaacttcaaaacctgatggacaattagaaaaatcttcaataatagattttgaagttgctaatgaaaaattaagaatctcaaaatcatcattaactgtattggttgaaggatttgattttaatatttcttcaactggaaaagttattaaaatatgaataggttagatttttttaggactttaggtttaggaacaacgggtttgataattccaaatactacttggtctcaaaagccagtcaaaatatatgataattatatcaagggtttgacgcattatcaatttggaaaaataagaagtgaacttgctgttggtcaagaattagtgcttaatcgggaaataaataatcaatatgatagttttgcagttgaggtttattttggtagttataaattaggctatttagcagcttatgaaaatattgcaattgccaatatgttagaacaaagagtaagttttaaagcttttgtaagtaagctaacgagtaatccagatcaagtttttgatggattggcaattgaaatatataccaatattgtataagaaaatcctagaattgttgagacagatttgttgggaaaaagatctgatgatgctcacgatcagtacagaaaaggatttagtttgtaggtaatacttgtttaatttgaaaaacacaaaataatgttggttaaagttaatgcgttgtaagctggggggttattgataaaatttccaaaatgtaattccatttcaaaagtttggtgtaaatttacaccaaacaaaaaactattattatggcacgacaaagtatcactttagccaatcaaaatgatgagtggttaaaacagcaagtagccaatgaggaatttaccagcaaaagtgaagcggtaaattatttaatcacgcaagctcggaggcaagaagattatgttgaattcgtaaggatgaagttggatattgctgaaaaaagtggttttgcaaaaaaacaaactagagaagaaatgttagcagaattcaaaagaaaattaaatgtataactatgatttaaacgaaaaagctaaagaagatttgttaagaatatacgagtacggaattgctaactttggtttaaatcaagcagataaatactttgatatgatgcacgattgcttcgataaaatagcttcaaatccttttctgtttccagaagcttttcgatatcgtaaaggttacagatattgtgtttgcggagttgataccattttttacaaaatcaatgctgatacaatagaaataatggctatcattggcaagcaaaatttttaagaagttctttgacataagttttccattgtcttaaacatctcaaaccacaactgaaaggtatggcatccgcccagcagggatgcaggagctttcagttgtggtttgattaaagattagaaaacacgatattgcaacaattcatttgtatttgcgaactttggttgtggtttgattaaagattagaaaacacgatatttcacttgatctcctgataaataagattttggttgtggtttgattaaagattagaaaacacgatattaacttcacatttcccccaactatgacagctgttgtggtttgattaaagattagaaaacacgatatttggctgtctaaatttgtcaaggtagtggctgttgtggtttgattaaagattagaaaacacgatattaagtaaatcttcttaatacacaatcaaatggttgtggtttgattaaagattagaaaacacgatatttatattgtacttgcacgcaagtggttctacgttgtggtttgattaaagattagaaaacacgatattagttggctgaaaacaatcattttcttgattgttgtggtttgattaaagattagaaaacacgatattcaatattatcttttaaaaaacctaaatactgttgtggtttgattaaagattagaaaacacgatattctgagttaatgcatccgcttgtgcgtctaagttgtggtttgattaaagattagaaaacacgatattcgcttattgcaaattgaacaattacaccttgttgtggtttgattaaagattagaaaacacgatattggtttcttcgttagagaatgacctggtgcggttgtggtttgattaaagattagaaaacacgatattctgtatttgaaacttgaatagcttgcaaagttgtggtttgattaaagattagaaaacacgatattcggtagccctttcttagctgtgcctttgtggttgtggtttgattaaagattagaaaacacgatattcaaacacatactgctcataatgcgcattctgttgtggtttgattaaagattagaaaacacgatatttcatctccaaaaagtattctgtttctaatagttgtggtttgattaaagattagaaaacacgatattattctccgttcataatatcaggaaaatgtggttgtggtttgattaaagattagaaaacacgatatttagaaaaaccatttattccagttcttgggggttgtggtttgattaaagattagaaaacacgatattaagcgttatctgataatactaaggcaacaggttgtggtttgattaaagattagaaaacacgatattttatcaattcaacacctccatgagcttcacgttgtggtttgattaaagattagaaaacacgatattatcaaaatgttgattaaatccatcgttagagttgtggtttgattaaagattagaaaacacgatattttcccatttcgcattgtcttcatctcctttgttgtggtttgattaaagattagaaaacacgatattacgtttccataatagattttaggcaccgggttgtggtttgattaaagattagaaaacacgatattggggaatcctaattatacttacgtatatatgttgtggtttgattaaagattagaaaacacgatattgaaatacagttaaaaacttttcaaaaaatggttgtggtttgattaaagattagaaaacacgatattatcattatatggttttacattagacagaatgttgtggtttgattaaagattagaaaacacgatatttttagtatatttgaattatgaacattataagttgtggtttgattaaagattagaaaacacgatattaagcgttatctgataatactaaggcaacgggttgtggtttgattaaagattagaaaacacgatatttatttctttgttctttagcatttcaaaggtgttgtggtttgattaaagattagaaaacacgatattcctttctgattgctgttgatgtctattgtggttgtggtttgattaaagattagaaaacacgatatttgtctttggctatttcggctttcgccaaaggttgtggtttgattaaagattagaaaacacgatattaaccattatcggcacttattccgctgtaaagttgtggtttgattaaagattagaaaacacgatattgcgggaccagaaccgcctccagttttatttgttgtggtttgattaaagattagaaaacacgatattagagagcataaaggacgctttacagaatttgttgtggtttgattaaagattagaaaacacgatattagcttgcaaaagagatgcactactatatgtgttgtggtttgattaaagattagaaaacacgatattttgggttacagcggaaagattacggctcacgttgtggtttgattaaagattagaaaacacgatattattgggaacacgaacatcaataaactcatgttgtggtttgattaaagattagaaaacacgatattttggtttttggtctgtgccgtaaaatataggttgtggtttgattaaagattagaaaacacgatattattccaaatttaggagatgttaactgctctgttgtggtttgattaaagattagaaaacacgatattaccccagaaaggatcatcaacgggtctgatgttgtggtttgattaaagattagaaaacacgatatttttatttttaaatcaaattgggcggctccttgttgtggtttgattaaagattagaaaacacgatattcgtatcagttggcacaatacttcccttagggttgtggtttgattaaagattagaaaacacgatattcaaaaaatacaggcgggaacacttcgtatggttgtggtttgattaaagattagaaaacacgatattgcattgaagtaaaagatgcttcgattgcaggttgtggtttgattaaagattagaaaacacgatatttttgggtaggaatcctattttcctgctgctgttgtggtttgattaaagattagaaaacacgatattagttggcttgttaccttctaattatcaatagaataaggaagaatatcgtataaaaaaatgcctcttttttggattgataacccaatattgaggcatttttttatttctgggtaggtataggtcgcgacttgtccctacacctgtccgtacagtatgcatattgtgatataatatccacagattttcaaaaaaaagatataaattaattagatgtaatttccgtacacggaaattgatactgttttttaaatgataatttaatgaaaaatagaaagcgaaatagaatgttgagatatgattattcgcaaaataatttgtatttcgttacgatttgtgttcaagataggaagtgttgttttgggaatgtgaatacggtagggacaggtcgcgacctgtccgtactttccgtacacgagtcaatgaatccgtatatggaattgaatgagtgtggttctattgcagaaaaacaattgaattggttggctaatcagtatgcgtatgttgttttacattcttttatagtaatgctgaatcatgtccatgctgttttggaaattgatagcaatttgatttctgattgtgaaataaaaataaaatcattatcggaactaattggtgcctataaaactacctcttcaaagcaaattcatttagccggtttcactggttttacttggcaacgttcgttccatgatcacattattagaaacggtgggtcttatgaaagaatttctaattatatcgaaacaaatcctgagaagtggaacacagatgtatttttttgaaaaataaaagtattgtttaaaatagctccaactgtgttggcgcatctatattttcttgtttggccttgcctaaataattgataatcatgccaaattgtttgtcggtaatgcgtaaaacactcacttttcctaaaggaggaacgagtcggtgaatacgtttttcatgtacatcggcactttcaccactggcgcaatgccttatataaacggaatattgcatcatgctaaaaccgtcttttagtaaatttccacggaactgagacgcatttcttctgtctttttttgtttcggttggcaagtcaaaaaacacaaaaagccacattatacggtatccgttaagttccataatttaggatatttaatttttttacggtctcctgtaaaacattgttggagggaactagccgttttttgtaaacctatcattaacgggcttttctcttccttgaaataaacagttcgggttagcatttgtaacatttcagcttttattgccgtgttgagttcttgttcttggtaccgctgcattatctcaaaaactttttcgtcaacaatggggcgaaaaggttccataatgtcatctgcaagggcaaaagcattgtatttacttttgtgatgaataccaagtgtattcaataatccgctaccggaaagggctcgggcggttgcggctctcaaaatagcataaccgtagtttaaaaaattgtttggataatcgccatagcgttctctttttattccgtctttttcatgattaggcaaggggaaatttttccaatattgctgcgccgcaacaccttccatatttgtggtgtcaccgcttaatactttacttgccagaaattcaaaagtatttttattattagttatttttcctagcaattccccttgattcttaattttttcaatgatagtctgttgccataattgcttttttagaggaatggaagcttcgatttggtttttgaatatttcctgctgaatatgatggctgttgaggttgagcaacattccattaggtagatggttgctgccacaaataataatagcggtattgttttctacaattaagttcattgcaggaatactaaggtaaatttcagcatgatcaagcactagaaaccctacatcttctattggaattgtactttcccttatttctgattttaatactaactgctgattttttgtcgtaatagaagacttgttttcgatgagaatagttcttttgatcataatttaagttgttaaattgattgcaagactttgattttcagtcaaattaacacattaaataattaacggctttacgggaaacctcaattaaatagtaaaacctttttcatataaaaaaatcgtcttgttttaaaactgcattatgctaattttaaaacaagacgatctgtaaaaaaatcaatactaattaattagtttaagcgagagctaaaacaattatccctataaaacaaaaatctcgactgtgcttaatttcaatgtcattaagttaaagattcgtcagttcgagttgagtagaaatttgcgatagaaaatttctacgaagtatcgagaatcttttaacaataaaggcttctcgatacaatattaaacattaaagctctcgcattaatgtttaatatattactcgaagtgacgctcaaaagttcttaattttaatgatattgcactcgatttaacaagaaataaacttctacactatttattccaaatttcccaagctttctcagcttgaaaaataagcatatccagtccgttttttatttgggctccttttgctgcagcttttttaaggaattgcgtttcggcaggattgtaaattaaatcataagcaatgtgcttatccgtgaaaaactcatacggaatcaatggaaatgcatcaacattggggctcgttcctaccggagtggaatttatgatgatttggtaattatcgaatgtcgttgcattgattctatcataatcgatagcgttttctttagcttctctggaaacaaaagtatatggaatacccaattcatccagagcaaaagctactcctttagaagcgcctcctgttcctaaaatcaaagcttttttgtggtgtggctgcaataagggttgtaatgattttttgaaaccataatagtccgtattgtagcctttcaattttccttttttggttattttaatggtatttaccgcaccaatttgtgctgcgtttttagataatttatcaagaaatggaataaccgtttccttgtagggaattgttacattcagtccttttaaatccgaagtgtttttaattatctccggaaaagaggatatttcaggaatgtcaaaattctcataagtacaacctgtgaagttttcgttgttaaatttatcagtaaaatatcctttcgaaaatgaataattaatattacgtcctaataaaccaaagcgttttctaactatgtcaaccattattttttatgttttgctatataattttgtaccattttctttgtccaaactacagggaataaatcttctaaaagtatgtagttgtcaaaattcaatcgcaaagcattactcaaatggaattttgctttagtgttttggccaatcataaagtataatccagccaaacggtattcgacttcattctcttctgggaaatattcagaagcttgtaataaagtttgaatagcactttcaaattcgcctaaaaattgtagaatatccacccagaataaccaggtgtctaatccgtaatccccaaattccactgcttttctatatccaaattcagcttcctcaaagaaattcatttgtttgttaatagtagcatatcgtttccagtataagcgattttggttgtcaatggctaatgctttgttgacaaaaaataatgctttttggtaatttttttggcgtacataaaagtcagtgatagcaatccaacccttatccaaaagtgggtcttcatgtacagtttgattgaaatatttcaatgctaaaactttgtttcccagtttttcataacatttccccatacggagtagagcataggaagttgcgtcgtctaattcgatagttctgctatagctttctattgcttctgcatatttttttaaacgttcgtaagctttggctttttccatgaaggcaccaaggaattcatcatcgattaaagttgcataatcaaaggcgcgaatggcattttcgtactcttttacaccgtaatgcaaacgtcctagctgatgccaagcgatttcgctgtacgggtttttgtcaatgtatttattcaaataggtgatagcctcttgattttgatctaaaaattcaaaacaatacacaacgttgtataacgctgattggtcttccagatcttcttccagacatttgataaagctctcttttgccatttcaagattgtccataaaaagatattccatacctattaaattatagacatcggcatagtcatcagtgtattgtaatgctattttcaacatttctacggccttctcatgctggtctcttttagaacagatgttggctttttgaatgtaaatttcttcattggttggttcaatagcatacaactcattcaatagcttttcggctaattcgagtttgtcatcatacacaagcatttccacctggactagttttagtccggtagattttggatgttgttccaatgccagtttgagcgctttttttgccaaagcggccttacccatatcgagataatgaagaataatttcttcaaattcttcggagtcaaaaaagagaactttgttagtttttaacatggactcaaatttagacaatgataagttatagtcttcttcttcgttgcttaattgcatactgtgtgtttttaatttggcctaaataaatttaggaaatcgtgcgtgtactgcgagggaaagatagaattgttgtgaacaatttaattaacaaaaaagctttggtttaaacggatgccatagccctgataagagtggaaatccttttactttttttctttaaaaaagtaaaagattgcaacggatagcaggaaatagctcccaattgcgatattttaaatattatttcttgttcaaaatttcatccattacttcaagcatgatgctacaaccttctcgtatttcttcttcagaaatggttagcggaggtgttattctgatggcacatccttcaaataataaccagaataatatgagccctttgtcttgacatttgagaatcacttcgtttgttacatcggcactttttgtcattgcagctagcatcaatccttttcctcttatttcttctatcaaaggatgtaccaaaagtgttctgaacagtttttctttctccatagcttcggccatgagattggtctcagttatttcctgcaaagttgccaaacaggctgccgctatgacagggtgacctccaaaagtggtgatatgacccagtttaggattatcgctcaataaatccatcatggcagatgaagctgtaaaagcgcctactggcataccgccgcccattccttttcccataacgatgatatcaggaacgacatcataattttggaatccaaaaagttttcccgttctcccaaaaccaggttggatttcgtcgagaatcattatagcgcccacttcagtacaacggttacgcactttttgaaggaaatcattatggggctgaataaatccagcgccaccttgaatggtttccagaataattcctgctgttttagtcgttattttttgtaaatcttcttcgttattgaacgtgataaaatcgacatcaggaatcaacgggcgaaaaattcttttgcgttcttcgaatcccattacgctcatagaacccatagtgtttccatgataggcattgtggcacgaaatcaattggcttcttcctgtggttcgtctggcgagttttaaagcaccttcaatggcttctgttcctgaattcaccaaataggttttgtctaaaggtgcgggcaggaacgaggctaatagtttgcaatactgaaccgatggactttgggaatattccccatata

SEQ ID NO: 4145 - DNA, 24347 bp, synthetic construct
  source 1..24347: mol_type = other DNA
  misc_feature 1..24347: note = Synthetic
gatggagaattgaaagttagcgtaaatgttaaaaatattgggaattatgatggagatgaagtggtgcaattgtacatcaatgatgtttacagtagcgtaaccactccaagaaaaacattaaaaggttttaaaaggttattcatcgaaaaaggagaaacaaaaaaggttgagtttacattgacggctgatgaactatcactctggaacagagatatgaagcgagtggttgagcctggcgattttgaggttatgattggagggaattctgcagatttacaaaagttaagttttaaagttctgtagtaacccattgtttggtgtagaattgaaaaatatttagtgttttggatgttttggttagaattcttttatcaatttaacaaatagccaattttaataatgtttaatgctggaaaatgtaaagattttgaaaggaaatacgttgtttttagttaaattttaaccaacaccttttgaaagctgtcatttgtcgaaataatgatttagttaacaaaacagattcataaatttaacatcatattaactcaaaaaacaatttaaactatgaatcaaaacgtactaaaattactgttcttgtttttcctgttcgggtttcagaaccttcaggctcaaacagcgacagtaacaggaacaatcacagatgctgaaggaatgccaattccaggagtaaatgtgaatgttaaaggaactaaaaccaatacatcgtcagactttgatggtaaatacagcatctctgttcccaatcaatcagcaattttgatattttcttatgtaggttctgctacaaaagaagttcctgtttcaggacagacgactgttaatgtagctttaagtgcagacagtcagcaattaggagaagttgttgtaactgcacttggtcagtctaaagagaaaaaggctttagggtatgctaccagtgtgattaagtctgaggcaattgttaagacaggttcacctaccgttgctaatgcgctatatggtaaagcacctggtgtgcgtattacttctactcctggaggagccggaaacatcaatattaatattcgtggtgtcaactctattacgggtaaaaaccaaccgcttattattatggatggtgtgccaattcgcgatggagcggctacaaacaatgattattggggtgatcagcgtattagaagtaatggtctggcagatatcaatccggaagatattgagagtatctccatacttaaaggagcttcggcggctgccttatatggttctgaagctgtaaacggggtggtattaattacatctaaatccggtaaaggaaaaaaaggattaggtgtagattttagtacgagttactccagtaactcaatagcgtatttgccaagatttcaatatgaaagaggtccgggctggacaaatgcaaattattctactggatacttagctcctgatggtttcgctcattatgatacaaataatgatggaattgctgataccagaggtgtttcggccagtactaataactttgggccatggttcgatggtcagccaattatgtcatgggatggtgttgttcgtccttattcagctcaaaaagacggctacaaaaatatgttccaagattcatgggatggcgtaacaaacattgcactttctaataatacggataatagcagtattcgtttttcttacacacacaatgaatcaaaagggttgagtatggggaacatgaataaaaaaaatacccttaacctgaatgcatcgttcaaaacaagtgaaaaattgaaaacagatgtcatcgtgagttatatgaaccagaatgttcacaaccgtgctgttggtacagatcgattgataaacaactttacaggtatgataagcccgtttgataatggagactggtataaggctaaatataaaaccagtttaggatacaaatatgtgacgggttcaaataatagtttgactccggatgaaaatattatccgtaatggtttcaaggcagatgtaggtgattatttctggaatacgaatgcaaatcagcaggacgaaattacaaaccgtttgattgccagtgttactgaaacctatactatttaccaagatttgaagctgcgtggtcgtgcttctacagatttaacttcgataaatgtagaaactaaaaatccggttgaaagacctttggtttatggatttggtactggttcatttcaaatagattctaaagattataatattctttatggggatttaatgttaatttataacaaaaaaattaatgataagtttgacattggagctacagttggttatacagcatcaaaagaaactggtttgagtttgtcacaatttacagatggagggttgagtgttgaaggctggtacgatttgaattcttcagtaaacaatctaaaagttaccaataaaagagataaagttgtaaaagatgctgtatttggaactctgaccggaaactataaaaactatttgttcctcgaaggaacaataagaagggatcgtacttcaactatgcatcctgataacaatgcttttacgtatccttcagtcaattcttctttcatagtgtctgatgcgtttacattaccggaagtaatcagttatgcaaaacttcgtgcttcatggggaattgtgggtaactatgcagagatgtacaggggtaacgtagctttcaaccaaaccacattaggaaatcaaggaacagctagtccagtattgattactacttcgatggataagtatggtaatgaaagtttaaaacctgagatgaaaaacgaatatgagcttggttttgaaactaaattctttggaaatagactaggattagatgtttcttactacaatgcacaagttaaggatcaaattttagatttagatttagcacaaacaactggagcagggaaaataatagctaatgttggagaattgagaaaccaggggattgaaatcgctttgaccgcgactcctgtaaaaacaacatccttctcttgggaccttactttgaactggtctaaaaacgcaaacaaagtggtgaaattagctaatggtgcatctgaattattacatgctgactttgacggttctgctgctcaattgaaatcagttgtaggagacccaattggaggtatttatgcacatcctgttaagacagatgacaatggaaataaaatggttgactctgatggattttatatgattgatggcgataaatggcaaaaatacgggacagcaatacctaaaggtgtgggaggtttattgaacacatttaattataaaaatttcactttagatgttaatattgattattcttatggaggttctttgatgccaacaggtattaactggatgacttcgagaggattgacagaagagagtttgaactacagtactaatgagcgtggcggtttaacttattatatggatgctaatggtaagggggttcaggttcctaatagtgctacttccggaccaggtggtcaaaccttatatcgtgatggtatgttgatgaatggtgtgacagcagatggtgcaacaaatacgaatgtaatctctcaggcgggttactataatatgacttataactggggaggtcctcaatacagcagctcacgttatgaattgtatatcaaggaaaacaactatgtaaaattgagagaagtctcattaacttatagtttaccaactaactgggctgctaaaattggtgcttcaaaattaaatttttcagcttacggacgtaatttgttcttcatctacagatcaattaaggatatggacccagaaggaactacagcaggttctaaatggtatcaaaacataaataatgcgggaacgaatccggctaccagaagtattggatgtatgttaagagcctctttttaatttgatatttctaattttaaaaaatataacatgagaaaattattatatatatcgctaacaactgcagcagtttttttgagctcttgttcaaaagacgattttgcagatgcgtatgcaaatccctctacggttgaaaccactactgtacctaaacagtttgccggattcatgaaaattaactttgaggatgtaattccttcttattggaattactataccgttctaaaatctacttctcttagctacacgcaggcacatggatttatgaactcatccggtcgctatgtttcaggagctgcaccagttaacagatgggatagattttataagtttatggctcaatatagagagttggaaaaagtgatggcttctttgcctgctgctatgcagactgaaaatagaatctataccattacttcaactatttatttatacgatcatactcaaaaaatgattgataactatggagatattcctttttctcaggcaggtaaaattagtttaacgggaggtaattatggtgctgcattagcaaagtatgataaccaaacagaactatatacccttatgttggatcaattgaaagctttttctactgagttgaattcgattactttgtctgctggtgtggcaacagaattcaaaaatcaggatttgatcaacaaaggagacctggtaagctggaaaaactattgtaattccttgcgcttaaaaatcttgaatagagtttctgcagtccctgcttttacaacaagagcaaatactgaaatggcggaaatcattgctgaagggcaaattgtagatgaaaattctgaaaatattgctttcagggtttatactcaggatggggatttagatacttcaggctttattaatgctttagaagatgatttaaataatcttgccccaaaaccaatgattgatcacatgaatgcgaataatgatcctcgtgaaccatggctgtttgaaaaaggatcacgcgtagtaaacaacgtgataatagtggctcctacttatgaaggactggatccaacgttggcatccggcgctcagacacaattaataacagatggtaaaattgctgtttacaatcgttcggttctcagtagaaataaatggttgccgggaacattaataaatgctcctgaagtaaaccttattcttgccgagtactattcaagaaatggtaatggtgctacagctaaaacttattttgagaaagcaatcagacaatcagtagagtattatgtgagattaggtgataaagctgatgttttgacatggaaaccaactgtagagcctacaacacttgaagtggatgcttatattgctgctattaactttgcaggagctacaacaccagcagctcaattggaattaattgcttttcaaaagtacattcattacaatatcatgcaggctgatgaatcctgggctgaacaaagaagattgaaacttcccgctcttacattccgtgaagatgaaacaagcagtgtgagaaaaacaccgccaacacgctggacatatccaacttcagagagtgtttataatccggataattataatgctgtaaaagcaaatgataatttaagcaccaaaatattctgggatataaagtaaaatttcaataataatgtgcaattaaagcacctataagtttaaacagaggtaagatgtaattcttacctctgttttttccagtttaatatttgtcaaaaattagataataaatgatttgtaaatacatgataaaatttttcaataccatattattgttgttttctttagtactcgttgctcaaaccaaatcagaggtatataaaattaagtatgataaatttgaaaacggaaaaaaaacaggcgagaatatcgcaatttatgtatacaatcaaatggtttttttatcaaaaccaacagataaaatacaacaatacatcgatttaaaaaacaattataacgttaccaccatcaaggatggaaatattgttttcaaaaaaataattccatttgacagcttgcctgttcctaaaaaagaaaatgatacccgtgtcatacttggatataattgtcagcatgtttctttttcttatttttcaaatagaattgatatctggtatactgaaaaggctgccgtaaaaggaactcctaacagtaattatttacctagtaaaaatgcacttgtactggaaatggtttataatggaaatcagactttgacagccaattcgataactaaagttaaaaattatgagccatttattaattatgatgagaagacagtagtagttgataaatcagaatttgaagaaattctcattaactccagatatactaaattgcatatttttgagaatgaaaatataaacttcgatcctaattcaataattccaaacgaaaaagactttcttacagacaaggtttatcatttttctaaaggaagtgtagttttgaaaaagataaaaattactcccgaattaaaaaacagtagtgccatttttgcaaaactaacttgtaaatctaatggggatgcgtatgacaggactggttcagtatttattattccagcaaaaaaaaaggaaaacatcacaacactattagatgcatatttatatggattggagaaattaccaatttatacagataataaaaaaaacaaatatcagggaattaaaaaagaaaaagactatacgccggcaatagaaatactaaggttttttacgccatttggagttaattattttaatgataaacgaaaaataaataattataactgggcaaaagacgttgtttataaagaagatgtcacttctcttattcctactgatgaagatgaaatctggattggtgtttttattggcaattatgatgctggtggtcataccataagtctggaactcaatgtttatccatcaatgaaaaataacgaagagaaaccaaataagaaaaagtatgtagcacctttattttcaacagtaaatacgatggaaatgtcaggtcagaattacggaggtctttttgcgaatgatactttaaaagtaaattttgaaattaaagaaaatctacaaaatttacagcttttgtataccacaactggtcatggaggctggggaaatggagatgagtttgtaccaagaatgaataaagtgtttgttgatggtcaggaggtttttaaaattattccgtggcgaactgattgtgcaacctatcgattatctaatccggcttcggggaatttctctgatggtctatcttccagtgatttaagtaggtcaaattggtgtccgggaacattaactcctccttatattattccgctgaacaaactgtcaaagggcaatcatataatagaagttgttatagaacaaggccccaatgaaggtccgagtacaaaccattggaatgtttcaggagttttggtgggcgaattgaaagattaattgtgaaatgaaaataattttaaaatttaattctgtaatcctgctattagtactaactgttttttcctgcagttcattacaaactaatccggaagcagttaatatcactcaaaattatattgcagaaaatcctgttacaacagcgagccatgcctcaacattggttgaaatagagcctaacgttcttttggctgcctggtttggcggaaaacatgaaggtgcaaaagatgtgagtatttatatttcttcttatagagaaaaaaaatggtcagcgcctaaaaaaattattgagccactaattaaagatggcgatacgttgccttgctggaatccggttttatttaaaagtaaggctcaaaatttatatttgttttataaagtcggcaagaacccgagagaatggtttggtgctatgatagtttctaaagataacggaaacacctggagtgaggcaaaatatcttccaaaaggaatattagggccaattcgaaataaaccaattgaaactaccccaggagttattttatgcggaagcagcaccgagagtatcgatgataataaatggagagtatttatagaaacttatagagaatctacagacagctggacaataacggatattaatgacaggaaaaatttcgacattatccagcccacttttttagttcattcggctaaagagattcagattttatcacgaagcagacacaataaattaatttcaagctggtctaaagataatggtaaaacctggcagaaaacagacagtatcaacgttgttaattcgaattcgggaattgatgcagtgaccttatccaataaagcatttttattggttaataatcctttaaaaatgggtaaagactggtttaacggtagaaatgtactggatgtagaatattctaaagatggcttgtcctggagcaaattatttgatttagaaaaccaaaaagaaggcgaattcagttacccggccattattcggacctcagataaaaaagtacatgttttatatacttataatcgtaaatttattaaacacacaatttttgatttaaaataaaaaaagatgcaaaaattttgcctggctcttgacttaaaaaatgatccggatttaattgccgaatatatagaatttcataaaaacgtctggcccgaaatacagcagagcattttagattccggaattatcagtcttgaaatttataatgttgccgaccgtttgtttatgattattgaggccaattctgatttttcattccaagaaaaagcaaaacgggatgcagaaaacccaaaagttcaggaatgggaaactttgatgtggcaatttcaaaaagcacttcctcaggcaaaaaccggagaaaaatggcttttaatggataaaatttttgaacttaagtaatttatataaacgatgctatttttaagaaacttaaaatatcaactctttttcattagtgtattattttttaacagcactataaatgcccagaacggtatcaatgccaaaacattttacaaacatgataaatatctttcttcagataagttagaaggacgttttccgggaaccaaaggcaataatgacgctgctgcctatatcaaaaagtattttaaaaaatacgggttgaaaaaatttgataacaattattaccagccttttacactttttgtgaaagaaggaataaacaagatgaaatcagatagtgtttcgacccagaatgttgtaggatatcttgaaggttctgatgaaaaacttaagaacgaatatatagtaataggagctcattatgatcattggggatggggaggacaaaactcaggcagtaaaaagaaagaagctttcgctattcataacggagcagatgacaatgcttccggagtttcggctctgctatgcatattgcaggaattatcaaatgctaaagtcaagcctaaaagaagtattatttttatctcttttagtggagaagaggaaggacttttaggttctaaatattttgtgtcccatttaccggttcaaaaagaggctgtaaaagtaatgttgaatatggatatggtgggaaggttaaatgaagagaagcaaatttacatgggaggcgcaggaacgtttccagatggagtagaattgatgaaaaaattaggagaaaacagttcccttaatccggttgtacatgctggcgaagtgggaggctctgatcatgtctcgttttataaagccggtatatccgctgtgggatttcataccggaggccactcgcaataccatacacccgaagatgatattgatttaataaatattgaaggaggtgctttggtagctcaatatatttataatgcattagtagcaattgcaaatgacccgcaacaactgtattttattaatcaggattagggaatctataagtatctatatccagaatttatataaataaaaagtcccaccgaagctgggctaaaggttttcattctatataaaaagtaaatcccacggagtacgcgggattttagatttctacggcatatagccttattgtgataagattaaagattagaaattttaatcagtaacaaatatatagaaaaaataaattgttttgaatgatgaaaaccataattgagttaattttttttgtggtagatttcgtgcgtattaaattttaaaaattatggcaaagattttaggattagatttaggcacaaatagcgtaggatgggcgattgtggataaggatgggaataatttttctcttgtagataaaggggttagaatattttcagaaggtgtgaatattgaagccaaaaccaatagcgaaagttcaaaagcagcaaaaaggacagagtacagaagtgctagaaaattaaaatatagacgaaagattagaaaaatagaattacttaaggttttatctgataataatttgtgtccaaaattatctgatgaagaacttaatgattggcgatataaaaagatttatccacaaaatgatgaattcagaatttggctaagtacagataatcaagaagatgaagaagaaaggaaaaagcaaaacaaaaacccgtattcatatcgatataagtcagccaaagaaacacttaacttaaatgataaggaagacagatatattttaggaagggctttttatcatattgcccaaagacgtggttttttgagtaatagactagatagttccgataattcaattattgaagaaaagaaaaatgaaataacagctgtaataaatgatgcaacttcaattgcggaatttttagagttattttcagaatttgtgtcaagttttgataaagacgaaactagtaataaaccattgtttacactttcaagagctttcaattcaattttcaaagaaaattcagcattggtctataatgatttaaaagaaaagttgctcgaacgtttaaataaaaaagaatttcttggacctgttaagagagcaataagtgatttgtctgagaaaattgaacaagaaagatgttcgactttaggccagtatttttacacgttatatcaaaaaggtaaaaaaataagaggtgaatatactcatagaattgatcattatttaacagaattcaattatatctgtgacaagcaaaatgttttagctgaagcaaaagaaaaaattgaaaaagcaatattttttcaaaggcctttaaaatcccaaaaaggtttagttgccaaatgtccattggaaaatattaaaacatgtgtgccaatttctcatccagattttgaagaattcagaatgttgagttatttgaataacgtaaaaattaaattgcctactgatgagaaattaagattactaaatgaagatgaaagagaacaaattggatctttatttttcagaaagtccaaagccaattttgatttctctgaaattgcaaaaaaacttacaccaaaaagcttaaaatttggatattacaaagacaaaaacgttgctgaatatgatgtattattcaattataatttaggaagcaatgtttcaggttgctcaacaattgcaaatttaatagatgttttcggtacgaaatggaaggaatatttgttttcaaattttgtaaaaaacactaaaacagaaaacaatataaaagttcaaaagtcaatagatgatattatcgatgatatttggcatgtattatttcgttttgataatgaagaacttttgaagcaatttgctattgataatcttaattgtaatgataaaacggcaataaagttttctaaaataaaactaaaacaggactatggttctttgagtctaaaggcgattagaaatattctaccttacttgagacaaaatcttatttactcacacgctgttttcttggctaatatgaaaaatattttatcaacagaaatttggaatgatgaagaaaacagaaatgttatcaaccaagaaattaagttaattattgaaaattataaagtatatagtaataaaattgagatagttaacggattgattaaaaatgcaaaaaaagaaaatggtacctggagttctgataataaatttgttgcagaagcttatagaaacggattagaaaaacaagttaaagacttttttggaacaaaaaaatggaatgaaacaccagaaaactatcaaaatgaaattttgtcggaatgttttgaacttttttcaaatcaaatgaaacttaattctggtcgaggagaattcgttaaaaaacaaactattgatgaaatattaaaaacattcttgagtgataattttaatatcgatgaagatagtttaaaaaaattatatcatccgtcagccattgaagtatataaaaaagcaaaacggagtgaagaagatgggaagaaatatttaggaagcccattaatttcatctataaaaaatccaatggcaatgagatcgttgcatcaattgaaaagagtagttaatcaattaattaaagatgatatgattgatgaagatacttttattcatatcgaaatgccaagggaattaaactctgccaacgaacgagttgcaataaggcaatggaatgaaaatttaaaaagcagaagagataaatatactgaggaaattaagtcaatttttagaggtgaaactaacattgaaggttgcaatgatgtaaatgcaagttacaacgattatgaaccaacggaaacagatattttaaaatatcaactgtggatagaacaacaaaaagtttgtctttacacaggaaaaactatttgtttatctgattttattggaaataatccaaaatttgatattgaacacaccattccaagaagtagaagcttagataattctcagcttaataaaacattatgttgtgccatttataatcgtcagactaaaaaaaacaaaataccttttgaatgttctaatcacgatgagattttaccaagaataaaacattggtatgcaaaatacaaatccatagaagaacaaataaaagatttatccaaaaaagtaaaagcagcttctactaaagaaaaaagagataaatacattattgacagaacaaaattacgttttgaatactcttattacttcaaaaaatataaatcattcattatggaagaagttccggaaggatttaaaaatagtcaatcggtagatattggaattattagtaagtatggtaatttatttttaaaaactgcattcaataaagtatatcctattaaagggaaaaccactgctaatttgcgacaaatgtggggactaaatgagaaatcaagagataatcatgcacatcatgcgaaagatgctgttgtagtagcttgttgtactagagatattaatgatgctttggcaaattattattacgaattagaacaatttgaatattatggaaaaccaaaaccatcattttcacatagaattccgtgggaaggttttcacaaagatgttgatgattttgacagtaatactttaataagccattacacaccagataatctacctgttcaaagtaaaaaagcaattcgtaaaagaggaattattcaaagaaatgaaaaaggcgaaatcaaatacaaacaaggcgatacagtaagaggcgctttgcataaagaaagtttttatggtgcaattttaagagaagaagttgataaaaaaacaggtaaaaccgaagaagttgtaaaatacgtaaagcgtcaatctattgatttatttaaagatacagatttaaaaaatattgttgatgataaaatcaaagagattgtctcaagtggaagagaacaagaaaaacaaattaagaaagaaattgaggaattaaaaaagcaattaaaaaatctaaaacaagaagaggagcaaccagcgaaggatgccatacaaattcttgaaaatcaaattaaaaatgaattgtatgttttgccaaacaaaaatggaaaaccagttccaataaacaaaattcgttattatacaagcgatgtaaccaatccgttatttattaaaaaacatcgagatgtttcaagacacgagcacaaacaattttatcatgcaaagaatgatgggaattactgcatggctatatatgaaggaattgataaaaaagggaaaatatcgagaagtaatcaattaataaatattatcgatgcaggtaaatattttagattaagtaataatgataaaaaagtatatccaattgctccagaaaaagatgaaaatttaaacccattgaaatacattttaacgaaaggcaaaatggttttaatatatgataaatctccaaaggaattatttgaaatgtcagaagaaaaattattagaacgattatttgaaataactcaaatggatgttgagaaatcagctgaaattaagttattacaccattcagaagcaagagataagaaaagaataactgaatttatgggcttaaaaacaggaatgaagggaggaaaaaatattggtgatcacaaaaaatatccatggataaagattggtgtaaattcttttgactgtttagtagaggggtatgagtttagtttgtcaccaacgggcaaaatagtatttttgtaaattaatgaaggttctttgacataatttttcaaactcttaatcatctcaaaccacaactgaaaggtatagcatccacccattagggatgcaatagctttcagttgtggtttgattaaagattagaaaacacgatattggacttgttaaaacacttgctactacagctgttgtggtttgattaaagattagaaaacacgatattaatgcactgccaagtaaagcacctcttaaagttgtggtttgattaaagattagaaaacacgatattaaattgaaaacaattgttgcatcaggagttgttgtggtttgattaaagattagaaaacacgatattaaggagttctgggatgaagaaataataaaagttgtggtttgattaaagattagaaaacacgatatttaaagaaatttacaacccagcattagaaaagttgtggtttgattaaagattagaaaacacgatatttgtcggaaactattcagaatctataaaagagttgtggtttgattaaagattagaaaacacgatattaaataaatgaaaaactaaattcccgttgtgttgtggtttgattaaagattagaaaacacgatattagaaccgtccgcaaaaggaagaatcctaatgttgtggtttgattaaagattagaaaacacgatattcaaaaaaaccaacaattggtttcggaacagttgtggtttgattaaagattagaaaacacgatattctattctttcaattataccagtaatcaaaagttgtggtttgattaaagattagaaaacacgatatttttaaatgtagaattagagcagcataaggtgttgtggtttgattaaagattagaaaacacgatatttaaattgaaaaagaaccgggacaaccgagggttgtggtttgattaaagattagaaaacacgatattcgaaccatcaaaaaagaaagccaactcagagttgtggtttgattaaagattagaaaacacgatattgaagctttagtttggtttctttgattgcgtgttgtggtttgattaaagattagaaaacacgatattgcatagcgttgctcattttcaagcctgatagttgtggtttgattaaagattagaaaacacgatattcctacacctgtagataatgcgcggtcggctgttgtggtttgattaaagattagaaaacacgatattttcacgattgaacgtaattcccattgaacagttgtggtttgattaaagattagaaaacacgatatttttacgttaaacatttgtttgtactcatctgttgtggtttgattaaagattagaaaacacgatattattcaattaaaacctcagaaccacgcccaagttgtggtttgattaaagattagaaaacacgatattgtcgtgattcgtggttgttgtgggcagattgttgtggtttgattaaagattagaaaacacgatattatttagccaatcctaaactatctactattgttgtggtttgattaaagattagaaaacacgatattcgttgtagctttgaatgctgtgaaattcaagttgtggtttgattaaagattagaaaacacgatatttataattgtattcagggtgaaaactactaagttgtggtttgattaaagattagaaaacacgatatttttatattataattcataacttactgtttagttgtggtttgattaaagattagaaaacacgatattacagttattcgcttatttgatttaccagaagttgtggtttgattaaagattagaaaacacgatatttctatattttttataaacaataaatcttcagttgtggtttgattaaagattagaaaacacgatattattacagcattacttaattgattaaaaccagttgtggtttgattaaagattagaaaacacgatattctataccatcagatgaagtttgccagttaagttgtggtttgattaaagattagaaaacacgatatttttgatccgtttgctgtgtttctattaaaagttgtggtttgattaaagattagaaaacacgatattaatgatgtttcataactgatgttttgagtagttgtggtttgattaaagattagaaaacacgatatttaacgcattaacatctaatggcatatactggttgtggtttgattaaagattagaaaacacgatatttcaattgtaacttttcgtttagcatcttctgttgtggtttgattaaagattagaaaacacgatattaatgcattattaaaagttaactgtccgtaagttgtggtttgattaaagattagaaaacacgatattccctaaattaacattatcctgtagtttaagttgtggtttgattaaagattagaaaacacgatattttatatacacaatgcgttgctaaagcaggagttgtggtttgattaaagattagaaaacacgatattatgcacggaattatatggacagatgaaagagttgtggtttgattaaagattagaaaacacgatattcgaagtaagggaagcactagacgaattaaagttgtggtttgattaaagattagaaaacacgatattaaaagaccccagagcataaaacgcattcggttgtggtttgattaaagattagaaaacacgatattaaacaaccaagttggataaactatcagacagttgtggtttgattaaagattagaaaacacgatattggaaacagaattttttaactataaaatacagttgtggtttgattaaagattagaaaacacgatattattaaagactaattttacaggtacaaaactgttgtggtttgattaaagattagaaaacacgatattccgatcgactttgtaacatttaattctggagttgtggtttgattaaagattagaaaacacgatattaaaagcagtacaggaatcaataaataattgttgtggtttgattaaagattagaaaacacgatatttttgatttgaagaattactttgataaccgtgttgtggtttgattaaagattagaaaacacgatattgataaaactgaaaaccatcatcaggatcagttgtggtttgattaaagattagaaaacacgatattattaaaagcttattgccagttaaatggatagttgtggtttgattaaagattagaaaacacgatattatttcttcttttttttcataatagagatttgttgtggtttgattaaagattagaaaacacgatattatgcacggaattatatggacagacgaaagagttgtggtttgattaaagattagaaaacacgatattcttcacgcctcctgtatagcctgcatcttggttgtggtttgattaaagattagaaaacacgatattaagaagcgttaataaaacaactgcagcaagttgtggtttgattaaagattagaaaacacgatattaattcaggattaagtgaatcgcagatacaagttgtggtttgattaaagattagaaaacacgatattcaaaaatcaaaatttcatccaacacaaaaggttgtggtttgattaaagattagaaaacacgatatttctggtttcgtttcttctactggtgcgtatgttgtggtttgattaaagattagaaaacacgatattattttataattctgatatacgggtttcttggttgtggtttgattaaagattagaaaacacgatattattagtccatattttttagcgaatttatatgttgtggtttgattaaagattagaaaacacgatatttaacttctgttgtttttttatctcgttccagttgtggtttgattaaagattagaaaacacgatattgaaacagaaattataggctgcacatcagcagttgtggtttgattaaagattagaaaacacgatatttttatgagtaatctatgggttgatatacaggttgtggtttgattaaagattagaaaacacgatattggaattaatgccggtaaaccataagcatcagttgtggtttgattaaagattagaaaacacgatattaaagttttaattttacagaggaaggaactggttgtggtttgattaaagattagaaaacacgatattgaagctgccctttgcaatactcagcaattggttgtggtttgattaaagattagaaaacacgatattaaatcctttaaatgtgaatagtcagattcagttgtggtttgattaaagattagaaaacacgatattagttggcttgttaccatctaataatcaaaagattaaattgaaatatcgtataaaaaaatgcttcttttttggattgataacccacgattgaagcatttttttgtttctaacaataattcagttcagtttgggctaaaacaattccagttgtgtaggctgaggagcagatggcacggctgcttttccccagaaattcaaaatattaccaaattgtttatcggttattcgtagcacgcttactttgcctaaaggcggtagtagtttgtggattctcttttcatgaacatcggcgctttcactacttgcgcagtgacgtacataaacagaatactgcatcatcgaaaagccatctttcaataaattagttctaaatccggacgcatttcgtctgtctttttttgtttctgtggggagatcaaaaaaaacaaacagccacattattcgatatccgttaagctccatagtacaggatatttaattttttttcgatttcccgtgaagcattgttggagagaacttgctgttttttgtaatgcaatcatcaaaggacttttctcatctttaaaataaactgttctcgttaatatttgcaataattcagatttgatagcagtgtttagttcctgttcaccaaaacgctgcataatttcaaagactttttcgtctacaataggacgaaaaggttccataatatcatcggcaagtgcaaaagcattgtatttacttttatggtggattcctaacgtattcaataatccgcttccggaaagggctcttgcagttgcagctcttaaaatggcataaccataattcaggaaattattaggatagtcgccatatcgttcccgttttattccgtcaaattctaaattaggctgagggaaatatttccagtattgctgtgcagcaactccttccatatttgtagaatctccacttaagactttactggccagaaacgaaaaactatttttggattcggttattttttcaagtaactgcccctgatttttaattttttcaactattgtctgctgccataactgtttctttaaaggtatggaagcttcaatttgatttttgaatatttcctgctgaatatgatggctgttcaggtttaagaacattccgttgggaagatggttttttccgcagataatgatagaagtgttattgtcaaccagtaaattcatggccggtatgctgaggtagatctcattatgatcaagaacgagaaagcctatatcttcaatgggaatagcgctttccttcatttctgattttaatacaagctgattgtttttagctgttatagaaaatttgttttcaattaaaatggttctctttagcataaatttaacttgaaattatacatccccgttattgtcgtcttcaacaggtatctttaattattgttttaaatttaggctttaaggtgatgttgtttttacggttttccttaattcacgtgtttttaattttgaccttatctaaaaagagataagctaatctatcaggtaatacttttactcgttatttttcttgaaccatcttctgggcgcatcactttcatgaagtacaatttcggaatgtaagaactctgcggcatcggctgaatcttgcacttttgaggcactgcgtgtcagcatttcggattcaaatccggttaatacactttccctcaaaccagtttttttccagtgagataaagatttacatccttttgcaatttcccgtgcaagcgcaagtgcgtccagcaacgcctgattcgcaccctgacctttaaaaggactcataggatgagcagcatctccaatcagagtgacttgtcctgagttctctaataattccggtgtgagtaattcgcggtcatacacgggatatcccgaaatctgagcttcctgggtagctaataaaatttgaggaatcgggtcgtgccactgagttcttcggcaggcttcttccttgagtgcctgaggacctttagcacttaacttttttgcttcatcttccgacattggaaagctaagctgccacattacagaatcggccgtgtaaggcatgacatagattcgttcattgccattagcagtttggaatacagtagcggaatctaataaagcactattcagattttggacagcactcaaagggcaaattcctaatattacgatacagcccaaataacataggggagtaatatcttctccaataagtaatttacggaccgaactacgaataccatcggctccaactacaagatctgctttggcactcttcatctttccatcgacctgaaagttgagatgaacattacgatcactatgtttaaaatctattaactgatgtccccattgtatgttatcgtttccaccaagttgctccaatagtgcgaatcgcaaagattgtcttgcgatatgaatattgctacgttttgggggcattctctcttttgactgaagccactttctgactccccattcaccgataacttttccttcgggagtatgaaccagatgtctggttgaaaatactccttcttttaaagaaataatacctaagccctgaattgctttactggcttgctgtaatgttagtccataaccctgagatcgggcattaaagtctttatcgcgctcataaagagtaaaagggattccacggtgtaaacaagcaacagccagggcgattccgcctataccgccgccaataattgccacgtgaggataattctctttatttgcaacaggaggcatgtgggcaggaagcagaccggttccggaacagtttacgcatgaatataagttgcctttaggctgaacaggagcagtacctttaccattagttttttcaaattcatctaatgcgatttggtaatggagtcttacttttttagttagccttcgacttttttttccgcgtccctggcattccggacaaatagtccagctttccatttcattttgcactttttttacttccactttttaccggatcttgatttacataagaaaacaaacacagatactattgatgctgagctcaagagtctaaataattataactcttatttctaatagatacatctgtaagttatatttccatgtttttgcttttacaggtgcgcaaagttactataaaagataggtctctgccgaagcaggagtaaagattttcatctatggatatatttgacatcagattaagactgaaaaatatcctaatagtttaacaacataaagcaattatataaaaagaattaattatttgaaatcttcattgattataggttgttttctctaagatttcaattcttttgtataacggaatctattggattccgtcgcaaataagtcagtgtaattcataggttttgacttatgtattgtttctcaacgggctaagtgagtgtattagaatctttaaaccaatacaattttgtgtttcactgcatatagaaccaatccaattcgggtttttatttctagtttatcaaataaacattcccggtatccgtcgattgtttttggacttaaacacatttctgaggcaatctctttatacgttttttcggtacaggcatgttttataaaaacaatttctttttctttcagattgatttttttagagtcatcattggctttttttaccagcatccccgaaactaattctgttaaataaaagcctttttcaataactgaaatcatggcttccttaaatatttccggagaagtatcttttagtaagtaacctttggcaccatttgtaatcattttgatgattatttcttcatcatcatttacagaaagtgcgattaccttcaaatcaggtctgttttctttaatccatttcatggtgctaacgccatccaaaaccggcatattgacatccagtaaaattaaatcgacatctgcattttcatgatcttgcaggtaggaaacgaagactttgccattttcgaatcggttaattacctcaaaatccttaaaactattgattaaaagttccagtgattgtgaaaaaagctgatgatcatctacaataataattttgtttttaggtttcattgttttgggttaaaggatattctaaaattacggttgttcctgatgaatttgattccattattaagattgctccaattaacttggctcttaatttcatgttgtttaagcctaatcccgaatttatctgactggtatcgtagccaattccaaaatcttttatttttaatcgaaaaacagtatcagttgtattaatggctacttcaaataaatcactgtgagaatgtttaaggctgttgtgcagggcttcctgaaaaatacgataaataaacaaatcatgttcctgatcaatctggggaatttctcccgtaacggtataattgtatggaatgttttttagtttttttatacgctcaagatcttgttttatggcttcaataaaattgctgtgcagtagattgtctttattgatgatccgggataaaatccgaatctcatccagtgatttggctagtatttctttaagatcattaagctcatttaccaggacaggttttccattgttaagatacatattgagctgcataatacccacagaaactatctgacctatattgtcatggagttctttactaatttcgctgagagtctgatctttaatttcaatcctggttttaattaactcggattgaaaatacaattctgattccattttctctaccagataattgtttttcttttttaaaaaataaaagaatatcacaagcaaagtaatcagtaaagttaaaaaaacaatacttaacgaaatgactaataattgtatttcttttcgctccataagaatccaataatatagcagctgtgggccaggacatttaaaataaacactactaagctaaaaatagattcgtcatgtttgatcaggaaccagtttaaagcaagcataaagggcagaaatggtacatgaaaaactaaaattcctaatatgtaccaaaaaaagactgattttttaaaatttaatattttgtttgaattaaaaatttcgactaagtataagcaggataatatcataattaacagtacaccaatggcaaaactataggtatatgattggttaatatcttctttaaaatataagatattcagaaaaaatgaaaggataaacagtattaaactgagaagtcctattattcgataatttgttttggacaaaacactccttaaaagtaagataaaagcacaaaaactgaccagcatataaaaattaaaaacataataatttaatatgcctgtccatgccgtaaaataataacctactctttctattgcggcagaaaaccaaatcaaaattactaaaaatttagctttattcgtaggaagtttgtgccaggaaattaggccgataattccggaaaataaagctaaatagacagtataaaatcttaaaaattcaaacataatcttctagtatgttttgctgggaggatttccgatacttccgtaattcattggttcaatccctggtatttcttcgatacctatttgacgaaccaaagcaaaaggttgtatatcatcaggtgcagtttttctgatttttgttcctgtaggtgttaaaaaaatggtcatccggcctgctttttcttcatattttctttcatcaggatatacaccatagtaaaaacggattccgtttacatcatatccttttttcttccctttagccttaatataatgaatataattttcaagctcttctacagaaaaccaaacattatt

SEQ ID NO: 4146 - DNA, 24326 bp, synthetic construct
  misc_feature 1..24326: note = Synthetic
  source 1..24326: mol_type = other DNA
aatgttgcatacaaacggtgaaataattgaatttcacacagcagattccgtaagaaaaaaagagaacttaaaattaaaagattgggcaataagattcgattctttattagaatatattagaattgtttacacacctagtttaattgttttaggtggaggtattagcaaaagatatgacggttttaaagaacatttacaaactgaagtaaaggttaaagtagcggaatataaaaacaatgcgggtattattggagctgcaatttacgctagtaaagaacataaaaaataaaataggtattctattaaagtgtaaatagtaatgaattttagaaaagcaactcaaaaagacatttctgtaatcgtagaaatgatggctgatgatgaactcggaaaaaaaagagaaaactttaaaaaccccttgccttcttcctatttaaatgcatttcaaaaaatagatgcagataaaaatcaagaattaattgttgtagaaaacgagaatcttgaagttattggaactttacaaataacctatattcaatacttgagtttttgtggcggaacaagagcgcaaatagagaatgtctttataagaaatgatcaaagaggactcggaattggtaaaagtgtatttgaatgggcaatagatagagctaaagaaaaaaacgtacatgtagtgcaattaacttcggataaaaaaagacctagagcaattaaattttatgaaaacttaggttttaaagcaacacacgaaggcatgaaattacatttttaattatttataaccccatcttttaatcagattgattaaagaaatttatacatacttatgcaaccaaccactttattttacatcatcatctccatattaattatcagttttattgttgataaaatcttagatatcttaaatgaaaaacgttttgatgatgaaattcctaagaaactaaaggatgtttatgataaagaggaatataaaaaatcgcaagcttataaaaagacgagtgcaaaattctctaacataacttcattattttcaacacttttaacgttggttttcttttttattgatggatttaaatatgtagattcttttgcaagaacatatactgataaccctattttggtggctttaattttcttcggaatcattatgctaggttcagagattatgaccacaccgctctcttattacagcacatttgttattgaagaaaagtttggttttaacaaatctaccataaaaacattttggctagataaattaaaaggattagcaatgagcgctttattaggtggcggaattttagctttaatcatatggttttatcaacttacaggtgaagatttctggatttacgcttggattctagttgctgtattctctttgtttatgaatatgttttatgcaaaattaattgttcctttatttaataaacaaagtccgttagaagacggagaattaaaatctgctatagaaaaatatgctaaaaaggttggttttaccatcaataatatatttgtaatcgacggttctaaacgttctacaaaggcaaatgcatatttttctggttttggttctcaaaaaagaattacattatatgacactttaattaacgacttaaatacagatgaaatagtagctgttttagcgcatgaagttggtcattataaaagaaaacacatcatttttaatctaatttcatcaattttattaacaggattcacgctgtttattctttcgctatttatcaatacacctgttttatcagaagctttaggtgttgctaaaccaagttttcatattggtttaattgcattcggaattttatattcgccaatatcagaaataacagggttatttatgaattatatgtctagaaaatttgaataccaagcagataattttgccaaagaaacttttgaaggacaagcactagttacatcacttaaaaaattatctaagaatagtttaagtaatttaacaccacatcctgcctatgtatttgcgcattactcacatccaactttgttggaaagaattaataatttagaaaactaattctttttaacaacagaattaacaatgtttatcatcatctttttatccttagtatctgcattaaggggcaacattgttgttaattctatacaggtatttttgtgttgcttaatataatagacctgttttttaaattcaattcctttttttattattgtacctgtaaaacataatacgttttcattatttatcattttttcacctttaaacggaatttcttttaccacagtgcctccgtttattttagccttttgtgcatcataagaaataggaataattaccgccaaaactaaagcatctggttttttagatacatacatgttttggtaaacacttgtaaaaacatttttactgatattaattgctactttctttttttgaagctcaaaaagattatctgcaccttctttaacttgacaatagttattaaaacttaaaaataagaatactaaaatgaggtaaatgtttttcattttgcaaaaatagcaaataaatacatttagaaaacgaaatacttgtatgttaaaatacttattgctaatttcactttaagttaaccccaattttaaaatctcgtttttggaatacacagcaaccatagaagaagaaaataaagaaatagcaaaacgatataaagatttgctaaaaggaacctatgagattatgtctaaagaagacaaagaactcataagaaaagcctttgatattgctgtagatgcacattctactcagcgtagaaaaactggtgaaccttatatttatcatcctattgctgttgctaaaattgttgcttatgaaattggtttagatgctatttctattgcttctgccctattacacgatgttgtagaagatacagattataccatagaagatatggagcacctttttggtgaaaccattgcaaaaattgtaaacggattaaccaaaatatctcgcttaaacaaagaacaagacgcatctatacaagcagagaattttagaaaaatgctcttaacattaaatgatgatgttagggttattttgataaaaattgcagacagactgcataatatgcaaacaatggatgcaatgcctgcacataaacaggtaaaaattgcatctgaaacactatacatttatgctcctttagcgcatcgtttaggcttgtacaatataaaaaccgaattagaagatttaggtttaaaatatacagaaccagaagcttattatggtattttaggtaaaattaaagaaagtaaagaagatcagaaaaattatttacaacgatttgaggatactttaaaatctggtttagataaagaaaacttcgattatgaaataaaaggtaggtttaaatctatttattctattcgtagaaaaatgatcaatcagaatgtaacttttgatgaggtgtacgataaatacgccattagaattatatatgaacccaactctaatgatgataagtttgatgcttggaaaatttataccattgtaaccgattattttaaacccaaccctactcgtttaagagattggatttcgcaaccaaaatctaccggttatgaagctttgcatattaccgtagttgggccaggttctcaatgggtagaagtgcaaattcgttctagcagaatgaatgagattgcagaaaaagggtatgcagcacactttaaatacaaacaaggagctacaaaagataacggactagaagattggttaaataaattaaaagaaaccttagaaacccaaactttaaatgctgttgattttgtagaaaattttaaactcaatttatattcgaaagaaatatatgtttttacacctaaaggtgatttaaaatcgcttccaaaaaacgcaactgctttagattttgctttttcgatacatacagatgtaggcttaaaatgtagaggcgcaaaagtaaacggaaaattaatgcctttaagccatcaattaaaaagtggtgatcaaatagaagtaattacaacagcttctaacaaaccaaattctagatggttagattttgtaattacagcaagagcaaaagcaaaaattagagctgctttaaatgaagaagaaaaattaattgcagaagaaggaaaagctgttttaatgcgaaaactacgtcatttaaaaattacttttaatgataaaacagttaatgaattagtaaactattttaaattaagaaccagcttcgatttattttatagaattggtaatggtgctattgataatacacaattaaaagcatttgtttctcaacgaaacagtaagattttaaatttctttaaaactaaattaaccagaaacactgccgaaaaagaatatccagaaactgatgccgtttcaagtaaatatgatgctttagtttttggaaaagatgaacaaaaactagattataaactttctaaatgttgtaacccgataccaggagataaagtttttggttttttaacaattagtgaaggtataaaagtgcataaaatgaattgccccaatgccatatcattacaatctaattatgcttatagaattatgcctgcaaaatggatagattctacaaaacaagactttaaagtaattttagaaatatcaggcgtagacaatcaaggaatggcaaatgatgtaactcgtactatttctaataatatgggcgtgtttattaacagcataaatattaaaggagacgaaggggtttttgatggtaaaatctctataagtgttaaaaatagttcgcaattagataagttagttagaaaccttcttaaaatagaaggagttaaaaaagtagaacgtgttaatactttgtaaatatcaattgattaaaagtattaatttattaagaaataactgtaaatttgtcttttgtaaaaaaatcattcataaatgagcaattctcttgaaaatcaagaaatagtaaaaaaagttttcactacatatttaagcgaaaataagcatagaaaaacaccagaacgctatgctatacttcaagaaatatacgtagctgatgagcattttgatatagaatctctctatattaaaatgaaaaataaaaattatagagttagtagagctacactttataatacaatagatttacttttagactgcggtttagtaagaaagcatcagtttgatgggcaatctatggcccgttatgaaaaaagttacttcgataaaaatcacgatcacgtaatttttacggattctggagacgtaaaagaattttgtgatccacgaattcaagttataaaaaaaaccatagaagacgtttttgatattgatattcataatcattcactttacttttacggaacaaaaaagaacaaatcttaattaacaatacaacaataaacaacaattaacacaactataatggctgtagatttattactaggattacaatggggagatgaaggaaaaggtaaaattgtagacgtacttacaaaaaactatgatatcattgcacgttttcaaggtggtccaaatgcgggacatactttaatttttgatggacataaacatgtcttacacacaattccttctggaatattccataaaacagctttaaatgtagttggtaatggagttgtaattgacccagtaatctttaaaaaagaattagaaaatctagacaaacacaacatagattatacttctaaattattaatttctagaaaagcacatttaatcttaccaacacacagattattagatgcagcttcagaaacctctaaaggaaaagctaaaattggttctacattaaaaggtattggtccaacttatatggacaaaaccggtagaaacggaatgagagttggagatttagaattagaagactggaaagaaaaatatgatgctttaacagctaaacatattaaaatgttagaattctttgatgttcaggtagaatatgatttaaaagaattagaagcagaatttattagaggaattgataaattaagaactttagcttttattgatagtgaagagtttttaaaccaagctataaaagataaaaaaacaattttagctgaaggagcgcaagggtctttattagatattgactttggtacctatccttttgtaacttcttctaacactactgcagcaggtgcttgtactggtttaggagttgctccaaatagaattggagaagtttttggaatctttaaagcatatactactcgtgttggttctggaccttttcctaccgaattatttgataaagatggtgaagatatggctagaattggtcatgaatttggtgcaacaacaggtagagcaagacgttgtggttggttagatctagttgcattaaaatatgctgtagatgtaaatggtgttacacaattaatgatgatgaaaggtgatgttttatctggatttgataccttaaaagtatgtactacttataactataaaggaaaagaaattagccacttaccttataatatagaaccagaaaatgtttctgtaaactattctgaatttaaaggatgggatgaagatttaactaaaatgacttctgcagatcaattaccacaaaatttactagactatgttgcttttattgaaaaagaaactggagttcctgtatctattgtttctgttgggccagatagaaaacaaacaattacaagataattagtaatttactataaaattaaaaagcatctttcaatattttgaaagatgctttttttatgttcaattctaaaaaaattactttaacttttctatttgttcactaatcaatattagtttgttttgctgaaactgaagtgcatttaaaagcgcttctttttgatctacaaaagactcttttttctctaaaaataattcagtataatacagaattccggcttctaaattctttttaaattttaataaataacgcaattgttttttatcaattgtagcttttacatctgccactttttcttgtaaatgtgtaatgtaaagagacaactcttttacaaaaacattaggtctgtctaatctagaaatcatattctttctaccataaatatgatctgtaattccgcgtaagctcattactttatcataatacgccatattaggtccaggacaaacagaaacaccatcgccagttttcttagtacttacattatttaaaattaatgtagatgtacttaaaccaacacaaatacaagatttttcgataattgcatcatatttacgctttttatcttctacagataattctaaagcatctaattcttttaattttaaatgctgatattctcttgatgcagtacacaaacctgtatctttaaattcgtaatttaaagcgataaatttattaggacaagcactacctggtctgtttttatcgatatgctgttgtttttgaatatcttttgtatttcctctaagtgtgttaaaaggaacccctaaaggagatgtattacttaaatacaaatcagattctttagcgcttgctaatttttccattgttttagcatctacacttgtagcctccggaaccaataaaaatggacttccccaccctactgaatctaattgatattcttccattaaaaatgcatgctcctcatcggtaccaacaccaccttgagtggtgatttttaattctaaatctttagcaggtataattttatcggcttcttttaaagcttccattaataatgttaatgttgtactttttagagtttctttattttctttaaactcttttaaaacaggccccattaaaaaaccatctgtagcaaaggcgtgtcctccacaatttaaaccagattctattctgtattctgaaacccataagccttttttagctaaaaattttccttgaataaaagcagatctataatcgcttacctttaaaataattttctttttaatgtaaccatttttatcaggaaaaaaatctttaaaattactcatataagtgtataacctaggattcatacccgcagaaagtactaatgaggatgctaatttactttcagaaaaacctcttaaagctgcatgtgcatcattatattctattggtaataattctttattaaggtaatttgctttatcaatctttgtcataatattgacatcaatactccccatagacaaatttttatttgcccaatctttcattttagaaaaatctacgccatcttctgttaatttatgaaactctttttttaaagaagaatattctggtaacatctgaatataatcttttaaagccttacttttttctgaagtaatattttttaattgattaaatttttcttctgtttgatcgtgtaatagatttaaataagaggtaattctctttgctctaaaatcatcaactttgtctgaaatctctttataaggtatttcaaatttttcgctgtaaattttacgcattttttctactaaaatatcgtctaccaaagaaacaacagaatcaataccaaattgtgctacttttaaaggagaatctattgtaaacccaattcccattacaggaatgtgaaatgaatgtgcctttttcattgtttaattaattttaattaagcttgcaatttatatctatctcattattaaaaacatgactattatcattaaaaaaatagaaataaaattaatgaatctagcattaataagtttatactccgttattttactttagagtacatattagaataacactagttttatgttattttcattttgtttaataagtacttaaacaatattgtaactctaaaatacagtaacttattaaactatgatttgcaatcttaatttttgctataagcaatagttattacaaataaacaagtatgtttcctttgtacttatagtaattgttttaggcctttttgtgcttttaaagcttaaggataattaaaaacataaaaaaaagcccatcaattaattgatgggcttttataaaactttaagtatatttcttagataacttttacgttaactgcgtttaaacctttgtttccttcttgtaagtcaaattcaacttcgtcaccttctctaatttcatcaattaaaccagaaacgtgtacaaaatgatctttgtctactccttcttcagtaataaaaccaaatccttttgtttcgttgaaaaactttactgtacctttactcataataatgttgttaaatttataatactaattatatatgcaaagatggttccatttttctgatatacaaccttataattgttttctttttaatttattataaaattccttattatttggctatgattacgcgtaaataggtaagttaaaaaaagcaatatttagataacagctttttcaaaataaagggttaaaaaagcatctactttttccttaatgctatttatagagtgctttaaatctctaaaaatggttacattttcttccactctatttctactcatactctcttgtacttctacaatacgaacacctttaatgttttctagtaacatttttaattcgtgatctaatgaaatgtcacttaaataaatttttaaagtttgttctcttggtgaatttctaatttctgttctaaaagctaacataattgtataaatttaaagggttcataaataatgttactctaaagtaactcctcctaagttactgttttaattttatacttgcaaaaaaaacacatagccatatacaaaaagaggaatggaggttgttttaaaacaatccccattcctttaaaaacaacagtatgtaaaggctgttaaaattatgtttttctactttttaaagcataaaaaaagtcctaccgaagcaggactaaagattttcatctacggcatatagccttattgtgataagattaaagattagaaattttaatctactgtaaagatataaataaaattctattaattattacggctttccgtaaagtagctattttttatttacttacctttattttagtaaaaaaaaagctatggcaaaaattttaggattagatttaggaacaaacagtattggttgggcaatagtagaaaaagatataaacgagttttctttaattgataaaggtgtaaggatattttcagagggcgtaaatattgaagcaaaaacaagtagcgaaagttctaaagcagcacaacgtactgattatagaagtggacgaaaacttaaatatagaagaaaattaagaaagttagaactattaaaggtcttatctgataataatttatgccctaaattaactgacgaggaactaaaactttggagatacaaaaaaatatatcctaataatgatgaattcagattgtggttaagtacagacaatcaaaatgataaattagaaaggaaagaacaaattaaaaacccttatgcctttcggtttaacgcttcttccaaaaaactagatttaaataaaataagtgataagcacgaactaggtagagctttatatcatatttcacaaagacgcggttttttaagtaatagattagatacttcggataattcaattgttgaagaaaaaaacaatgacattgaagatataattcaacaagccaatacttcagaagaattattaaaaatgtataatgattttttagaagcttacgataaaacagaagcaaacagtaaagcattatttgttttaggtagagcattcaaatctattttaaaggaaaatactgatgaaacattcgatatagtaaaagaaaaattattagaacggttaaatcgtaaagaattttcaggaaaagttaaaagtgcaattagcgatttatcaattaaaatagaagaggctaattgcagtactttaggagaatatttttatggtttacacaaaaaagggcaaaaaattagaaataattacacccatagagaagaacattatttaaatgaattccacattatttgcgataaacaaaacctaccaataacattaaggacaactattgaaaatgctatcttttatcaaagacctttaaaatctcaaaaaggattggtcgcaaaatgtcctttagaaaacgacaaggcttgtgtacctatttctcatcctgattttgaattatttagaatgcaaggttttattaattccattaaaataaagccagaaagtcaagataaattaaggtttttaaatactgaagaaaagtcaattatagcatctcttttttatagaaaatcaaaaccaaatttcgattttgaagaaatagcaaaaaaattaacacctaaacatttaaaatctggatattataaagacaaaaatgctaaagactttgatgtcttgttcaattttggaaactatacaaatgttagcagttgcccaacaattgcaaatttaaaatctgtttttggtgatgattggaaagcttatttaatagagaattttaataaaaaaaataaagacaattctagtaaaacaccacatcaaataattgacgccatttggcatgtgctttttagatttgataaaacagaaaaactaaaacaatttgtaattgattatttagactgtgatgaagacattgcaatcaaattttcaaaaattaaattaaagcaagattatggttcgttaagtttaaaggcaattagaaacatattaccttatttagaaaaagacctattgtactctcatgcagtgtttctagcgaatatgaaaaccgttttaccacaacctatttggaataatgaagacgacagaaaggtaataaataatgaagtattttctataattgagaattataatacatatagaaatatagttgatattgttaatggaacaattaaaaaagtaaaggataatcaggaaacttggaacggcaaaaatacttttgttgtagaagcatataaaaaagacatagaaaaaagtattcaagattattttggtttaaaacgttgggatttgttttccgaagaaaaaaagggagttcttttaaaaaatagttttaatcttttttctactcaaatggaattaaactctggtcgtggagaattcttaaaaaaagaaaccttagacgaacgtgtaaaagcttttttaagagacaactttaatgttagtgaagatagcttgaaaaatctctaccacccttctgcaatagaagtttataaaaaagcaaaacgtagcgataaagatggcaaactatatttaggaagtccgcttatatcttctattaaaaatcctatggcaatgcgagcgttgcatcaacttcgtaaagttatcaatcaactaataaaagacgatgctgtagatgagaatacaattattagaattgaaatggctagagagcttaaaagcgccaatgaaagaacagctattagacaatggcaaactgatttacaaaagaaacgtactagttttgcagatgagataaaagcaatttttaaaggagaaataaaaatagatgattgtaatgataaaattatttctgaatacgagccaacggaaacagatattttaaaatatcaactttggttagaacaaaatagagtttgtttatatactggtaaaactatttgtatatctgattttattggagcaaatccaaaatttgatatagaacatactgttcctagaagtaaaagtttagacaattcacaaattaataaaacgctctgttgttccgtttataatagagatattaaaaaagataaaatacctaccgaatgtaataatcatgaggaaatcatgccaagaataaaccattggtatgctaaatataaaagtttagaaaatcaaattagagatattactaaaaaagtaagaggagcaactacaaaagaaaataaagatagatatattcaaaatagaaccaagttacgttttgaatataattacttaaagagtaaatataaaacttttaccataacagaaatacctagagggtttaaaaacagccaatctgtagatattggtattattagcaagtacggaaacttgtttttaaaatcattgttttctaaagtgtatccagtaaaaggaagaaccacatctaatttaagagatatttggggcttagataaaaaagaaaggattaaccacgcgcatcacgcaaaagatgcagtagttgtagcatgttgcgaaaaagatattaatgatgccttggcaagctattatcataattatgaagactatcagttttacggaaaaccaaaaccttcctttaaacatagaataccttggaagggttttaataatgatgtaaataattttgataacaatacactaattagtcatcatacacccgatgttttaccaatacaaagtaaaaaagctatacgtaaacgtggtattattcaacgaaatgaaaaaggagaaattaaataccaacaaggtgacgctgtaagaggtgctttacataaagaaagcttttatggagctataaaaagggaagaaaccaacaaaaaaggagaagttgaagaagtcgtaaagtatgtattgagaaaaccgatagatagtttttccgacaccgatataaaacatattgttgatgataaaattaaagaaattgtaactaatgcacgtaaagaagaaaagataataaagaaagaaattgaaactttaaaaaagaaaattaataaagttaatgatgcagaagaagtcattttaaaagctgaaattgaagttttaatacacaaaatggaacatgaactttatattttgcctaataaaaatggaagtcctatcccaataaaaaagattcgatattttgcaacagatgtaaaagtacctttagaaataaaaaagcatcgagatgcatctaggcatgaacacaaacaacattattttgcaaagaatgacagtaattattgtatggctatttatgagggaattgatggaaaaggtagagttacaagatctaatttattaattaataatttagaggcaggtagctattttaaaaagagtaatgttaataatcaactctatccaattgctccagaaaaagataagaataataatccgttaaaatatattttaataaagggaaaaatggttttggtttatgataagaatcctgaagaattatttgaaatggatgaacaacaattactggaacgtttatttcaaataacacaattggatgttgaaaaatctgcagaaataaagttattacatcatactgaagctcgagaaaagaaaactctaacatctattatgggactaaaaagtggtatgaaaggagggaaaaatattggcgagcacaaaaaatatccatggataaaggtaggtgttaatagttttgattgccttgtagaaggttatgattttaagataaattcaattggaaaactagaaataatataacaatttgactcttcgagacaaataataagttccttgacatatttggtttgattaaagattagaaaaaacgatattctcctggtttagaaaacgctgctaaaactgttgtggtttgattaaagattagaaaaaacgatattagatttacaataatggaaaagcactacagagttgtggtttgattaaagattagaaaaaacgatattaaattaatttttaattggtagtattaccaagttgtggtttgattaaagattagaaaaaacgatattttttggagatttaagaaacccaaccggtaagttgtggtttgattaaagattagaaaaaacgatattatcaattctttttttccattcacctccactgttgtggtttgattaaagattagaaaaaacgatatttttagttttgttttgtgatttccaattccagttgtggtttgattaaagattagaaaaaacgatattaaagatagatttacttatgtctaataataagttgtggtttgattaaagattagaaaaaacgatattggcatagaaaacggcggtagtaatgatgcggttgtggtttgattaaagattagaaaaaacgatattgaatgtaagaaccagagcgattctttgagagttgtggtttgattaaagattagaaaaaacgatattttctattctccaaccaactaatgtattaaagttgtggtttgattaaagattagaaaaaacgatattcttacaagccttattacgataggttatatagttgtggtttgattaaagattagaaaaaacgatattgcgtcagaaccaaaaggaccaggaaaaaaagttgtggtttgattaaagattagaaaaaacgatattttcagaatcagatgaaagcgacttcatatagttgtggtttgattaaagattagaaaaaacgatattcgtcaatgttagtgtaatcaaatgttttttgttgtggtttgattaaagattagaaaaaacgatattactatattatacttcataatctattcttaagttgtggtttgattaaagattagaaaaaacgatattaaaaatgcaaaaattaacaattccttcaatgttgtggtttgattaaagattagaaaaaacgatattctaacacctgagaaagtaatgttttaccaagttgtggtttgattaaagattagaaaaaacgatattatattcttcataatcccacttagatagccagttgtggtttgattaaagattagaaaaaacgatattgtaggtggttctcaagaaacaagcgcaccagttgtggtttgattaaagattagaaaaaacgatattagaagactctgataaagagttatacgaatagttgtggtttgattaaagattagaaaaaacgatattttattataatcttttggagaagttggatagttgtggtttgattaaagattagaaaaaacgatatttaaaactattattgataaaatagttttaaggttgtggtttgattaaagattagaaaaaacgatattaaataaagagcagcaatatgatgtgtttatgttgtggtttgattaaagattagaaaaaacgatattttaatatacttcttgaaacttttgccattagttgtggtttgattaaagattagaaaaaacgatattaaattttttagaggtcagtagttagttacatataattttgtgctgctctactttatccttttgaaccatttttgttattaagttattgaatattgttgctttactttgtgatcgattaattctaaaacaaaattcattaaaatatctatttagattaaagtcacttacccaagaatacgttgttcttatccaagatttcacctgatgaatcattgtatgaagtgctttaaaattcatacctccattactttctatttgagtaatattataagctttcgcaataggtctgtaacctctccatttgtcggttatcactttagcttctcgactgatatgattcacaaaaatatattgcaaagaactagctgaaaaatcttcgattctcatggcatacattcttttaacttttccatcttcagttagttcaacagcagttatagctttctttttcttagcattataacttcttcctactttatctttttctcgtccacccaaaacaaattcatccacatgaacaataccggtcataggactatttccactactttccatagcttctctaattttgagcataaataaacgtgcagtcttttctgttacactaaaacgaactgcaacataactagcagaaaggcttttagtactcgtactcatttcaaaaacaataaagaaagcttttctaacaccaaactttactttatgaaaaagtgtgtttgatgtagatgattcttgatgagagcaaatattacatgtccgtgaaaaatcttttcttatttgagcctttttatgtccacatttaacacattgaaatccatctttccacttaatatctgccaagtatttcttgcaatcttcatccgttttaaaccgatcagcaaactctagaaggttttgtcctttaaatatattcataatattactgtatttgttgtttttaaagatatgaatttaaatactgacctctaaaatttttaatataaaacagtaaaattatgttgtggtttgattaaagattagaaaaaacgatatttggcaaattggcgggtactggttacgagttgttgtggtttgattaaagattagaaaaaacgatattggaaaatcggaatattgtaccgcattttctgttgtggtttgattaaagattagaaaaaacgatattaaggtataatagatattgaacacttaatagttgtggtttgattaaagattagaaaaaacgatattggtatttcgtgtatttgtaattgcttatatgttgtggtttgattaaagattagaaaaaacgatattcgaattagaggtaattgcctgcggcgaagtgttgtggtttgattaaagattagaaaaaacgatatttttgctgtaataagtgagccagattcagaagttgtggtttgattaaagattagaaaaaacgatatttgccttaaaaccaaccatacaagatgcattgttgtggtttgattaaagattagaaaaaacgatattagttttagttcagcttcttgtctttttgttgttgtggtttgattaaagattagaaaaaacgatatttctgccaagaatagattgttgtaaatcatggttgtggtttgattaaagattagaaaaaacgatattaaaaggctacatctatggtggtacttacaggttgtggtttgattaaagattagaaaaaacgatatttgtagatcctttaggtaagcgtagaagcaagttgtggtttgattaaagattagaaaaaacgatattacagcagaaccagttaaggaagctttaacagttgtggtttgattaaagattagaaaaaacgatattgtgagtggttctacgtctgctaaaggcactgttgtggtttgattaaagattagaaaaaacgatatttgttttgatggaatgagctgtttacaaattgttgtggtttgattaaagattagaaaaaacgatattcatatcgaagaagtatttggtcgtggtaaagttgtggtttgattaaagattagaaaaaacgatatttatctgcgatgatgggcagaatgtttcaaagttgtggtttgattaaagattagaaaaaacgatattagtagcagtttttctattgcagcatctaaagttgtggtttgattaaagattagaaaaaacgatatttaaacagtaaccaatatccagatagaaacggttgtggtttgattaaagattagaaaaaacgatattaaagcaccagtacagacaatgttatggcatgttgtggtttgattaaagattagaaaaaacgatattagcggtttggttgacggttgaaatgtacgagttgtggtttgattaaagattagaaaaaacgatatttgagcgtataaaattagaaactggtttcatgttgtggtttgattaaagattagaaaaaacgatattattaaacgctgtttaaaacactattaaatggttgtggtttgattaaagattagaaaaaacgatattttggttaatttttctttcgttgcaagagctgttgtggtttgattaaagattagaaaaaacgatattctttgaggttgatgaatatgatggtgctgagttgtggtttgattaaagattagaaaaaacgatattgattgcacttctgctgataaatctatcctagttgtggtttgattaaagattagaaaaaacgatatttaaagtttcagattcttttgatttgtagttgttgtggtttgattaaagattagaaaaaacgatattgagttccaagagataattgaaatacataaggttgtggtttgattaaagattagaaaaaacgatattatcagtatgtgtcagtatcagtatgtgtcagttgtggtttgattaaagattagaaaaaacgatattagttgtgctgttaacttctaattatcatagttttaaagtaaatatcgtaaataaaaaatgcttcttataaagacctaattgctttatttgaagcattttttgttttctaagaagcaacctctaggaaaaaactaaataatgaagttatcggttattaccctgctattaaaaaagttctaattgcattggaggcggttcttttggggttggtactttcccccaaaagttcataatattgccatattgtttatctgtaattcttaaaatacttacttttccgtaaggtggtaacaaagcttttatccttttttcatgagcatctgcactttcgctactcgcacaatgccgcatataaacagaaaattgcatcattgtaaaaccatcttttaataagttttttctaaacaattgtgcatttctgcggtcttttttagtatcggtaggtaaatcaaaaaaaacaaataaccacataattctatacccatttaaatccatagttttggatacaaaatttttctagatttacctgcataacactgttgtaaagaacttgttgtactgcttaaagctaccattaatgggctttttttatcttcaaaataaactgtttgtgttaatacacttaataaatctaacttaatgggcgttattaaatcgtgctcatcgtacttatttataatttctaaaacttttgcatctactaaaggtctgtaaggttccataatatcatctgccaaacaaaatgcattgtatttattatgatgatgaatacctagtgtatttaataagccactaccagaaagtgctcttgcaactgcagctcttaaaacaatataaccataatttaaaaacaaatttgggtacactcctactctttctcttttaaacttgaagtcgaaaatatttttccaataataggctgcagctaccccttctctattatcaatatcgccacttaaaactttagatttataataatttaaaggggtgttaattttcccttgcttgtctaaaagtaacgcttggttttctattttatactttattatttgttgccacagttgtttttttagtggttctgtagcatttatttgatgtttaaataattcttgttgaatatgatggttgtctaaatttaaaagcatgctttgcggcatgtgtttatgatcacaaaaaataacacttacattgttagcggctaatttagaaagtgctggaacagaaatatatgtttcttgattttctatgacaataaaaccaatatcttctatggggacagtttttatctcttgtttttcattcttaactacaagttgctctaattttgtagttaaagaatatttattagaaaaaaataacgttcttttaatcatagttttcattttatactagacgatttctactgtcaaattattaaaaaagaatactttaacaatataactaaggtaagaatagacataaaatttatatttaatttactgaaaaccgtaactgagcaaaatttttgtataaaaaaagctcaaccagttatagttgagcttttgtttaattgtttaggttatgctaccaatctatcggaaaataatcttttaagaattttccagaccaatgtttacccgtatttataccatcaattaatggatccataactcttgcagcgccatctacaatatctaacggtggctgaaaatcatgagtttctactttgtgcttagataattctgcaggatcttcatctgtaacccaacctgtatctacagcattcatataaataccagactttgcaaatgtagatgcagatgtatgtgttaacatatttaaggctgctttagccatatttgtatgcggatgtctatctacttttttaaatcgatgaaacttcccttccatcgcagttacattgataatatgctttttacccgtattttctttcatcattaaattagacaaacgattacataacacaaacggagcaacagcatttactaactgtacttctaccatttctgtcgtttctatttcccctaattttaaacgccaactatttgtttttcttaaatctacttgttgtaaatcggcatctaattctccttccggaaaaacttctgctgtttgtaatgagttgtcaaaactatacggtatttgagataattctgccgaatttcttaaaccaataccaggttctggtccgtgccaagtaactggcaaaacattatttttatctgttttagaagtagaaacacttagatctgctaattcttctaaacagctagaatgatcttttaataatgtttgagccaatttaggaagttgatctaccggtaatttttcattttccattaaatggaaataaaaaccagacggacgtcttacagtttgtgctgcattattaattaaaatatctaatcgatcgtatttttgttctatataattacagaaaatttctacacttggtatatgtcttaaatctaagccatgaatgtgtaaacgatgactccaatctttataatcttcttctttagaaaaacgaattgcagaatctgcaggaaaacgcgtagttgccacaaccgtagctccagaacgtaaacacattaaggtaatgtggtatccgatttttaaacgagaacctgtaattactgctacttgaccttttaaatctgttgtttgaaaacgttttgcataatttaaatctccacattcggtacacatcgtgtcataaaaatgatgcaatttggtaaaaaccgttttacagacataacaatttcttggcgattctaattctggtgtatcttcatttaattctgctgctcctaataattttggtgcaacaaataatgcggcttctcttgcagaacgtattccggtagattttctagcgtgtttatcgctttcaatcattttacgttttgccgcttttttagcatctttacgtctacgctgaaactcatctctatttggacgagataattcgccagcaactttaaaaagcgctactctttgttcttctggcaattcaaaaagctgatttgtgtcctccaataatttttgaagggtattaatacacgaatctacctctgtatttaaatctttattactcatattattacacttcgtaaatacgtacttttttcttttttaaacgagaattgtttaatttttctattaattctgctgttaatgttgatggcactgctacaaaagcacaatcttgtttcaactctatgtcacccagttgatctttacttaattttccttgttttataaacaaaccagcaatatctcctttcgaaattttgtcttttctacccccagaaataaataaagtttcccaaaaaacaggacttctttctgcttgtttagaaatatcttgtaaatctgcatgtttaataaaatctggtaaacgttcgtctttccattttaaaacaaaggctgttccttctgcagaaactcttgctgtacgcccgtttctatgtgtaaattcttctactgcttgtggcaattcataatgaatgatgaaactcatttctggtacatcgatacctcttgctgctaaatctgtagcaattaataattgattggtcccgtttctaaattttattaaagaacgttctctatctttctgctccattcctccactaaaacaaccatgttttatgttcttgctctctaaaaatgtacttacattatttatagaatcttttaaattacaaaaaacgataccttgcttatttcctaaatgatttagtaaatgtaataaggtattcagtttgtttttagcaggagaaactactgttcttatttctaatttagaagttactgcttttaagtaattaactgtgtttggtttacttaaacctacaaaatcaggaatttcaactccctgtgttgcagaagttaatatgcgtttatttaaagataattgattgataatattacgcatttcatattcaaaaccaacctctaaagatttatcaaattcatctaaaattaaagtttttatatgctctttagaaaaacgatcgtttgcaaagtggtcagaaattcgacctggtgttcctattaaaattgcaggaatatgctttaattctatcttatctttagacatcggtctacctccatacaccgcatttaccttaaaaccagaacccatagaacgaattacttgttctatttgaattgctaattctctggaaggtactaaaattaaagcttgtacttcttctaaatttggatctaaaaattctaataaaggtaaagaaaaagccaatgtttttcccgttcctgttggcgaaagtaaaattacattatcatttttatgaatggtagcaatagcttctttttgcatttgatttaactcttcaatctgcaattttgataatatatcttgttgagtttttataatatttgccatgcttatttctttttcttctttttaattactgctgtttttgtttttgcacttgctgtttgtgctaaataattagccaaaactttatctaccaattcttctttggttaaatgatgaaaaattgttttaatctctgcttttaaatcttctgaaataccacgatttggttttgttttaaacacttttttagcccacagaattgtattattgtcttctatactttgtgcatctgcttttttatattctttaaaagtcaaacctaaatcttcttcaaattcaggaatttcttctaattcttctggttgtatcacacttaaagaaagtccggttgctcctgccctagctgtacgtccgcttctatgtacatacgtatcatacctgtctggtaaatggtaatttactacgtaagaaatttctttaacgtcaataccacgagctgctaaatctgtagccaccaaaatatcgatatttccttctctaaattgtcccataactcgatcacgaataccttgggttaaactaccgtgtaaagcacctgatgaaaatttattaatcgctaaatttttagctaatttattaacggcagcttttgttttacagaaaataattccgcgttctccttctttagtcgataaaaagtgcattaaaacattcaatttttcaattggttctaccaccacatattgatgatcgattcctttatgcccaacagaatccatatcagtttctatatgttctacgtgtttagacatatagttttgtatcaattgcttgatggttccgggcatcgttgctgtaaacaacaacgttcttctaacattcggaatttcttttataatagcatctacttcttcctttaaagcgcttaccatttcatctgcttcatctaaaacaaaatagttgatttttttaatatcaatcgcttcacgtttcattaaatctaccaaacgacctggagttgcaattacaatacttgggttctttttaatggcttcaatctgtggttttattgggattcctccacaaatagaaacaatcttttctttttgttcatc

SEQ ID NO: 4147 - DNA, 24317 bp, synthetic construct
  misc_feature 1..24317: note = Synthetic
  source 1..24317: mol_type = other DNA
cgccgttaaccaaaatcgatttttcgaaagtgccgcaaatgttcaagcagcctaaattgcttacggcttccttttttatcacttggctagtcgggccgttcttgatgtttttattggcgacttttttcttgaaagattatcccgaatacatgaccggactaatcatcatagggattgcgccttgtattgcgatggtgattgtttggaacgaattggccgaaggcaatcgcgaattaaccgcaggcttgattgggattaacagtttgctgcaagtttgtttttttagtttgtatgcttatttttacttggaaatcatgttgcctttgtttgggattaaaggactggaactaaatatcaccatagccgaaatagccaaaacggttgggatttaccttggtattccttttgctttagcggttatcagtcggtatgcgattaagaaatttataggcgacaaatggtttaaccaaaaattcattcccttcgtttcaccgattactttgattgcgttattattcaccattgtcattatgttcagtttgaaaggcgaaatgatagtcgatttgccgatggatgtggttcgaatcgcttttccgttagtaatcttttttaccgttatgttctttttgatgttttttgtgtcgaaaaagattggtgccaattaccgtgatgcgacagctttatcgtttaccgcttcgggaaataatttcgagttggcgattgcggtttctataggtgttttcggtatcaatagtggacaagcttttgcaggcgtaattggtccgttggtggaagtaccggcattaatcattttggtcaatgtggccttttggcttagaaaaaaatatttcaccacaaccgtttaaatttatggaaagaaaagaacattgggagaatgtgttttccactaaaaccgaaatggaagtgagttggtaccaaaagtatcctaaaacttccgttgattttatcacagctttgcatttgcctttggaagctagaatcatcgatattggtggtggcgacagttatttgatggatgctttgctggatttaggttttaccaatttgactttgcttgatatttcggcaaaagccgttgaaagaatcaaaagtaggttaggtgatagagcttcaaaagtcacttttatcgtttcagatattttggattttatgcctaaggaacaatatgatatttggcatgaccgtgcttgctttcactttttgactaaagccaatgaagtagaaaaatattctaagattgctagtcaggctgtagccaatgacggaaagctttttatgggtactttctctgatgctggtccgaaaaaatgcagtggtttggagatttcccaatacaatatggaaagtttacgtttcgtctttgaaagagattttgaattaagcggatgctttaccgaagcgcatcaaacgccttttgatacaatccaagacttccttttttgcggatttaaaagaaaataatgtatgaaaaatatactagttttatgtacaggcaacagttgtcgaagccaaatggcgcatggttatttggcgcatttcaccgattcggataaagtaaccgtgtattcagccggagtggaaacgcatggtgtaaatgctttggcagtagctattatgaaagaagacggtgttgatatttcgaaacacacttctaatcatgtggaggaatatttcgaaattccttttgattatgtgattaccgtttgtgacaatgccaaagaacgttgtccgttttttccaacgcaagcggtaaagttgcactataattttcccgatccgtcgaaagtgaaaggttctacgatggaagttattgaagaatttagaagggtaagagaaatgattaaagactattgtaaagactttgttgcaacccataatctataaatgaaaacgtcccgaaatcatcgggacgttttttatggtctaataatctaacgatctaaaaatctgattacacgtgtaatgctctgttatccgtagcggctaaagcagcttcttttatagcttctgcaaaagttggatgcgcatgtgacatacgtgaaatatcttcggcactggctctgaattccatggcggttacggcttcagcaatcaaatcggcacaacgggcaccaatcatgtggattcctaaaacttcgtcagttttagcgtctgccaaaattttaacaaaaccatcgttgtctgcactggcacgagctcttcctaacgctttgaaagggaaacttccggctttgtaagccactccggcttcttttaattgctcttcggttttaccaacagctgctacttcaggccaagtgtaaactacacccggaattaagttgtaatcgatgtgtggtttttgtcccgccataatttcagccaccaaagtaccttcttcttcggctttgtgagccaacatggcaccacgaactacatcaccaatcgcatagatatttggaacattcgtttgtaaatggtcattgacttcaatcatacctctttccgttacttttacaccggctttatcagcatttaatccgtcagtataaggacgacgaccaacggctactaagcaataatcgccttcaaaagttaccgtatttcctttagcatcatcggcttgaacggttacgtttttaccttttcgggttacctctttcactttgtgagaagtatagaatttcatgccttgttttttcaagactttggtcaattctttagacaaaccggcatccatacctggaatgattcggtctaaatattctaccacagaaacttgtgcgcctaatcttaaatagacttgtcctaattcgatgccaataacgccgccaccaatgatgattaagtgtttcggtacttcaggcaatttcaaggcttcggtagaagtgatgattctttctttgtcgattttgatgaatggcaacgaagacggttttgaaccggttgcgattacgatattttttccttcgattatttcagttgaaccgtcggctttggttactttaacgtgagtggcatcttcaaaagaacctaatccttcgaaaacggtgattttgtttttgtccattaagaacttcacgccgccggaagtttggtcaaccactgcttgtttgcgggcaatcattttttctaaattgacttttacttcgcccgaaacctcgatgccgtgatccgcaaagtgttgcaattcttggtaatgatgagaagaagctaaaagtgctttagacggaatacaacctacatttaagcaagttcctcctaaagtagcatatttttcaatgatggcggttttgaaacctaattgggcacaacgaatagctgaaacatatccgcccggacctgaacctatgatgacaacgtcaaatgaactcataatactataaaaattagtgtgttttgtttactgtggcacaaaattacgaattaaatctcaatgcccatatcaatgacaatggcaaatttgcaatcaatttttatagtgtaaaagccgtagtgtttttgacctcgccgatcataaaagtgctgtgtgtactgccgatgtgttgcagtgtagtcaatttggttaccataaactctcggtattcttccatgtctttgacacaaacttttaaaatgtaatcataatcgccactcacgtgaaaacactctaaaacttcatcgagctttataacttgatgttcaaaagtagttaggaattctttcgaatgttggatgagtttgatatggcaaaacacgacaaaacctttgtggattttattgcgattgagtaaagcgacatatttatcgatgataccttcgcgttccaatttcttgatgcgttcgtaaactgctgtcacggaaagattgagttttactgataactctttggtggtttttttggtgtcttgttggagtagggcgaggagttttttgtcgatggtatccatgtcgcaggttctaagttgtaggtttttaaatagttttaaaaactgataaagtgtgtttcttgatgtaaagttaaaaatattttctataaatttctacaaatttagttttaaaatctatattaatctatttgtgttgtttttttaactgtaatatatcaattttgaatcgtaataaaccaaatccaacttatgacacacaacttagaacctacaaccactattgattttcatcctgcagataaaattcaggatttacaatacttcggagaattcggaggtgtaaatccttcaatatctgacagttctacttatacctttctttcggccaaaaccatgtttgatacttttgaaggcaatgccgaaggctgttatttatactcgcgtcattcttcgcccatgaatttgtatttagggcaagctttggccgcgatggaaggtacggaaagtgccaacgttgctgcctcaggaatgggtgcgattacgcctgttttgctccagttgtgtgctgccggagatgaaatcgtctccagccgcaccatctatggcggaacttatgcttttatgaaaaacatgttgccaaaatggaacatcaaaactcgttttgttgacatcaccaaattagatttggttgccgcagcaatcacgccaaatactaaagtgctgtattgcgaaacggttagcaatcctttattggaagtagctgatattgaagctttggcgattattgccaaagaacataatattaaattagttgttgacaatactttttcaccattgtctgttgcgccggcaaaattaggggctgatgtggtgattcacagcttgacgaagtttatcaatggaagtagtgatactgttggtggtgtagtttgtgcttcacaggattttatcaatgatttgaagaatgtgaacgatggtgctagtatgcttttaggaccaaccatggacagtttaagagcgtcgagtattttgaaaaatatgcgtacacttcatattcgcatgaaacagcatagtcataatgccatgtatttagcccaaaaatttgaggcagccggactgaaagtagtttatcccggattgcccagtcatccgagtcacgaattgtataccggcatgattaatccggaatatggttttggcggcatgatgacaatcgatgttggaactttagacaaagccaatgaattgatggaattaatgcaacaccgtaacttgggttacttagccgtaagtttaggcttttataaaacattgtttagtgcaccgggaacatcaacttcgagtgaaattcctttggaagagcaacatgaaatgggtttgaccgacggattaattcgtttttccatcggattggataatgacattgagcgcacgtatcaaatgatgaaacagtgcatgaatgaattgaatattatttaagttgttataatttgatttttaaaagtccgttggaatgccatatccagcggacttttattttaaaattaaattttcccaaggtattccaccaaggaaatattgaggatgtggttccagcccatttcaaagttttctcttttgaatgccggttcgttaacatcaaaaggaaccgtaaagacgtggctgaaatgcaattcggtagtattttcatctatgggatgtaattcccaagtaaccacagaagttccggacgaacctacatattcccagctgtgaaccagttttttatgggggataatttcgagcattactccacgatgttgccattctttgcaatcattatctgttccgtaccagtcaaattgttggcctacttttagttgccaatcttcggtaaattcaaagtaccattgttttaaatgttctctttcggtaattactttccaaagtgttgttgccgatgccttataaacttttttgagcgtaaggctgttgtctgttttttccatttgtctttagtttatagattctttaaataagcttccattttttctatgttttgctgtaagccttctgaaatattgtatagattcataatccttattaattcttctttagactcaaatagcatttgccaatgaagataggtttgattgcctctttcttcgaatagaatagtggctataaattcatgaccagagatatgatggtaaacaatttttttctgttattcgacttcggtaaaaatgctttcattgtcgtaatcggttccgtcaggtccgtgcattactaagttccataagccgttggaaataacttccattttggtgatggtattggtaaaaccatttggtccccaccaattttttatgtggtcaggattggtccagacttcccaaaccaaggctattggagcgtttagcaaacgagaaacagtaatttctctgtctgcggtgttagctgatgttgtcattgttattgtctttttgaagttggtctaaataggtttctaaagcatcgagtttggtttcccagaactgtttgtattgttctatccaaactgaaacttcattgagtttttcaagtttggcttcgcaatagcgttcccgacctttgtcggtaatttcgattaggccacattcatttagaattttaatgtgtttggatattgccggtcgactgatgtcaaaattttcggcaactgcattgagcgttaaagtttgtgcagctaaaaggctaagaatggctctgcgagttggatcggcaatggcctgaaaaacatctcttctcattaattaataatttaataggtaactaatcggttacaaatatatgtgtaactgttcagttacgcaaataaaaattattttttttagttcataaaccattaatttccaatttgtaatcaaatactggtgattattttataaatttatatgctataaactattattgtcgtggtaaaaaaatacttttttatgttttgtgttatatggggattaagtacacaagcacagataatcaatattcctgatgccaattttaaaaacgccttattgaatactttgtgtgttgataacaattctttttatggtggtgatgttgatgcggatgtcaacaatgatggagaaattcaggttagcgaagcttttttggtcactaaattgatcttaaataatagtaacatttcctcagtgatgggtattgaatattttaccaatttagtttctttggaagttggtaataatcctctggtaactttaaatttgcaaataccttccttaaaaaaattgacttgccacaatgcccagttgactgaacttatggttgatggattgccaaatttagaggaaatttattgtggagataattggataacttatctcgatttaagtgctactaatgtttttcaattaaatgtcagtaacaatcctaatttggtttgggttaatattcgaaacggtgttttgaatggatgtgttattttattgatgcccggtgttgattacacttgtgctgattacttgaattgtccggctttgcgttttgtttgtttggatgatgaggaagcaagcagtcaatctttttattccaattttcctcaagacgaagttcaatttgttaccgattgcagtctagcagtgaaggacaatgtgattaataaactattcaccctttatcccaatcccacaaacggagtattaaatattgatataattaatggagaaaccgtaaaccaaattagtatttataatgctttaggacaaaaaatattgaacagaactaacactgacgctattgatgtaagttccttagctcagggaacctatttaattacagtagaaacgaataatggaaataaaactcagcagtttgtaaagttataagttctgataggcttccaatttttccttgatattatacaaaggcgttgcaattgcattcacatattggaaattcccgtctcgtttgttgtcaatcgataattgtattggacaggcttcactttgaatggcattgaccttaaactcattttgctttgtgtcataaacgaaataaggtgcgcccgaagaaccaaatcggaaatagcctttaatcaaatagcgtaatccttccaaaatataattgccgccaatgcgttcttgaaaaatggcaaaatgctccgtaaaaccgtcaatttgggctttgttgagtaatttgccgacttcacttgtaggtgagctctgcaaacaataatagtgttcttgttcatcacttaaaatggagtaatcgattgtggcacttggcatggcatcaatgacttcctgtggtgtattgatgattttgtacaaagcaatatcgtcactgtaaaaagcttctacgagttctacttcaactaaaaaagtatggcgattgattgcaggttctgcaaaataagtggctgccgtaaaatgttttgaaagtgtagcattattataaaattgatcgtttttaaactgaattattaaatgtgctttgcaaatctttttctccagaaaagtaacccaacgtgtatcaaaattgatttgctttaaagcatcaatggtgaattgaaaatcacttgggttgttgctgttccaatatcttttttgggttgtagaatctaatggatagcaatttaaaaataattgtttttgagcttcatttagatagggcagaatgtcgttgttgaaaatactttcttcaattgatttaaaaattttcgcctccggttttaagttgtgtgctaccgataaaatataaccgttaccaatgtgaaatgcacaaatgttattttcaaaatgtcttttgttagctatattgatgttttgtgtaaacataatgcgaaataaaggagaagtttgttcgttagtgagttcgagttgtttttgaagtctttctttatttgtcattgaaaatttttttgttggtgtttatcaaatataccaaagatattctaacggatattataagtgtagtgtcttttagctcattgctctaacttattaacaagaaattcgttaataaaaaaaagaggtttagtattttttgaaagtttaacagtttatttttgagctaaatagaggtgttgttatcggcttttattttccccaaatttttattgaattagctctgattaagaaacagggttcattattttttttgtctaactcaacaataaattaaatgagtttaaagaaatcattgtttgtggctgtgcttattagtgcggttagtctcggagcttttgagtttattggcgttagcaacttatagttttgtcaattttacttgggttttctttagggtcagaaagtttgaaacggcctaaaacatgattgaatggatgttgtttatgaatggagatggtgcgaaaatattatatggttttttcgattataaaagtatttacgttgattttattgacctttatttgcccttgtatgatgagtacttcattagaaatggtgtcttaaacgaaatctcctttagttctggaagtggtttgggctgttatgtttttcctaatagccattgctcagggaaatggtaaacagtttatttatttcgagttttaattgcgtttttttttggatgggagagtcgctttttagcggctttttcttttttatgtggttgtgattttagagaaatgatgtcagttataaaagaaatgacttcacttaggttggaaatgactttagttatggaggaaacgactttagttaaggcggaaatgatgttacttatggaggaaacggtgttacttatggcggaaacgactttagttaaggcggaaacggtgttacttatggaggaaacgatgttacttatggaggaaacggtgttacttataaaggaaacgtttttacttatagaggaattgacaatgtttagagtagattggtagtaacttgttttagcagaatggcgaggttggatgaaaatgatttgagcataaaaaaagtcccacggagtacgcaggacttaagattttcatctacggcatatagccttattgtgataagattaaagattagaattttaatctgaagtaaaaataaagaattattttttactaacaatgtggaaaaccgtaaaaagtaagaaaattattttgtagttttattctttacttaaaaaggcagtttattatggcaaagattttaggattggatttggggactaatagtattgggtgggcgattgtagataaagatggaagtgaatttgcccttgttgataaaggggtaaggatattttctgagggggtgaatattgaagcaaaaactaatagtgaaagttctaaagccgctaagagaacagagtacagaagtgcaagaaaattaaagtatagaaggaaaataagaaagatagatatacttaaagtattgtcggataatgatttgtgtcctaaattatcagatgatgacttaaataaatggagatataaaaagatttatcctcaaaatgacgaatttagagtttggttaagtactgatagtcatgaaaatgagaatgaaagaaaaaagcaaaatgagaatccatatttttttcgatataggtcagctaatgagtcattaaatctaaacaataaaaaagataggtttgttttaggtcgggctttttaccacatagcgcaaagaagaggttttttaagtaatagattggatagttcagacaattctattattgaagaaaaaaaagatgaaataacatctttaatcaatgatgcagttactatatttgatttttcagaaatgttttctgatttccttttgaattttgataaagatgaagcaagtgataaaccattatttgcactttcaagagcctttaatactataataaaggaacaagcagttttgaactataatgatttaaaggaaaagctaattgagcgtctaaacagaaaagaatttcttggtccggtaaagagagctataagtgacttgtctgaaaaaattgtaaaatcgaattgttccacattaggtcaatatttttatacattacatcaaactggccaaaaaattagaggagaatatactcatcgagaagatcattatttagcagagtttaattttatatctgataagcaaagcttagatactgaattaagagaaaaaattaaggaagctatcttttttcagaggcctttaaaatctcagaagggtttagttgctaagtgtccattagaaaacagaaaagcatgtgtgccaatatctcatcctgattttgaagaattcagaatgttaagctacttgaataatgtaaaaattaaattgcctattgatgaaaaattaaggctgttaaacgatgatgagaggcagcaaattcaatctttattttttagaaagtcaaaagcaaattttgattttgttgatattgcaaaaaaactcactccaaaaaatctaaaatcaggttactatagagataaaaatgtaacagaatatgatgttttattcaattataattttggcagtaatgtagctggttgtcctaccatagcaaatttaatcgaagtttttggtttagattggaaaacctatttatactcaaattttgtaaaaaatactaaaatagaaaataatgtaagggttaaaaagacggttgaggatattgttgatgatgtttggcatgtattatttcgctttgataaagaagaacgtttaaagcaatttgctattgataattttaattgtgacgataaaatcgccacaaaattttcaaagataaaactcaagctagactatggttctttaagtttaaaggctattcgaaatatacttccttatttaagaatgaatcttatttattcgcatgctgttttcttggctaacatgaagaatgttttgccaaaagaaatttgggataatgaggaaaacaaagccataataaataatgaaataaattcaatcattgaaaattataaagcttatagtaatagaattgatgttgtaaatggattaattaagaacgttaaaaaagacaatggtacatggagttcagataaccaatttgtagcagaagcctataggaatagcttaaacaaacagattaaagatttttttggtgcaaaaaaatggaatgaaacctctgagacttatcaaaatgagattttatctgaatgttttgaattatttgtaaatcaaatgaaactcaattcaggaagaggagaatttgctaaaaagaaaacaattgatgaaattttgaaggtttttttaagcgataattttgatgttaatgatgatgatttaaaacgcttatatcacccttcagcaattgaagtatataaaaaagctaagcgtggtgaagacgatggtaagttgtacttgggaagtcctataatttcgtctattaaaaatccaatggcaatgcgttcattacatcaattgaaaaaagtagttaatcaattgatgaaagatgatttaatagatgaagatacgattatacatgttgaaatgccaagagaattaaactctgctaacgaaagagttgctatcaggcaatggcaagaagatttgaaaaatagacgtagtaaatatggcgcagaaataaagtctatttttaatggagaaattaaaaatgattcttgtaatgattcaaatacaggttatagtgattatgaaccaactgaaacagatattttaaaataccaactttggattgagcaaaacaaagtatgtctttatacagggaaaactatttgtttatctgattttattggtaataatccaaagtatgatattgagcatactatacctagaagtaggagtttagataattcacaagtaaataaaaccttatgttgtgctatttacaatagacagataaagaaagataaaattccatttgaatgcgaaaactatgatgagattttaccaagaattaaacattggtatgctaggtataaaactttagaagaacaaattaaagaattgtctaaaaaagttaaggcagcttcaatcaaagagaaaagagataaatatattatcgacagaactaaattaagatttgagcacacttattattataaaaagtataaatcattcacaatggaagaagttcctgaaggatttaaaaatagtcaatcggttgacataggaattattagtaaatatggaaatttatttcttaaaacagtatttagtaaagtatatccaataaaaggtaagactacagccaatttgagacaaatgtggggattggaagaaaagacaagagataatcatgcgcatcatgctaaagatgcagtagttgttgcttgttgtacaagagatataaacgatgcgttggcaaattattatcatgatttagaacaatttgagttttttggaaaaccaaaaccttcttttgcccacagaattccatgggatggatttcataaagatgttgctgactttgataaaaacacattgataagtcatcatacaccggatgttttacctattcaaagtaagaaagctattagaaagagaggaatcattcaaagaaatgaaaaaggagaaatcaaatataagcaaggagatactgttcgtggtgcattgcacaaagagagtttttatggagccattttacgagaggagattagtaaaaaaaccggaaaacctgaggaagttgttaaatatgtgaaacgtcaagcaattgaattatttaaagacgctgatttaaaaaatattgttgatgataaaatcaaggaaattgttataaatgggagagagcaagagaagcaattaaaaaaggaaattgacgacctaaaaaaacaaatgcgagaccttaaagaagaggatgagcaaccgcttagagattctattcaacttttggagaataaaataaaaaatggattgtatgttttgccaaatggtagtggtgctccagttccaataaaaaagataagatattatactagtgatgttacgaatccattatttatcaagaaacatagggatgtttcaaggcatgaacataaacaattttatcatgttaaaaatgatgggaattattgtttcgctttgtacagtggaaaggatgataaaggcaagattatatcagaatacaaagttgttaataattttgaagctggcaaatactataattcaaaagaaaacactcataaatatcctttagagtttaatttgcaggataaaaataaaaatattttagatttaaaatttctattaaaaacgggaactttagtattgttttataaagattttgaagatgaaatctgggagctagaaaattttgatttagtaaaaagattatataaaacagttgctatagaatctgatggaagagtacagtttagactacattctacatcaaaacctgatgggctattggaaaaatcatctgaaattaactttgatattgctaatgaaaaattaagattgtcaaagtctgcattgaaaatattagttgaagggtttaattttaaaatttcagtttctggaaaaattcaaaaagtgtagtgttgtcatttcgacggaggagaaatcacataattttgaatggtgtgatttgattcttcctttgtctgaatgacaaaaagggaaggcggaatgataaaaaaggaagttgaacgattatagaaaaaacgatgaataatagcatgattgaatataacgaaggacactattctttttatgtttatatcattacaaataaataccgttcgacttattatattgggatgacaaataatcttggtgaacgattgaagcagcataaagagaatattgaaaaaggaattaaaacttttgcatcgagatataatattgagtttttggtgtactatgaaaagtttacttgggtacaagaagctattgctagagaaaaggaattgaaggcttggagaagggaaaagaaattggatttaattaggagttttaatcccgaatttgaatttttgaatgataggtttgtgaataataaatagtttgtcatttcgacgaaggagaaatcacataatcttgaatggtatgatgagatttctccttcgtcgaaatgacaaaagagaagtcggtttgacaaaaatagaatagttctttgacataaaactttttaatcttaagcaaccaaaccacaacggagtttctacggagtcactccgttgtggtttgattaaagattagaaaacacgatattgatttgacttgaacgcatctacgccggtaggttgtggtttgattaaagattagaaaacacgatatttatggatgtgttgtatgtattaggccaagggttgtggtttgattaaagattagaaaacacgatattttgccatctgatgctgttggagtaagccagttgtggtttgattaaagattagaaaacacgatattctaaatcagtttcagatacacgcttacaagttgtggtttgattaaagattagaaaacacgatatttacaccgaggccccgatacgaaacggtaaggttgtggtttgattaaagattagaaaacacgatattccgtttacggatgcaaccaatacacctgtagttgtggtttgattaaagattagaaaacacgatattagttggcttgttaccttctaataatcaaggatatatggtgtatatcgtgataaaaaaatgcttcttttacaggatgataagctgtgattgaggcattttttgttttctgaggttgtggtttacaaacactttgtgtttatttttcagcggagtgtttgttaatctcccgaaaagggagatttgattaagattagaaaacacgatatttacacacaaaaagatatttactgtattgcgagggagatttgattaagattagaaaacacgatattccaacatcctcacgttcgtaaacttcgataagggagatttgattaagattagaaaacacgatattagttggcttgttaccttctgataatcaaggatatatggtgtatatcgtgataaaaaaatgcttcttttacaggatgataagctgtgattgaggcattttttgttttctgaggttgtggtttacaaacactttgtgtttatttttcagcggagtgtttgttaatctcccgaaaagggagatttgattaagattagaaaacacgatatttggtgaatgattttatcaagtttcattatcagggagatttgattaagattagaaaacacgatattagttggcttgttaccttctaataatcaaggatatatggtgtatatcgtgataaaaaaatgcttcttttacaggatgataagctgtgattgaggcattttttgttttctgaggttgtgatgagatgtttccttcgtcagcatgacaagtttgagggagaaaaattgtgggtattcccctgactgcgctcgggatgacaaaaaaacggttgatagagataactgatatgttttagaaaagttctaattgggttggttgtggttctttgggtatttctgctttgccccagaagttgaggatgttgccgaattgtttgtcggttattcttaggacgcttactttgcctagtggtggtaatagtttgtgaattcttttttcgtgtacatcggcgctttcgctactggcgcaatggcggacatagacggagtattgcatcatggcaaagccatctttcaagaggttgtttcgaaagccacttgcgaatttccgatcttttttggtctcggttggtaaatcaaaaaatacaaatagccacataattctgtatccgtttagctccatagttttggatattttattttcttgcggtcaccggtatagcattgttgtaatgagcttgcggttttttgaagtgctaccattaaagggcttttttcttctttgaagtatactgttcgggttagtatttgtaaaagttcggctttgatggctgtatttagttcttgttcttcgaagttttgcattatttcatagaccttttcatcgactattggtcggaatggttccatgatgtcgtctgctagggcaaaggcattgtacttgcttttgtgatggatgccaagtgtgttgagtaatccgcttccggataatgctctggcggttgctgctcttagaatggcatagccgtagtttagaaaactattaggatagtcgccgaaacgttcgcgtttaaactttatttcgaagaaagatttccagtattgattagcggcaactccttccatattagtgctatctccgctaagcacttttgaggctaggaaaggaaaagtgttttttgcttcggtaatttgttctaatagtattccttgattggttattttttcgacaatggtttgttgccataattgcttttttaatggagtgcttgcgtttatttgatttttaaatatttcttgttggatgtgatgactattaaggtttagaaacataccgttaggtaaatgattggtgctacaaatgatgacagcggtattgttttggattaataagttcattgcaggaatactgaggtaggtttcggcattgtctattactaaaaaaccgatgtcttcaataggaactgtgctttctttgatttctgattttaaaacaagttgtaaattttttgttgtaatggttgtcttgttttctactaataaagttcttttgatcatgctagtgtttatttgttgttaatcagattcttatggtaagaagtggtagtttgaatatatttaaaagtaattattttactatataaattttgttttcgggtgatttggtggcgttttttttgaaaaaatgttaattggagtcattagaatattattttgtagtaattgtcttggtcaataaatcttacattttaatgagaatattttaaaaatgagaacgttattgatttgtgtaaaatgaaattattaatgatttgtaagaaatattaattatttaataaaaatgtattttctgatgtttttgtgttgtttcgtagggaaatatttttataactttggcttgagtgaatcccaaatcactgaatgttaacctattaatattaaaaattatgaatcaattacaagagcgaaaacgctcaatgtactatgttgtagaagattttcttgcaacagtaccagcggctattatagccagtatgcctgagtttgaggcaaaacttgttacgtttaccaaaagtgttgcggacattagacaactcagcgaaagtcaaaccactaatcgggttggttacagaattgtaaaagacgaccttaaactagccttgacaagaaaggctattgatgttgctactagaattaaggcttacgccatcaacattgatgatgtagttttacgagaagaaatgtatcagcgcattagtaatttaattaagaagcccgatactatatgtgctgacatttgccaatacattcacggtaaaggaagttcgttattggctaatttatcggattatggtgtagataatgtgatgttagattcattagatgatagtattagtgaatacacatcttatatccctaagcctagagccggaatagtagagcgcaaacaggcaacaagtgaaatgagtcaactttttgcaagttgtgatgtagttttaaaaaaaatggatgctttggttaatatgcttcagtttagcgatttggagttttattctacttattattcaagtagaaaaatcataagaccaggttatcgcacgattgcaataagaggcattgttactgatgcggaaggttatccgttgaataaagttgatgttgctattgaagatactgcatttagccgtaaaacaactaataatggtggttttgagataaaagacattgacagtggtatgtatactgttattgttaaaaaaccgggatatgccgatactagaactatagttgctgttactgcaacagagcgaacagatgttagtattgtgatggaatcagtgaatagtaatgctcaagaagtagcttaaaaaactatgatgccatttggagagccgcttttagcggctttttcttttaagtgttttggtaattaaataaaataggaggtcttttcagacctcctcaattttatgattttgatttatcattattaacttgcaccacttgatgcatccaactattgaattctctctttgagaccttcaagtaattaatcaaaatcatattcaaatgtacttaatttttaaatgcaattattttaaaataaggactttaacactcatttaactttgctttagtagtgtaaatttgatgtcttttttgagattattagttaagcgtatgactgacgctgattttggtatttagtaattttgaaattggacaatttgtttcagcatcttttaccaattcgtcgaatttatcttttgaaattccgtcaacagttgcggtcaaagtaagatttgatgctacaatggatccgtcttcaaaaacaatctcgcaattggtttttaattcggttggtgtgaaacctgcttcttgtaagttgaaggccagtttcattgaaaaacaacctgcatgtgctgcgccaactaattcttctggattggttccgattccttcttcaaatctagagccaaaggaatattgtgtctgatttaatacggtactttgtgtggttaaatgtccttttccgtctttgcctgagccgttccaaacggcagttgctcttcttttcatatagtagttattttagttttaaaaacttctaatttacaaaaaaggagattaggagttgttactttgaagttaaatattcactgaccggtttactgttttgttacttgatttttttgaaattagtttcagcgaattcaaaccccaaaaaaaagaggtcttttgacagacctctcattttgactttgatttattataacctccattttgcgcttttcagcactatggtatattaaacaatttttcaactgttcaggtctttaattaatcaaagtcttaatatcaaatttagctcaaaaaaaatataagccttctctttttttatgctttagttattaattaataccttagtattgttaatcctagcgctctgagaaagtattcgaaatatatgccgctaaggtttgatccaattcagtaatggcttttttgctataggtgaataaagtgatttcaacagtaaaagctttgaaaattttataatcgggatgatggtccatttcatcagcttgtttggctattttcaatatgaattcggccaatgctgtttgagatttaaattcaaatgtattgactagttttccgtctttaacaatccactccattattttagtattacgatttataaatagcctaacaaaaagtagataattataaaaactataatggttcctatgcaaccaccacctaattttttggcactgtaaccggcaattaatgttttgaaaatcccattcatacgctatacttttaggttactatttcaataacataaagataatcaagcctaaaaagaaagagttatataattttcagtaatttttttataattctagtactttccgtttaacaattctccaccaatagccgatttggcttcaatacccaattttttcatcatttcatatgtcgtgcaaaccgcagcagaagtgaccggaatgccacattcagcctgaatcaaatcaatcgcttccaaagaaggcatttgcacacaagccgaagcaactaaaacatccacatcagtcaaatccaattgtttgtagatttccaataagttcattgggttttgtgcagctacttccaagttgtccggaatttcgagtgcaatactttgcttgactttgattccttggtgctcaatataatcgacaaccatatcggttaacggacgcatatatggcgtaataatcgaaatttgtttggcacccaaaactttcaaaccgttaattaaagcaccggcagaagttacgataggtgttggaaaatcattcgccacagtttcttggtgtaaattcacttcggaaacgcaatggtaaccgcgtcccatactcataatggctaccaaacaagcataacccatcacatctacatgtgcatcggacaattcctgagcacattttaaactcatcgcatccatcgcttctagttcttctttggtgacttttttcatgcgcatgcgactgctgtggaacgtaaaatgttccggtaggatggtttctctggctctgaaaatagccggtatttcggtttccatcgttacgttggatgatggcactatttgtcctattctaattgttttgttcattttattaaatttaaaaaaggaaatattattactttcttttcgattggaaataagccaaagtcttttaaaataaaatcggaaaaccttattttctttttgttttttccaacaataaccgtgtgattataaaaatttgaaggtatcacatgcttcccaaatgtttcttggtacctactgccttgacaccttactattgattcgatttcatcaaagttaatttcagctttgatattgttcttgtagtggataatctttttttcggaataatcaatttctaatattacgtctttatcattaaaataataatttacatgaagagtaatttgtaataaaaacggaatagacagaaaaagaaaaaccccaattaaaaattcaaattccttaacaaaataaagggctaacaatgtaaaaattaagatttctaaataaaaccattttgatttatgaataggttctaaacttttctttttatcataagtatacttgactttcattcagtttaaatctctttcacggtatttacaattgttcctatgccttccacagtagcttcaataacatcgccatcatgcaaccattcttgcggatcacgaccggcaccaacgcccgccggagtgccggtggcaatgatatctccgggttctaaagtgaatacgatactcaaatcttcaatcaaatcgttaatgttgaagagtaagaatttagtattggagttttgtttttccacgccgtttactttcaaggataagttcaagttgtgtgggttttcgatttcatctttggtgactaaaatgggtcccatcggcgcaaaagtatcttgtcctttggaaacgatccattgaccttctctacgacaatcacgtgccgaaatatcgttaattacggtgtaaccaaaaacataatccatcgcatcagctttgggaacatatttgccgtgttttccaattactacagccaattccacttcccaatccaattgttgggttaatttggtgttcttgattacttcagtatttgttcctgtaaccgttgttggcggtttggaaaagataattggtttttgtggtaactttccggtggtgtctaaagtacgggcactttccgaaacgtgttccgtataattcaaaccaataccaatgatattttttctcggtttttgaatcggagcgagtagagtcacttcgtcaagcgaataggcgatttcttcgaagaagttttccggtgtatcggctaccatatcgtttaattcttctaccaattcgatgcccatatcaatcaaatcgagcatatcgcttggtaacgggaaattagagatttcgccaaaatcttccatgtcgatgacttggttgttgtggagaaagcctaaacgtggttcagtgtcttgagtggcgtaggtgagtagtttcatttgttttctatttttactgttctagtttgattgtctttagatcgtacttctatttcataaggtttttgggtgtcaaggttttttttcagtttaatgatgtcacaaaaatccatttcactcaataggtgattgtcaattctgatgacttcatctccaaattttagttggtctttatagttcttgtcccatacgtgacctattacaaatttttgaccgattactgttggtgaataaaccggtgctttatgatctaaagtgactgttttatcggcttcaaaatagaattttttatttttaaaatcaattacaatatcaccatatttgagcaaatccagtcctaaccttgaattgttgtcatcggtagtattggtgattaagttttcgaaagtagtatcgtttatttttaacaaatagggttttaccaatatttgttctttaaccggtgcggcaccaaataaaccaatattagaagttcccatgcttttagagagttcttcaaaaatattctctttagaaaatacggaataggctcggtttgaaatttcgtagaaaccatccatgccggtatctactaagacatcttcacttcctttttcgttattatttccggtaaagtttatcttgatgaatggcgatttttggtcaccaaataatgttaagttgcttggttttgatttgagttgtagcttcttaatgttatcagtaatggtaatttttttatttttaagacttatctttagaattgaatttttgaacaaattacttccaataaacccatcaattttataacattttagaataaaatgattgtccaagtcggtggttaaaaccacgttgttttcaaagtttaggttttttaatttaatcgatttaatggcaaccatttcaagtgtgtctacttgattgttggcatcataaacagggattttttttaggttttctgtgctgatttcgtttagtaagcgtttggtaattaaatttggagctcccgtatccaaaagaaatttgtatgttttgttattaatagttaccggaatgatgattttgtcattaacgatttcaaagtcgatttcttcgtaatactgtttttgatttatttttccttggttaagagctaattcttgtgcttgaatactggtcgccaaaagaataaagaacaacaacagatttgtcttcgatatgtttttaagtattatgttactcagcagtttcatgtatttattgctttttaaaaagttttattactgctaacagaatgattccggaaaagaaaatgacgttggcataacccacaataatagcggttttgtcttctttttgaattaagtaaagtccgagcaaaacaaaaaggattgctattccgattcccattaatggttttaaattcctcatgtttttttgtttactgaaaatgattcgtttctttagccctgatggagccattgttggagctcgttcgcaaagcggacagcgactggcgagagcaggaaccagagttgctgacagcagaaaacaactgctcctatatcaattgatgcccattgttttcttcatatgctctttcctgatacaatcccagtttctcaatcaccggtaaatcattgaaggagaataagcaggcatcttcggtatcggaagcattgtggtgttcgtgccaagcccaagacgggacgcagaaaatgtctctttccttccaatcataacgtttgccattgatgatagaatagcctttgcctttggcgcattggtacacaaaagatcccgtatgcttgtgggcttttcctttgaaacctgcaggtaacaattgaatcgatgcgcccatggtttgcatcacatgaccaccggttaacggattggaataacgcatgatgattc

SEQ ID NO: 4148 - DNA, 24311 bp, synthetic construct
  source 1..24311: mol_type = other DNA
  misc_feature 1..24311: note = Synthetic
tttttacaatatcatagaattgtttggctactctaaattgtatgtttttctctctcccatgagttaatcgattggctttttttccatcaggggagacttcccaaatatcaaaccggtcatacaacaagaatgaatcatcgttttttgtccagcctaaaaaaccataaggtggaacttcacctgccgcgttaaagttctgatccaataggggctgatgtatgtttgcagagcagttaaagtgcgctttttttcttatatcgtatacccaccatttttgatctttaaaataggttacaaaattccctgttggggagataacggtatgatttttatttccggaatgtttggtgagtattctggtagaatctcctgttgtaaggtttactaagtaaagatccctatccccttgttgtttatattggggttcatattgtgccggattaaaggtaagggcaaatttttgttcgcctgccaagatcacttttggaagctggttatttgttatttgcttaaatttattttcaaaaggcttccaaagagccagcttggctactttttcccattgtccaatttcttcctgttgggggtataacaatttatcggaggcattccatacctgtaccccagttgtatctattgccttctcattagattctcttttttttatcccaaaaaaaacgctctgcccatcatcagaaatcgatagtttagttgatacagtaggactaattgtgaaatcagcaggaaaatttgaaaaattttcaggctcaaatttgaaaagtttgttgtcattgagctgataaaaaaataaattattctgaggagaatccgtacctttttgcaaaaaagcaactgcattgccgttgtttcgccaaattagattataaaacggtgctgaagcattttcaataatcatggttttctgcacttttttatttaaagagataagtccgatattatgatcagcactaaaaagaacagtgttttcctgtggggctattttgtactgctgaacattattgatctttattagcgtttcccctgaagtgttttttatttccagaataggatcagctgttttgctgtaggtgataatatatttcttattctttgtgtattgatattgtgtgaccccggtaatagtttttatctcacctgtttttaacgtaagcatttgcagtccttttttggggttaatacaagcaaagctttcttcggcattaaaattcccgttagtgccccgtggaaaaacatattgtttatgggtttgtgtatttttaataaatagagtgtcttgtccatttggataagctagtttataactgatccaatttccattttcagaaatcttatcggattgcagggtttgccagagatgatagtcagactgctgaagggtcttcttttgttttacctgccccgttaaagggcaggctactaaaacaaaaattaaaaatagaatacgggctaaaaatgactgggccagtattagtcttgtgttatagattttcatttgaaagtatatgtggtttttaatatccctcattttggggcaataggtttgggtttactcttaattctgaatcgggaatcggaaaaagcctgtcagcggtgttccatccggattttttacccgagagtatattgtccagattacctgttcttttgagatcaaaaaaacggtgcccgtgttcggtaaagaattcaagttttctctcgccgagaatatcttcaagtatttcagatgttgtattagcagttgtattttgaagacctgcacgttttctaattttgtttaaatcttctttggcttctgttaatttgtttaagtgtgctctggcttcggcgcgaattaaatactgctcttctatgcgcatcacaattgaatactcaagggaagttccgcttggaattctttgtttgtatttactggcgtgataccaagttgaagtaccactggtaattgcttttatccaatgggttctgcgcaagtcatcagtagtgaaagcagtaaccaaatcagtatttaaagcgacaagtgttggcggtccactgttaaaaataaaaacagttccttcatcggtgtttttaccggctgttgaaggcattaactgccaaattgttgaagtgctttcttttagaaagactttatcgatattattttctaaagggtataaattagtgtttttaatcaccaaagtggcagtttgttccgcggcatcccactgattgttttgtaaataaactcttgccagtaaagcatttgctgtagaattattgggacgaacacgacccgaactaatgtaattatcaggcagtagtgttattgcattttgtaaatcagtgatgatagcagcatatacctcagggacagactttttagaaacaacagcatttacctcgtaggaagttgtagttatataaggaatattatcaaagagatttaccagataaaaatgaagtaatgcccggataaaaagagcctcgcctaataactgatttttgtctgattctgccagttttgtagtattggaaacaccttcaataatagcattagaggcatatatttgcttatagctattattccaccatcctgtaacggtggtattggatggtatgatagtgttgttataaaaatctttggcagaattgccatctgcaccataaaaggttaattcgtcggcgtaatttcctaacagattggatattccgtttgattttccggtcataagtccgttatcccttatctgggcataaatattggccagcgcagcattggctgtgtttttatcgtcaaagatggtgtttcctgttaattgggaagtaggtaagtctacttctacaaaactatcacagccgcacattatcaaacaaagcacgctcagaggaatgaagttataggttaatttcatttttttatctttaaaaaaaagaagcctcagttgttgtacatgatttttcatgatctattttttagtgttaaaaactaagttgaattcccagcgcatatattttcagcggaggtaaaaaacctgatgcaataaactcagggtcggctcctttataagaagtgaatgttagtatgttttgaccttgaagcgagatacggcatttcatattttttaggctgttctgggggagatcataggatattgaaatgtttttaagcctgaggtaggatgcgtcagttatggctgcagtgctggttgtataccagctattggcacttacgaccgaagagtttgttcccgaactgtacatttgataaggacctgaatctccggggttctgccagcggtttaaaacttcaaccgttttattagccatgccaccgggtagtcccagcatatttatggaattccaattatcctgtttaacgtattggaataaaaaatcaagctgccatcttttaaagttgatttgattttgcaggcctgtgtaatatcttggactgaaatctttgacagcctgacggtcatccggaaatgaaatttttccgtctttattgacatcttcaaattgatagattccggtttggttattaagaccggtatagttgtacaccttttgaatgttaatggattttccaattacatactgattgacgtaggttgagttctctaattgtggaaaagcaatcaatttatttttcggaacagttaaattcagattggttatccatttgaaatttggtttctgaatgtttacagttctaagggtagcttcaaaccctgtattttctactgttgcatttagattggctaggatcgaattgaatcctgttgtgcccggtaatggaacgcctactaattgattggaagaccggttgcggtaataggcagtggttagaaaaatgcgatcctgaagaaagcctaattctaatgctaattcaatttttctattggtttcccatccaaaatttggattatataaacggtttggctgcaaaccaactaccccttgataattattaccggcagaactataggtatccagaaagttgtagtctccaatttgatcatttccggtagttccgtaactacctctgagctttccaaaatttatgattttattctctagcagtggctcttttgaaaataaccaagccactccaatggcaccaaaattggcaaattgatttcccggaccaaatcggcttgagccatccctgcgacctgtaagatttacaatataacgctctttccaactaaagttggcacgaccaaagaatgcctgatatttatattgtgtctgctgatttgtaaatacataaaggtaagtggctgaagctaagtcataaattagattattacttgtaaagccgtctgcttcctgcacgagttgccctgttttttgttgttggaatgtagctccggctaatagttcaattttacctttccctatttttttattccagttgatctgaggttcaatgatccaagattctctcgtgctattattgataaaaagtgatgaggattcgctcccaagaccaagcgaaggattgtatattgtagaaggcgaggttctggtctcatcataatgtagattggtaaatccgatacttgtttttatttctaaatcgggtattatttgataggataaaattgtattggcaataagattacctgttttggctttgtaaatagcctcaaggttacgcagaggattattaaatgttccgttttcccaatttaggtttcctttcgaatcataaatagcaggggcgttaggagcgagtgatcttgattctcttgtaaaatcagttccgggtaaattattattttgagaagagtaggaagcagagaaatttatcttaaaggtattatctgctgactgatggttgagattaaaggttgccccgcctcttttatatttataatcaccggggaaaacggttgtttcattgtggtagttaccgctgataagaaactgcgtctgagctgatccgccggttatggatgcctgaacatcgcttatttgagctgtgcctccagtgagtactttttgccaatcggtatatcgattttgatcccaagtgccatttacatcatatgcagctgcgggatattttacaattccatcatttgcaaaggcttcttttcgcatttgcaggtagtcatcgttatgcattaaatccataaagcgggttacatttccaagagctgtattggtattaatggtaaatcttgtttttccctctttgccttttttggtactgatcagtacaactccattggcaccacgagatccgtaaatggcggtggcatcggcatctttgagtacttcaatactttcaatatcagaaggattgatggcacttaaagggcttacatttgcacttgggattataatggaggaaatattattgttagatatagaatttgaagcataaggaactccgtctataatgtaaagaggctggtttccatcagcgcgtaaactattagttcctcttatctgtacatcaaatccacctccaggtacgccggtagtttgggtaattgtgactccagccatgcgaccttgcatggcggagagaacgttcgtaacgggttggttgtcgatatcttttgctgtgattttggctatactgccagtacgctggctttcttttactgaataataaccagcattgatttttacttcctgaagtgttgttgcgtcttgctgcatcttaacattgattgtcaaccgcccagcaataggaatttcaactgttttaaaaccgagatatgtaaaaataagattcgcatcagatgatactgttatggaaaatttgccatcaaagtcggttagtacagtatttttctggttttttaccgaaatactgactccggaaagtggaagtgtaccatcggtgacgataccggtgatttgtgtttgttgtgtagggaaaaaagtcaatgtgttccgtgctaaggctggtgtgcaaaagaggtagaaaccgaaaataaacgggtaccaaagtgccaccaacccattgcttaatgaaatagttttcataattttggggttagttaatttgaaacgaaagtttttattaattcagctctctatacttgtttgatcgccagttagagggctttttttagtcttaaagacatcagattgaaagtctttagggatgatgttttttactatatcatagatgcttggatttaggtgttaaaaaactcatcttgattatctttcccaaacaaactctaaaaattttaatatgccttttggaaaatagaaataaaggcaatacctttaaagtgcgagtttaaagagaaaaagcttaaatataagtgccaaaagcattttaggtttggggtgcggttagatatacaggatattatattttataattcctttttatatcaaggtagagttaaaattctgacggtagaagtgtctgtgataagagtacttctaggtatttccctatcctaacataatggttgtctagttttggaacaacaaaaggtagctcacttttagcagatcactaaggtggtttggtaacggttatatataaaaaaaacgttctcataagtttatggttatggaacgatgtatttctaggtataaagggttcttgcagaaaaaagcaaggagcggcctcacactttcaatccgtgggtgtcctacgacccttatcaataattaataattattgtttgcaattgaaagcatatgtgagaaccgctcgcatgccgttgcaaaagtaaaaaactttttgacatggagcgattccacgatactctcgtttgctaaataggactttacggaacgagaaaacatcgtttaattataccttatttgaggcttataatcaattcgcttgaacaaatataataaaaactatttacaacccaacctattgggttgttaatttttgtggattatgataaaaaatattattttcgatactactcaatttgattttgacttaataaatcacgtaaaaaatttacgtggagataaaaaatggtcacaagatgagctcagtttaaaaatgggagtcgccaaaagttttgtaagtaatgttgaatcatttactcaacgacacaaatactcaactcgacatattgcactattggcgaaggctttcgggtataaaaatatttcagacctgatgaagttccctactcctcaatatgataaaattaaagtaaccgtaaagcaaactatgaatgaaagcggaactagagttttgagttcagaggtactgaagattgattatataaaataattataccaaagattaataaaaaacatcctccgggcggacgtctttttttcttttttttcttattgaagccagtaatctgatcttccatattctcatacatcaaaggatctggagaagaaagaatatttaatagacctgctgaggagaaaccaatgccaccgatgagttgttcgggttctgaactctggctttggaaaatatcctttgctgtatcaggaaaaccttgcgtatctggatcggttagtctgctttggagctgatccagtaaattaattgcccgtttctgctctacagtaccatttttcatggtcagggcatagttaattgtgtcttttaatgatcggtcaaaaccgaacgtctgatcaaaaatcagttcccctgaatttttaaaagaaaccctgtcgaactggccaagtctctgggaatgctccttgttgctgcctctggaattgttcatgggactgagcttgattttgttggagatgtcttttctgctgacaatgatctgtatatgcatctgttcccctgtctttggttctcctgcttttacagttccttgttctacctccggatcactaaagctgtaataacggtaatgttcgagcttgccgtaccataaaagatctttactgttctggatgccggggcgcttaaaattacgggcataggcatccattaccgagacagcgtattgttttagtttttcttctgcaccctgggccccaaaacgttcttttagaaaaacaatttctttttggctgggacttatgttgacaaggaagaacttcgcatcacggcggcccatcttagctatattgttatctattcttaccctgacttcttgtggcatgatctccctgttttcagtattgaaccataattcctttacatggttttcttcaggcgcaacccgattctctttttccagatagtttaccagttttccggagcttcctttattattcccagtctcagaatcggtaagattgatgtacatgatactataggtttttgagtgactgttttacgtgtgcgataagttcttctttctttgtgccagctgtagtccagcccatttcttcacgctgggcaatgtaatagtccaacaattggctgaactgttctttgagcagttctttctctttctgctttgaaagcaagtgtttaatgccatttataagctgatcactccgtttggcaagaatagcagttttatcactttcagctaaaagatgcctgcctattccttcgagaatttccatctgcctggaagaaatggttttcaagttaccggtagcggtaaacagcggcaggagaaaatccttctcctgctggcggataaaagacagaatacggctgataccggaagacagttcgcgtttgagtatttcatcaccggggtctgccggatcttttttacttcggtaaaagtaatccgccatctggcagaacagctctttcttactgcgcttaagggctttagccagtttctccattttgtcatctgtttctttgggataacggatactgttggtatctctgggtttcataacatcatatttttaactcaacatcactcattttttaaataccgatataccgggcagtataccttatgtcttactgcagacagcctcaaagactattagtatactcggagtatacctaaatcccccgaagccccagcaaaggggcaagcgagtagggctctgcccaactcccgcttgcttttttcaaaacatattaaaaacggaataaaatcttttacaaagtaaaggcgagaaagtaagaatattgtaatatgaagtcttgccaaagagtgccttctgatgtcatttaagacctctgacaaacaaaatgggtgttaatggtctggctgctaaaaaaaatgagaaaaaaattaggttttcataatagtatcttgccattacctttgtggtaatattttgcgaatataagaattcgccttttcaggcggattaaggttaataggaaaaaacagctttatgctgttttattttttgctggatttgtagaggtgtgctgataataaaacaatttgaaaaatccatttacagtgtaaaaagctgaattattaaagcattgagtttaaatgtaattctataactaactttaaaaactaaccactacgataataagttctttttatttcaggattataacagttatcgtcgtacaaaaacgcacgcatgtaactgagtataaaggaatgtactcagggacgcaggtatgtaaaaatataggtatgtaggacttagcgcaatcatacatgagcgtgagtataaagggaagtatgtacaaaagaacacaggtgtaaaacagagatccaattcttgttatttattcttaagtttcagctgaaaaatgaaatgattaaactggagagggaagaagtcaatattaaagtcaataaaaatatgattaccgtaatttagttgaagcaatttaaccttaattaatatcatactacaagctctcatacgaaggcttttttatagttttctgagaacagaagcttttataattattgttctcttcaaaatgtaaataaaaaagtcccaccgaagcaggactaaagattttcatctacggcatatagccttattgtgataagattaaagattagaaattttaatcagtcacaaatatatagaaaaaacattatgattagaaaaaggaaaaccgtaattgtcttaattttttttatagtaaattccatgcagattaaatttaataaatatggcaaagattttaggattagatttaggaactaactcgattggatgggcaattgtaaagaaagataataacaatttttctcttgtagataaaggagttcggatattttctgaaggtgtaaatattgaagcaaaaacaaatagtgaaagttcaaaggcagctcaaagaacaggttatagaagtgctagaaaactaaaatatagaagaaaagttagaaagattgatttgcttaaaattttgtcagataataatttgtgcccaaaattatctgatagagaattatctgattggcgttacaaaaagatttaccctcaaaatgatgaatttagaagatggttaagtacggataatcaggataatgaaaatgaaagaaaaaagcaaaaagataatccctattattttagattcatttcggttaaaaactcacttaatctaagtaataaactagatagatattatgtaggaagagctttttaccatattgctcaaaggagaggttttttgagtaatagactagatagttctgataattcaattattgaagaaaagaaatttgacataaattctataattaatgaatctcattcaatctctgaattttccgaattatttattgattttctctctttattcgataaggatgaggctcttgataaacctttatttacgttatcaagggcatttaatacaataattaaggataattctacattggtttataatgaattaaaagaaaagttaatagaacgtttgaataagaaagaatttcttggtccggtaaagagagctataagcgatttatctgaaaaaattgaagatgcaaaatgcttaacacttggagaatatttttacaccttatatgaaaaaggagaaaaaattagaggagaatatactcacagagaagatcattacttgaaagagtttgaaactatttgtagtaggcagaatattgcaagtgagttaaaagataaaattaaagaagcaatattttttcaaagacctttaaaaacccaaaaaggattggttgctaaatgtcctttagagaatagaaaggcatgtgttcctatttcgcatccggattatgaagaatttagattgtatagttatttgaataatattaaaataaaaactttaaatgacgataaacttcgagtgctaactgctgatgaaagagaacaaatagattttttattttacagaaaatcaaaagctaattttgactttgccgaaatagcaaaaaaactaactcctaaaaacttaaaaccaggatactacaaagacaaaaacagcaaagagtatgatgttttatttaattataatttaggcagcaatgtagctggttgtccaacaattgcaaatcttagagaggtttttggtaaagattggaaggtatatttatcttctaatttcttgaaaaatactaaaaccgaaaataacaaagtagttagaaagacagaagaagatataattgaggatatatggcacgttttgtttcgttttgataaagaagaacttttgaagcaatttgctattgataatcttagttgtgatgaaaaaacggccaataagttctctaaaataaagttaaaacaagattatggatccttgagtttaaaggctattcgtaatattttgccttacttaagagaaaatttaatttattctcattccgtttttcttgcaaatatgaaaaatattttgccagctgaaatttggaataatgaagaaaataaaagggtaatcaataatgaaattaattctattttagaaaactataaagtttacagtaataatatagagattgttaatggattaattaataacattaaaaaagagaatgggacttggagttcagacaataaatttgttgctgagatttataaaaaggatttagaaaaacaagtcaaagattttgttggcaccaaaaaatggaatgaaacaccaatagcatatcaagcatcaattttgaaagaatgttttgaacttttttcaactcagatgcaattgaaatcaggaagaggagaattcgcaaagaagaaaacaattgatgagattttaaaacaatttttgaatgataattttaatgtagatgagggaggtttaaaaaagctataccatccatcagctattgaagtttataaaaaagcaaaaagaagtgaagatgatgggaagttatatttaggaagtccattaatttcttctatcaaaaatccaatggctatgcgttctttacatcaattgaaaaaagtagtaaatcaattgattaaagatgatttaattgatgaagaaacggtaattcatatcgaaatgccaagagaattaaattctgctaatgaaagagtgtcaatacgacaatggcaagaagaattaaaaaacagaaggaataaatatgctgaagaaattaaatcaatttttagaggtgatattaaaacggatgactgtagtgatgttaaaagtttagaatatgagccaactgaaaatgatattttaaaataccagttatggattgaacaagataaagtttgtctttacacgggtaaaactatttgtttgtcagattttataggaagcaatcctaaatttgatatagagcatactattcctagaagtagaagtttagacaattctcaaaccaataaaacattatgttgttcgatttacaatagagaagtaaaaaaagataaaattcctttcgagtgcggaaataatgatgaaattttattaaggattagtcattggtatgctaaatataaaggattggaagatcaaattaaagatgtttctaaaaaaataaaagtagcttcaaccaaagaaaatagagataaaaatataattaaaagaacgaaattaaaatttgagcatacttattattataaaaaatataagtcgtttactattgaagaaattccagaaggatttaaaaatagtcaatctgtagatattggtattattagcaaatatgggaatttatttttaaaaacagcgtttagtaaagtatatgcagtaaaaggaaaaaccacagccaatttgagacaaatgtggggattggaagaaaaaacaagggataatcacgcccatcatgcaaaagatgcagttgtggtcgcatgttgtacaagagatataaatgatgctttagcaaattattatcatgatttagaacagtttgaattttacggaaagccaaaaccatcattctctcatagaattccatggaaaggatttaatgatgatgtaaaagagtttgataaaaatatattaataagtcatcatacgccagatgttttttcgacgcaaagtaaaaaagccattagaaaaagaggtataattcagcgaaacgaaaagggtgaaatcaaatacaagcggggagatagtgttcgtggagcattgcataaagaaagtttttatggtgcaattttaagagaagagttggataaaaaaacagggaaaacggaagaagttgtaaaatatgtaaaacgtcaatctattgatttgtttaaagataccgatttaaaaaacatagtagatgataaaataaaagagattgttgagaaaggtagagaacaagaaaaacaaatcaagaaagacattgaggagttgaaaaagcaaatgaaaaacgtaaaagaagaggaagagcagcaatttaaagtcgctatacaacttcttgaaagcaaaataaaaaatgaattgtatgttttaccgaatcaaaacggctctccagttccaataaaaaaaatacgctattttactaatgatgtaagtaatccattattgataaaaaagcatagagatgtatcaagacacgaacataaacaacattattttgcaaagaatgatgggaattattgttttgcaatatatgaaggaaaagataaaaaagataaatttattacggaatataaagttgtgaataattatgaagcaggaaaatattataattcaaaagctaatacacacaaatttccattagagtttaatgtagaagataaaaacaaaaatgtattagagttaaaatttctattaaaaacaggaactttagtcttgttttataaaaattttaaagatgaaatatgggaattagataatttagatttagcgaaaagattgtataaaacggtcgctattgaagcggatggcaggattcagtttagattgcattcaacttcaaaacctgatggacaattagaaaaatcatcggaaattaattttgagattgctaaagagaagttaaggctttcaaaatcagcattaaatgtaatagttgaaggattcgattttaaaatttcttcaactggaaaaatttctaaaatgtaattctattttgaaaagtttggcattgatcaagctgataaatattttaatatgttttatgattgttttgatagaatagaggggaatccttttttatttccatctgccgaccacatcaagaaaggatatcggtattgtgtttgtggtgttgatactatttactatcgaatcaatggacataagaggatagagattattaccattattggaaggcaagattttgatagcagttctttgacataagccattcaatcttaaacatccaaaccacaactgaaaggtatggcattcgcccagcaggaatgcagtagctttcagttgtggtttgattaaagattagaaaacacgatattatagtttatagaggatgttccattagcattgttgtggtttgattaaagattagaaaacacgatattattgacttggtccgcctacagggtctaatagttgtggtttgattaaagattagaaaacacgatattaaaaagaagctaataattctatttggagtggttgtggtttgattaaagattagaaaacacgatatttgattgtataaacgatgtattaacgtttaagttgtggtttgattaaagattagaaaacacgatattgcgatttaccgtcgctatcttttccaaacagttgtggtttgattaaagattagaaaacacgatattgaaatagctaaaagaattatgccggacgagttgtggtttgattaaagattagaaaacacgatattagattaagaagagcgcaacaggaagttgatgttgtggtttgattaaagattagaaaacacgatattagcagcagaatacgcgaagatgtttgtagggttgtggtttgattaaagattagaaaacacgatatttttttccaaagtatgaattgttggagaagtgttgtggtttgattaaagattagaaaacacgatatttcttagaatactaactattctgtgaatagggttgtggtttgattaaagattagaaaacacgatattacttggtatcatttccttcaagtggaattcgttgtggtttgattaaagattagaaaacacgatattaacaaatgaaatcatgtcaaccgaccacgggttgtggtttgattaaagattagaaaacacgatattttaggtttaataagtaatgaagctttgactgttgtggtttgattaaagattagaaaacacgatattttcttaagttatcactgtaaggtatgtttggttgtggtttgattaaagattagaaaacacgatatttgaaactattgaaggtttgaatgaatctaagttgtggtttgattaaagattagaaaacacgatattattaattgagttcttataggttctctgtaagttgtggtttgattaaagattagaaaacacgatattcacagtttttgggatagtgaatcgcatatagttgtggtttgattaaagattagaaaacacgatattgcagcataccagtaatgcatacgttgcaagttgtggtttgattaaagattagaaaacacgatattagttttgcctgaaaacatcacaataaatcagttgtggtttgattaaagattagaaaacacgatatttgacgaacaaaaatcaaaagaattgctagggttgtggtttgattaaagattagaaaacacgatattttatactatgaagatactgaaatacaaatagttgtggtttgattaaagattagaaaacacgatatttttcattatgctgtttttaagaagttaagtgttgtggtttgattaaagattagaaaacacgatatttatggcaatcaaataagttatttcagcatagttgtggtttgattaaagattagaaaacacgatattaaacattggaacatcaaaaagctgcttagtgttgtggtttgattaaagattagaaaacacgatatttgaatagaatcgttgtcaatacttcctttgttgtggtttgattaaagattagaaaacacgatatttaatcgtaatgctatggagtcagcaagaatagttgtggtttgattaaagattagaaaacacgatattggtatcttgaacgtataacgcaccactattgttgtggtttgattaaagattagaaaacacgatattcggacattcttttcctactctatttctatggttgtggtttgattaaagattagaaaacacgatattaatattttgtttctataatgctctgctgtggttgtggtttgattaaagattagaaaacacgatattttatgtccataaacagccgaaatactatcagttgtggtttgattaaagattagaaaacacgatatttttatttgggtttggataggagggcggtaagttgtggtttgattaaagattagaaaacacgatatttacgctactgggtcgatagctttgctcatagttgtggtttgattaaagattagaaaacacgatattattttcgcaagcatgggaggctgatacctagttgtggtttgattaaagattagaaaacacgatattgatataaatttcattgtcttcacccgtatagttgtggtttgattaaagattagaaaacacgatattgttataggaaatgaacacgagtgtgaaatgttgtggtttgattaaagattagaaaacacgatatttctttctaattcagttgttaaacttgctatgttgtggtttgattaaagattagaaaacacgatatttttccatttcagcaaccccaggatctaaatgttgtggtttgattaaagattagaaaacacgatattgaggaaatgcaagttatcattgacaaagctgttgtggtttgattaaagattagaaaacacgatatttatgagagccgagcagataatcattgacatgttgtggtttgattaaagattagaaaacacgatattcaattgaatcaaaatatactttccatttggttgtggtttgattaaagattagaaaacacgatattagttatttgtttggtgggcacagcgcctatgttgtggtttgattaaagattagaaaacacgatattctttttcctgagtctctttaaggctttttgttgtggtttgattaaagattagaaaacacgatatttcaaaagccctgatatctaaattataatatgttgtggtttgattaaagattagaaaacacgatatttgttcgaatatcgtactataatcaattaatgttgtggtttgattaaagattagaaaacacgatattagttggcttgtttccttctgatatataaggatttagatgtgaatatcgttcagaaaaatgcctcttttatggtttgataacccataattgcggcattttttctatcgtacggtttgtaatataaggttttgggcgttgaaatgttactgataattataaatacagaagtattaaaataattctagttgcgtgggttgaggtgctgatggtaaggccgcttttccccaaaaatttaaaatatgaccaaattgtttatcggttattcgaagtatgcttacttttcctaaaggaggtagtagtttgtggattcttttttcatgaacatctgcgctttcactacttgcgcaatgtcgtacataaacagaatattgcatcatagaaaatccatcttttaataaattgtttctaaatccagatgcatttcgtctatctttttttgtttctgtggggagatcaaaaaaaacaaatagccacattattcgatatccgttaagctccataatacaggatatttaattttttttcgatttcctgtgaagcattgctggagagaacttgcagtcttttgtagagctatcattaaaggacttttctcatctttaaaataaaccgttctagttaatatttgtaataattcagccttaataacagtgtttaattcttgttcatcaaaatgctgcataatttcaaatactttttcatccacaatgggacgaaacggttccatgatatcatcagcaagtgcaaaagcattgtacttacttttatggtgaattcctaatgtattgagtaagccacttccggaaagagctcttgcagttgcggctcttaaaattgcatatccataattcaagaaattattaggatagtcgccatatctttctcgtttaattccatcaaattctagattaggttgaggaaaatatttccaatattgttgcgctgcaactccttccatattagatgaatctccacttaatactttactggctagaaaaacaaaactattttttgaatcagttattttttcgagtagttgtccttggtttttgattttttcaattattgtttgctgccataattgcttttttaatggtatagaagcttcaatttgatttttgaatatttcctgctgaatatgatggctgttaaggtttaacaacatcccattaggaagatgattctttccgcagataacaatagaagtattattatcaacaagtaaattcatagcaggaatgctgaggtagatttcattatgatctagaacaagaaaaccaatatcctcaattggaacagaactctcctttacttctgattttagtactagctgattattttttgtcgttattgaaattttattttcaattaaaatagttcgttttagcataagattaatttgaaattactaatggctgttggctgcactcagatatgtaaagttcgactttaaagtaatgttgcttttacggttttccataatctagaaacatattaaggtggcagttgcattgaaaagtgtaaattgatttaatctttattgtcggattatttgaagagtaaactaaaagtgtaatttattatctttgtaatgatgagtaaaaatctttatataattgccggatgcaatggagcaggtaaaacaactacttcattttcataagagtctattttacagtgttatttaaagagtaatgtttttaaatagttttattttttatataactgatccatttttctacttcattttttatttcaactgcattatgttttggatagtgtttttttacatattcaaaaaattctgttttagtattacccgtttcccattccataacactaagataaagcattggccattttttggtctgttgcataaattcatataatgcaaaatagggaggtccgtaatacaatgaattctcaataagttcatcatagaaaggttttgtaaaagccttttttagatctctaataatttcataaggcatacgctgtttgctgccttcgcgaattgctgttgcgaagacacacatacttttgtcctgaaaaaaagtataaagataattgcgaaattcctcttccatgatatcacagagatcctggctgtaaaaagcatattcttctttgaatagttctagcgaaaaattactggaatgcttattttcgatgaattcaattacttccatttctaatgcaataatcttttcaagagaagggcttcctacgagtcccgcaacagctataatgtattttggtttggaaaacaattcaaaaaaattgcttttaaaaaatagcgtctttctttcaaaagtaacctgcacatacaaaggttgtgtcatgattttgcccaatggaacttgtttcagtttttcgttgaaataagttttatagcttattttagatagtttgttcatattgttttacggaattctttgatcggatagtggatataatatacttaaaagcggtacaaatatagataaagtttttataaaatataaaattataaaaacattttattatcttagcattatgaaagttactagcgaatgataaaggatggtgaacattaaagaaagcagtatgggaaataaagaagttaatgaagagataaatgagaagagaagaattactccggagaaagccttggaaatgttaaggtctgaaggactggatgtaacgcttgaacaagctaagaatattttggattttttgcgtaaattagcaaatattacagtaactaagtatttaaaaagaagaggatgaaaatgatagcagacttatatgtaagagtgagtaccgacgaacaggcagataggggatattcccaaagaaatcaggaagaagtactgcgtaaatattgtgaaattaactccattgagataagggacgtgatttatgaagatcactcggcaaagacctttaacagacccaaatggaataagcttttgcaaaatttaaaaaagtacaaaaacaaaattgatcttgttttattcactaaatgggataggttcagccgtaatgctggagatgcttatcaaatgataaatatcctcaggaaacttggtgtagagccgcaaggtattgaacagccacttgatttgactattcctgagaataaaatgatgctcgctttttatcttgctgctcctgaggtagagaatgacagaagggcacttaatacttttcatggtatgcgtagagcaaggaaagagggaaggtatatgggatatgctccagcgggatatgttaacagggttaaagaagatgggactaagtatattgcatttgaccagcctgaggcatctattttgaaatgggcttttgaagagctttcaaaagggatttttaatacagagcaagttctttgcatggcaaaagaaaaagggcttaaagcaagcaaaaataatttttggagagctattcgtaatcctctttattgtggtaagatcgtgattccaaaatataaagatgaagatctcacctatgtaacaggccagcatgaacctttaatatcgcagactctattctataaagtgcaggacatacttgacggaagatcaaaaacatatttgccaaaagcaattactactaagccgtttccattgcgtggattttttacttgtccagaatgcgcaaagatattaacggcaagtatttccaaaggtcgtactaaatattatccttattatcattgtagtgcaggctgtaaatacagaataaattctgatacggctaacgaggtatttataaagaatttaaaacagtatgttcccataccggagataaaaaatctttatatcacagttttatcagaatgttatagagagcagaccaaagaaatatatgaagaaaagcttaaaataatagctcagctcaaagattatgaaaagagactttcgcacgcaagagatttattagcaacacagcaaatcgatgcttcagattatagagatatgaaatctgattatggggcagtaattagcagactggagttaaaattagaaggtattaatgtagatgatcaagatattgatgaaatattaaaagtcggtgtagaaaacctcttgaagctcaatgaatactatgatagtggggattggtctcaatcaagagatttgattggttcgatttatcctgagaatttcacgattttagaaaatcagtttcgaaccacaagaatcaatgaagttttgcaagttatctacttgattaataatagaatatcaacaaataaaaaagggacaaagaagactttttcttctttatcccatgtagtagcgggaacaggactcgaacctgtgtccgccgcggcggaaatgagactaacataactgaatttttttactaaaataaaacactacttgttgaagaggtgttttattttagtagcgggaagcattcaaatatctaaccagattattgcagattattatgcgatttttgcattaggatcttaaagtaataattaaaaaaaactaatatatgacttggtttaaatcccgtcaggttcacaaataattgtgtaaatacaaatcgtactattaattattgcgtaaatttttccatacttcaatgccagcttttccccatttgacagaagccaaaacgtcaagatcaccatcattatcaatatcctgtagttcaatggagtttaaatctggaactggacacaatgttttagaggtaaaattgcccgatttgtcgtttaataggcagattatagaatatttgtagctaaaagcaagatcttgattaaatccttcagccaaatcatatttattagccatgcatataatatcgtcataaccatctccattaatatccccaacttttatcatatcgatgccaaaatcaacaggaatgattttactttgccattgtccattgttatacttcaaccatttgggatttccactggaaagcattatacagtcagacgaattgttgtcatctacttttgctttataaatgtccttaataaattgatcctcaaaaggacttgtctttttttcccatttttcactcccgagatagttaaaccaagtttttgaagacaagtcaactaaatcgtcttttttatttccatccacatcccataaagcaatattagggtatgaatctttagtttctgtaactatagttcttgttttgttgaaaacgccatttccattattcttgtagatataaaaacctcgtatttcatctgtccagtaatttacagctagatccttatttccatcatgatcatagtcaataatttcataatttataagtctttgcctttcgtcatgtataacggtaaaatgattaaattttatatttccttcatttttaaaccatcctaattttccattttcgctatcatctgaacatagtactaaatcgtcttttccatcattatcaatatcggcacattttaggtttttaattttaaaaggacttcgtgcaagttctaatgtttcagaatattttcctttactgtctatcaaagtatagaataattcattgttataatagcctacaatgtctttagtaccgttattattcaaatctgtaaaaagaaagccagaacagtctgatttaacaacccaattgttcttatcttttacttttccatctttttgctgtaacaccattgtgtatcttggtcttatttgttctttatcatcatcgtaaaacaatacatcttttattttatcaccatcaaaatcttcaaaaaagaatgatttagattcgctgctatttggtaggagacttttctgatttttaataaaaacattactccctttattttccgcccagttgataaaagtgtattggttttgttgtgtaaaataagcgatgtcaagatcgccgtctgaatcaaaatcttcaagttgaaaattctgcaattcaagtgaactaattaatgtatgtgtttttccgaaaccacccttactatttctctctaaccaatatatacctggatttctgtagctttcggaatatactaaatccagatcaccatctttatccatatccattaattttatattgtccattccggaagttgtaagaacgatagtatctattaaaacatatttatttcctttgaaagaataaatttttaaagagcgtttctcttcatttttatttgaataacttggcacaagtagctcttgaatcttatccttgttgatatcaattcctaaaacaaaatttaaatcccggaagttatcattaaagggtttgaaataactgaattgttgtgttttatttcctgtgtaagcgactggcacccctcttaagccagagataatgatatcacaaacaccatcagaattggcatcgtacaaatacaattttgcatactcagaaggtgaataggtaattttgtttttttgctcttttttagaaaaacctttcgggctattaataaaaatagctatttcagcacttttatatagtacgacaatatctaaatctttatcgccatcaatatcttcaatgctatagtgttcatgctcttttttgctatctccaataatcaccattttttgttttttaccatgcccatcattgaaatataagtatggaaaagctaataggtccaaatctccatctctgtcagcatcaaaagttttaacttgaccaaatccgaaaccaggtccattaattagttctccattgtcaaaagtttgagcacaacattgcatattgctgtaaagcaagaaaaaaaacaaaaaatacacattgtatttggcat

SEQ ID NO: 4149 - DNA, 24308 bp, synthetic construct
  source 1..24308: mol_type = other DNA
  misc_feature 1..24308: note = Synthetic
aacccgttattgttgatcatgccgttattggcacctccttggtccaaggtacctacacgctggaagcttattataaaacgtattccaataatatttttgaattgccgtatcaggacaacgtcaataatattttaacttatacgccagtcaatctcgataaaacggtggaatttggatttgattttatcacttatttttatatgttagaaaattggtctgtatattttgtcacctcctttttcaatactcatgatgaagcggaatttgaaggtatcaaaattgaccgcgaccaatggtctaattacagcgtgttgagtaatgattttactttcttaaaggataaaagtttgaatgtgaattttaacctgacgtatatgagtaaaagtatgagtggatttagggaagttcaggatattttagcttcagaattgaccatgtctaaaagtgtgttaaagaataagggaagtgtctctgtggtcatttcagatctatttaatactcaaaattatgatatcagctcccgttacctcaatcagaatagccgcatctattatgatcaggatacacgatttatcaaattgggtttccgctacaaatttgggaacaccaacttagaaaccaatcagagcagcaagtcccaacaagaaaccgagcgtttagagaagtctgaaaattaaggacttttataattgtcatcatattctacacgccatcgtttggtgttttactaaaacctctgaggtttaaacaattgcatttgcagaaaaagcagtaattttgtcgaaaatttcaaaagtggttaaaataggcgacatacaacttccggactttcctttgcttctagcacctatggaagatgtcagtgatcctcctttcagagccttgtgcaaagagcacggtgctgatgtggtgtacacagaattcatttctagcgaaggcttgatcagggatgcggcaaaaagcattatgaagttagatatttatgaacgcgagcgtccagtagggattcagatttttggagccaatttggaaagcatgttgcaaaccattgatattgttgaaaaatcgaatcctgatattatcgacatcaactttggctgccccgtaaaaaaggtagtcagtaaaggtgccggcgccggtattttaaaggatgtgtgcctgatggagcaattaactgctgagatggtaaaacgcaccaatctaccggttacggtcaaaacccgtttgggatgggaccatgattccatccggattgtggaagtggcggaacgtttacaggatgtgggttgtaaagcgatttccatccacgggcgtacacgcgctcaaatgtataagggcaatgccgattggggaccgattgctgaggtgaaaaacaatccccgtatgcacattcctgtttttggtaatggcgatgtggataccccagaaaaagcgatggaaatgcgtgatgtttacggcttggacggttgtatgattggccgtgcgagtattggaaatccttggttttttaagcaagtcaaacacttttttaatactggcgagcatctcgccccaatttctttggaagaacgtgtagatgctgcgcgcagacatttacaaatggccattgattggaaaggggagaagctgggtgtttttgaaacccgacgtcactataccaattattttaaaggcataccaaactttaaggaataccgcacaaaaatggtcaccaatgatgagtctgagcacgtttttgctgcttttgatgaagtgttggaagtgttttccggatacgagtttgtctaagcgttagaagaccaattatgacatctgataacgatcgacttcgacgcaagggtaagaggtattaagtataagttccttttttattttgacgccgagcgtcggggaataaaacccaaggatccggctgaaaatcaggattagttctactaacaattcttaattcattgattcgcagcttttaaaaaatttgagtttcactaatttaacttctgatcagtttttcagtaatacgtcctgaggctattttggaagcaatcacgcctaaaaccgtgatggtcaccaggaccaaaataatattcatgacttgaattctgacgggataaggtagcgatggcgtaatcataaccaacgcaaattgctgctgtagtaccactaagataaagccaattaaaacccctacaaatcctccaagaatagtcatcaaactaccctgtaggaagaatacccgacggatatcctttgtagtcgctccaatattgtaaagcgtgtgcagagacccttttttgtctagaatcatcatgattaaggcgccaatgacgttaaataaggcaatgatgattactaaggtgaaaatcagatacaccactaaattttcagtgtttagcatcttgtagagcgaatcgttcagttgcgctctgtttttaacgatgacgttggtttcaaactgctttaatatggcatttctaactgatttttcgtctgtgttgggcttcaatttaatttcgatgctgctcagttggttggacgcgtagtccatcaaatagcgtgcattcacgatgtccgtataaacgtacgaggcgtttaaatcttcattcacatcaaaaaccccaatattcaccatggtcagcgagttaaacgcgcctttgattgagctaatttgtccgacgcccggtttaggaacgtatacattgagggttttgccataatctaacactccaaaagagaggttatgcgcaatgccccagcccgaaaccaactgtccgctgcctttctgaaaccattgcccttgaatgatcatggaatcaatattggtgacgttcaaatactgatcgtcaacaccttttaaagatgctaataaatttttattgtcaaattcaataatgatacgctcctcaataatctttgaataggaggcaataccatcaatcttgctaagcgcggtggagtctttttcagtaagtaaaaaagatttcccttgggcgggtgtaattttaaggtcaggatctacaaaagaagaaaattcgaggctaaaatcctttaggcccgcaaatcctgaaagcactataaacaacgctgctgcggcaacaactacacctgaagcggcaataatggtcatgatattgatggcattattgctgctcttggtaaagaggtatcgcttagcgatgtaaagcgcaaagttcaattacgattttttacgtttgtccaataaatcggcgtctttaatagggttttcttcaccttttagtgacttatcgatgcgttcaatatattctagtgaatcatcgataaaaaattccaaattaggcattctgcgcaattggtgtctggtacgttgtgccaattcatgacgaatgagtggcgtgttagagcgaatacctttcaataattcttctgcttctttgttcgggaaaatgcttaaatatactttggctaatcctaaatcggccgtgacattcactttacttacggagataataatcccgcgcataccgcctttagtagcggcaccttgaagcacgtcaaccaaatcttcctgcaatatgccacctatttttttctgtctatgactttcttccatgtgtcttatttaaaaatcaaaaactgctcatttttaatttaaattagtattaaaaagccaaatagcggcttatcaactgcaaaaatagagcatatttaaggattattgtatttttgaggatacaaagttgctttggcactgccttaggtgggttagatatggctttggattaatattattgagattcccactttcgtggaatggatgagattttcgcctaagtcagctaagaaggtgataagttgtaatttaaagagattcccgcctactcgggaatgtggatacccggttaaggtcggataaaagttaataagttgtaatttaaagagattccccccttaggtcacttagaaggtgataaattataaattaaagagattcccgccttcgcgggaataaaggatgaaaaaaatagaacacatagggattgccgtcaaagatttagaagtttctaacgatttgtttgcggcgctttttgggaagccgcactacaagatagaagcagtagaaagtgaaggggtacgcacctcgtttttcgagaatggccctaacaaaattgagttgctggaaccgacctcagcagacagtcccattgccaaattcctagaaaagaaaggggaggggattcaccatatcgcctttgcggttgatgatattgaagcggagctcaagcgattggaaggtgaagggtttaccatcctcaacaagattcctaaaaaaggtgcggacaacaagttggttgcttttctgcaccctaaaagtactaatggtgttttgattgaattatgtcaagagataaagccataaaattgttgtacggttttaaaataagtagtaatattgcatcctctaaaccggtcctatagctcagctggttagagcacctgactcataatcaggtggtccctggttcgagcccaggtgggaccactctagtgaacacaagcctttcaagaaattgaaaggttttttgtttttggaccagtacaacatctgtacaacatttcgtttttcttttgctttcatttattcctatctttaagttgtggaacgattaggagaaatatttgccacttggctgtatcaaagtagaagagatctgaagctattatggttaaagcatggcgctttgaccacaaacaggctttctatattcgttatcgtaattttaggtatcgtgccgttgaccttttatttcataatttcaggcgccagttactcggtaacgcaaattatagcaagctatattttcgtttcgttattattcagtttgtctttattgcttgtgagtacttggttcaagtctgaggaattatttaaaagtaatgtccagggattttcttttttgttattgtccccgtccaaaatcgatagcgtcttttttggttttgacagtaatgacgtagagaaccttcttcggttgattaatggtttgcccgcacaacaaaaaattgtaatcagggaaacccctaagaacaagcagacaggaaacattcggtttctgtttacctttttggatctcattgttcgcggcggcatctttaggatggatacgaaacccaaggagtccttgaacatgcttatttccgaacgtttcacgtttcaaaactccgaaatcaattcaggtacgctgccttcgagctactccaaatggtgctcagctacccatgacggtaattatgatgatgtgcgaaaggacatctcaaaagcattagggattacctaatatttacgcaattccgttttttataaagaatacttagagcaatcttaaagcaatcgttatttccctattgttttcactacatctatcgtcatatgtttgccttgtacaatcaaagtaaaaggccttttactcattattaattcttaaataaaaagattatgaatgagcaagaacatgttgtggatttgttgcaggatatcaaaggcctgctttcccacaacaaaaaagtatacaacatggatgacttggtcaaatacacagggctatccaaaagcaagatctataaactctcgcagctaaagctgataccagctggaaacaatccgcatattcggcagctcttctttaataaagctgaaatagatgcctggcttctgggagaacctaatctacctgacgaatttttggaacaacggttcaatgaacagttgctgaccaataaaaaatccggattatgaaagatagaacttacatccgcgtgggtacctcttattataaattggtccaagttccaactattgctggacatctcaacgacattattgtgccatggaaactcgaggcactccgtcaagattatggaaagagttttattggaagcattaaaaagtatgatggatttaccagtcttccaagccatttaaactttgaacaggaatggcacggtttctataacacctatgcgccattgccccacaaacccttggaaggcagtttctcctatactttacaactgttagaacatattttcggcgaacagctgaatctgggactggactatttgcagctcctgtataagagaccgatccaaatactgcctatattatgtttagtgtccaaggagcgttcaacaggcaagaccacatttctcaaatggctaaaaatggtttttgataaaaatttaacctatttgaccaacgatagtttcagtagcccatttaatgcagattgggccaacaagttattaatctgtatagacgaggtgcttttcaacaaagaagaattgaccgaacggataaagaatttgagtacgacgaatattaatatgcttgaagctaagggaaaggataaaagagaaatagagtttttcggaaagtttattctgtgcagcaacaacgaggacagctttatcaagatcgatactaacgagacccgattttgggtgttgaagatgccttctttgaaaaaggaagaaacacgatttctggaatatctggaagccgagatccctgcattcctttactatttaaaacatcgggaactgatcagtcccaataccacccgaatgtggttttcagccacacagattagaaccaaggctctcgagaatttaatgcagaacaatagaaaccgtgttgaaaaggagcttgccagtgttattctcagcgccatggagaccttggaattagaagaggtacaattatgtcctttagatgcgctccatctcttaaaccgcactcggattaaaacagatcttacccaactgcgtcatattttcaaaaaggactggaaacttctaaatcaggacaactctatggtctacagaaaattgatgatatggcaagaaggcgggatggggctgaccgatgcaaagggaaggtactattccataaaaaaggactttctaaagaaaaattttagtgaagattgaaaaatgatgcaacgtaacgatgccatggaaacccaatgtttataggctataaaaactgttttcatcattctctaaaaaaaatgctgatgaaaagaaaaacaacctacactatatactatttttttgatgaaacgatgatatatagtgtttaggccagtaagaataagggtatggtccgtcatcgttttgtcatcattctgtcatcaaaataaaaacgatgactaaaattcgaacaatattataggctatgaaatcaataaatagcaggctgacatgcgaaagagcccgagtttttcccatcgaaaaagcgttggcaaaactcgggcactttcccgtgaaaacagcggaaaaagaagtttggtttctgagtcctttcaggtcagaaacccaagcctcttttaaagtctctaaaattaaaaaccgatggtatgaccatggagaaggggtaggcggcaatgtgattgatttggtctgtaggattttgaaatgttctgtaaaggaagctttggagtttttaaatcaagattggccttctttttcttttcaacagccgcaacatctcattccaaatgagacaagtttaactatactaaaagttagaagaatcagacacccggcattgatccagtatttgaacttgagaggtattccactgcacgtcgccaatacccattgctatgaagtgtggtactcatttaagaattctaagttttttgggatagggttattaaacaacaaaggcggatgggaactgcgcaataggatttttaaaaattccagcagtccaaaatcttatacctatctccaaaggaacaatgagaagttgatcgtcttggaagggatgtttgatttcttgtcactagccgtcttaaatgaagctttgataaataattcagatattttggtgttgaattccctagcgtttgttaaggatattgatgtatgtgtttcagattatgaactggtgcatctctatttagataatgatgaagcgggcagaaagatgacgctctatttgacaaatgaatataaccatgctatagatgaaagtagcagttataaaaaccataacgatttaaacgactttttatgtcatgagagaaaaggacgagattgaacgacaccatgaacagaagcaggttctaaagattcctgcccaactgctcaaacattctgaaaccttggaactcgatctggaagtggatgccaatggaatgggaattattctgggtaggaattcaagatgtgtgtctgtggacacattcttgtttgctcccgatggtcgcaaagtaaaaaaaggagtgtttagggggaaaagtgatctgattaagttcagatgttcgctttacgaaaagaagctgttaaacattaaggcggcatccgcaggattgaccctgagcgaatatatccgccgtgccgtattggaaagggagatcaccgaacggctgagcgaggaacacatcgagctgtataagatgatgctccaataccacaataattttaaggccatcggaaacatgtaccgcaaacgggatcccaacctgaccacatcggtctatgccttggccaatgaaatcaagttacatctcaaaaaatttcaacgatgataggaaagggcaaaagcatatcgcacacccgggcatcgatggcctatggctggaaccaggaaaaggaggccgatatcgtgctcaaggaatttctgcatggcgattccccagctgagatcaccaaagaattcaagatgctccaggacctgaattgtaactgcagcaagaacaccctgtccttcgttatcagccccacgattgaggatggcaggaaattggataaaagcaagctgcatgacattgccaggcggttcatccacgagatgaaactgggcgagcgtcaggccatcgcttttgtgcatagggacaaggatcataaacacatccatttatatgtcaaccggattgattttagaggtgtggcgtataacgatagttttataggaaagcgaagtcagttggcggcagaaaaagtagctgaacacatgggactgaccaccgttaaacaggttcagtttgaaaaggagttcaatcttaaggaaatacgtacggagatcaaacgcagacatgatttgagcatgtcccaatttaagcccagatcatttgatgactatatcaaggccatggaaaccaatggggtcaaggtcatcccaactattaataaacaaaataacctacaagggttccgctttgaatttgatggtcacaacttaaagggcagtgaagtccaccgcaatatgtccataggtaatattggtaaacaaatgggcggccttgaaatagccaagaatttaaagaataatgcggtgggagtgaagctagccggcaacatggtaggcttggcgcccaagttagcctttaaactgaccaaattcttaattaagaaaaccatacaacagggactgtcctattaaataaaacgatcatgacaaaactagaagaattcacggctcttttggtcaatgagaccacggactttaaaaatgctctggaaaagttggagaaacttaatgagcagttaaaggacacaaaaattaagatggatgttatggaatataaaaccatcatcgaaaatcatcagcaatacatggcatcacatttaaattctatggagcggtttcaaaatcactttgacgataaaataaagaaggccaagatttatcccgattgggctgtaggggtttttattgtgagtttggttttgagtttcagtgccctagtatttattacaataagtttctttatatgaaagacttatccaagtaaatgatattgcaaggagatcttctttaaacaaaaaaagtcccaccgaagcaggactaaagattttcatctacggcatatagccttattgtgataagattaaagattagaagttttaatctgaatcaaatatagaaaaatatttttgatttaacaatgcggattcccacacaagaaaattcaagttaatttgtatattgaagactgttaaagtttaaaatggtatggcaaaggtattaggattggatttagggactaactcgattgggtgggcgattgtagaaaaagagaaagatgaaaaagaatttatattattagataagggagttagaatattttccgaaggtgtaaatcttgagcctaaaacaagtagtgaaagctcaaaagcagcacagcgtactggttataggagcggaagaaaattaaaatatagaagaaaattaagaaagcttgagctattaaaggtgttgtctgataataacttatgcccaatattaacagatgaggagcttaagctttggcgctataaaaaaatatatcctacaaacgatgattttagattgtggttaagtacggataatcaagatgataaaatagagcgaaaaagacagaacaaaaatccttacgtttttcggttcaaggcttcgacacaaaagcttgatttaaacaaaacaagtgataggcatgaattaggtagggctttatatcatattgcacaaagacgtgggtttttgagtaataggttagatacatcagacaattccattgttgaggaaaaaaatagtgaaatagaagaaattgttcatcaatcaactactgtagaagattttttaaaaacctatgatgagtttttggaggcttatgataaaacagaagcaaacagtaaggcattattcactttaggaagagcatttaagtctattttaaaggaaaatgtaaatgaagaatttaattcagtaaaagagaaattattagaacgactaaatcgcaaagagtttttaggcaaggttaagagtgcaattagcgatttatctactaaaatggaagaggctaattgcaatacattgggagagtatttttatggtttacataaagaaggacagcgaataagaaatcattatacacatcgtgaggaacattatttacacgagtttcatgttatttgtgatcaacagaatctttctccaacactaaaaaaggacattgaaaatgctgtcttttttcaaagaccattaaaatctcaaaaaggattggttgccaaatgtcctttagaaaatgacaaagcttgtgtacctgtttctcatccggactttgaattgtttagaatgtatggttttattaattcaattaaaataaggcctgtagaagaagataaattaaggtttttaaattccgaagaaaaaataagtatagaacctcttttttatagaaaatccaaaccaaatttcgattttgaagaaataacaaaaaagctcacacctaaaaatttaaaatcaggttattataaagataagaacgtaaaagactttgacattttattcaactttggaaactatactaatgttagtggatgtccaacaattgcaaatttaagaactgtttttggagatgattggaaaacctatttaattcaaaattttaataagaaaaacaagaatgattccagtaaatcagaacatcaaatagtcgatgctatttggcacgtgctttttagatttgataaaatcgaaaaattaaaacaatttgcaaaagcctatctagattgtgatgacgacatggctaccaagttttcaaaaataaaattgaaacaagattatggctcgttgagtttaaaagctattcgcaatattctgccatatttagaaaaggatttaatctactctcatgccgtatttttagctaatatgaaatcggttttgccaaaagatgtttggaataatgaagaagaccgaaaggttataaataatgaagtgttttcaataatcgaaaattataatacgtatagaaatacggttgatatagtaaatggagcaattaaaaatgtaaaggataatcaagaaacatggaacgctaaaaacacttttgttatagacgcgtataaaaaagatattaataaaagtattcaagactactatggattaaaaagttgggattcgttttcagaagaagaaaaggacaccattttaaaagatagttttaagcttttttctactcaaatggaactcaatctaggacgtggtgaattcttaaaaaaagaaacattagacgaacgtgtaaaagagtttttaagagacaactttaacgtgagtgaagctagtttaaaagcactttaccatccatctgccattgaggtttataaaaaagctaaacgcagtgataaggatggcaagctctatttaggaagtccgttaatatcttccattaaaaaccctatggcaatgcgggcattacaccagttgcgcaaagtcatcaatcaactaattaaagatgatgctatagatgagaatacgattatccgtattgaaatggcacgagaacttaaaagtgcaaacgaaagagttgcgatacgacaatggcaaaatgaccttcagaataatagaaaagaccatatagaagccattaagaagctttataaggaagattctggattggatattgagccgtctcaagatgaggttttaaaattccaactatggaatgaacagaataaaatttgtctctatacaggtaaaactatcagcatttgtgattttattggagcaaatccaaaatttgatattgaacacaccattccgcgaagtaaaagtttagataattcgcaaactaacaaaaccttatgctgttcaatatataatagagatgttaaaaaaggcaaaacgcctacagagtgcagtaatcatgaagatattattccaagaataaaacattggtatgccaactataaaagtttagaaaatcaaataagagatcttactaaaaaagttagagcagcaactacaaaagagaatagagacagcaatattcaaaaaagaacgaaactacgttttgaatataattatttaagggataaatacaaatcttttacaatgatagaaatccctagaggatttaaaaatagtcagtcagtagatattggtattattagtaaatatggaaacttgtttctaaaatcattgttttcgcaagtctatccggtaaaaggaaaaacaacttctaatttaagagatatttggggattggataaaaaagaaagggacaaccatgcgcatcacgcaaaagacgctgtagttgtggcatgctgttctaaagatattaatgatgccttggctgaatattatcataattacgaagattataagttttacggaaagccaaaaccatcctttaaacatcgaattccatggaaaggcttcaataacgatgttagagactttgatgataatacattaattagtcatcacacgccagatgtattgccaattcagagtaaaaaagccattcgtaaacgtggcattattcaacgaaacaaaaatggcgaaattaaatacaaacaaggagatacggttagaggtgctttacataaagaaagtttttatggagccataaaacgagaggagaaaaataaaaaaggagaagtagaagatgttataaaatatgttttaagaaagtctctggatagtttttcagatacagatttaaggaacattgtggacgacaaaataaaggaaattgtgacgaatggtcgattacaagaaaaagtatataaaaaagaaattgaaactttaaaaaagcaaatcaataaagtaaacgatgccgaagaagaggtaataagagctcaaatagacatgttatcgaataaaattgagaatgaactttatgtattgccaaacagaaatggtaactcaatacctataaagaaaatccgatattttgcaacagatgtaaaagtgcctttagaaattaaaaagcatcgcgatgtttctaggcatgaacacaagcaacattattttgcaaagaatgatagtaactattgtatggctatttatgaaggtgttgatgcaaatgggaaaataaaaaggtcaaatatattaattaataatcttgatgctggcagttattttaaaatgagtaatacaaataataaaatctatccaattgcaccggaaaaagatgaaaataacaatcctttaaagtgtgttttaacaaaaggaaaaatggttcttgtttatgataaatcaccaaatgaattgcatgacatggaagcgtcacaattacttgagcgtttatttcaaattacacaaatggacgtagaagcttcgtgtatcaagttgctacatcatacagaagcaagggaaaagaaagtattaacaacatttatgggtttaaaaactggaatgaaaggcggtaaaaatattggagaacataaaaaataccaatggataaaagctggtgttaatagttttgattgtcttgttgaaaattatgatttcaaaataacggtatcaggtaaattagagtttataaaaaactaaagtttttggtgtatatttacaccacattaattgttttaatcatgaccagacaaagtatttccttaaccaaaaaaaatgacgaatggctaaaagttcaattgtctgaagatgaatttaatagcaaaagtgaggctattaactatcttataaaacaagcacgcaatcaaaaagaatattatgattttgtacggatgaaaatagaaaaaggcgagaagagtggttttgcgaaaaaacaaacgagggatgaaatgttagctgaatttaaaaaagatctaccagatgaatagctactttttaagtagtgaggctaaagaagacttaagagaaatctattcttacggagtagtaaaattcggaattaatcaagcagataaatattttcatatgcttcatgattgttttgacaaaattcagtcaaacccaattatgtttccaacagcagaccatattaaaacagaatttcgttattgtgtttgtggtgtggatactatttattatagaataaaagaaaatagcataattgaaattattacaattattggaagacaggattttccaaaacacttataagttcattgacatacggttttatcttaaacagccaagccacaacggaaaattgaccttctcaattttttgcaacgatttttcgttgtggtttgattaaagattagaagacacgatattaggtttttacctttaatgatatctccttgtggttgtggtttgattaaagattagaagacacgatattctgcatcgcatattgccctgcatactccgtgttgtggtttgattaaagattagaagacacgatattgcccctctggcaggttgtttgccgcgcctagttgtggtttgattaaagattagaagacacgatattgatttcgtatgcctcttgcatagccgtgtgttgtggtttgattaaagattagaagacacgatattaagacgacgttaagcagttttctattaatagttgtggtttgattaaagattagaagacacgatattaccctaaaagagaaagcgtaatctcggatagttgtggtttgattaaagattagaagacacgatatttttccaacatgtttcaacatgtctttgacagttgtggtttgattaaagattagaagacacgatatttaattggttatggtgtaatctcaggagcggttgtggtttgattaaagattagaagacacgatattaccatcttatcgcttacagctgagcgcgagttgtggtttgattaaagattagaagacacgatattaaagctcttctttggctttttctagtcctggttgtggtttgattaaagattagaagacacgatatttttcgtctctatcagtatcaattaggaactgttgtggtttgattaaagattagaagacacgatatttgtttgagcactatctaaacccattacgatgttgtggtttgattaaagattagaagacacgatattattggtaggcaatgattattatggccgattgttgtggtttgattaaagattagaagacacgatatttgttgaaaaatgcaatcagtcaagtaaccagttgtggtttgattaaagattagaagacacgatattagtgatagctttattaatgtctgaataaatgttgtggtttgattaaagattagaagacacgatattttaacggaaatttaaccgcgcttaacttgtgttgtggtttgattaaagattagaagacacgatatttaattctagcatcgatataatcagttgcgagttgtggtttgattaaagattagaagacacgatattaaagaaaaccgcaatcgtgacatctttacggttgtggtttgattaaagattagaagacacgatattaatctgggtacccgcttttgtttagtcttagttgtggtttgattaaagattagaagacacgatattcccccgctccagggactgcacttttatctgttgtggtttgattaaagattagaagacacgatattagtacataagatttaacggtgaccctactagttgtggtttgattaaagattagaagacacgatattaagaccagacggttataaggtaaccactatgttgtggtttgattaaagattagaagacacgatattccaactctggacagaatgcgaaacaataagttgtggtttgattaaagattagaagacacgatattcttacatgtgtatcatcgacaaagcgcatagttgtggtttgattaaagattagaagacacgatattattgattcagtttacgatgataacgaaaagttgtggtttgattaaagattagaagacacgatattaaaaaagccctgtttatacatataacagagttgtggtttgattaaagattagaagacacgatattaggtcattagcagtcggttctaacgttaagttgtggtttgattaaagattagaagacacgatatttgttaagatactatatacgcctaacgtcaagttgtggtttgattaaagattagaagacacgatattccgctcccgagattacaccgtaaccaattagttgtggtttgattaaagattagaagacacgatattagggccaagtggagcgtatccgtttgctgtgttgtggtttgattaaagattagaagacacgatattttttatgtgagtaatccgcatattccagaggttgtggtttgattaaagattagaagacacgatatttgtggctacaacgtccattttgtcaaagaagttgtggtttgattaaagattagaagacacgatattttggttaacgcctgtcatatacacgtaaatgttgtggtttgattaaagattagaagacacgatatttgataacggtttcttttattgtatcggttagttgtggtttgattaaagattagaagacacgatatttctcattgtatttggtgcggtatagtaacggttgtggtttgattaaagattagaagacacgatattttgtttccgcatcttgtgtataccccatagttgtggtttgattaaagattagaagacacgatattgctgggatggagcgaagtcggactgaagcagttgtggtttgattaaagattagaagacacgatatttcaggtttagcaattatggcatatttcaaagttgtggtttgattaaagattagaagacacgatattagttggttctgtaccttctggtaatcatgtgtttaaagcaagatgtcgtatgaaaaaatgcttcttttttgcagtgataaggcaagattgaagcatttttttgttttaaaataattccaattgagagggttgaggttcttttggaacttcggcacgtccccaaaagttcatgatattgccaaattgtttgtcagttattcggagtacgcttaccttgccgaagggtggtaaaagtcttttgattcgtttttcatgtacatcagcactttcgctgctcgcacaatgccgcatataaacagaatattgcatcatggtaaagccatcttttagaagattttttctaaagccggcagcatttcgcctgtctttaatagtttcggtaagtaaatcaaaaaacacaaataaccacataatcctataaccgtttagctccataattctggatatttaatccttttccgttcgccagtataacattgttgtaatgagctcgctgttttttgcaagcccaccattaatgggcttttttcggttttaaaatacacggttcttgtaagaacttgaagcagtttcgatttgatttccgtggtcaattcttgctcatcagaattttgcattataaaatggaccgcttcatcgactgtgggcctaaaaggttccatgatgtcatcggctaatgcaaaagcattgtatttacttttatggtgaattcccaaggtgtttagtaatccgcttccggataaagctctagcagtggaggctctcaaaacggcatagccataattaaggaaattgttaggataattaccaaatcgctctcttttaaaatcaatttcaaaaaaggatttccaataatatttagcggcaacagcctccatattggtagtatctccacttaacaccttactttctagaaactcaaatacgttttttttatctgtgatcctttccaaaagaataccttgattttttattttttctcttatggtttgttgccataatttcttttttaaaggagcgctcgcattaatttgatgtttaaatatttcttgttggataatatggctattgagatttagtagcattccatttggaaggtgtttgtcatcgcatataatacaagcacagttattgttgatcagtttattgagagctggcatactaatatagacttcgttatgatcaataatgatataaccaatatcttcgattggaatggttctttttatgctgtcggacgtaattacaagttgctcatttgaggtcgtaatagaacatttgtttgtgaagaatagtgttttttttagcataaatagtctataagtaagggtggaatttgctaagttgcaataggagggaactttaaatatatacaattcagtttgtaataggctgaaaatctgtaagatttttaaggcaatagcttaattcttttgtttataaatccaaattattatgccagaacatgtcttcgagttcaacttctcaaaattataatcactgcgattttgctgaagcaattcacaataaagattattccgttgtgaaaacatttaaggcggtacattagtttgtatcgccttttttttattctttgaggtatattaatttccaaatttttatgttcgacatattgatatgcactgtcgcctcatctaaaatggaattgtcaaactccttaaaataagtctgtgtaatggtatggtttttatgccccatagagacgcttatgatattatcaacatcacctttttgttttaaacaatttgcaaaactatttctggccatgtaactggtaatgaaattttcgattccaagtatttccgcaatctcttataattctttgttatagcgttgaagaatcttatgctttctgttttccaactaggattataagcttcctaaaatgaaatgatgtaataattggtataagacgttgtttttaggaataatagggaaaatatatctagttaataagttacttggttaaagttctaatttttaacttgaagattctatccatccaacttttacaagctgaagcatacttgaatttctggttaatctaacgaaagaaagaataagcacgtacttttgaagcatcaggaaatatagaatcaagcagcttaaaataataaaataactttatttaattttaaaatgtaaaaacagatacatttcaatgagtctatttcgctatatttgtattaattaacaaaattatgaacaatcctagacttattccgacagaaaaaattatagaacgtttgcgttatgaaaacccttggtggatcactcaagaaatccccagtgtctataaggacatgtcgagacgtttgtactttgatttgttctatccgtttattaccgaaacagacatacgtcgtgcggtggttttaatggggccaagacgtgttggaaaaacagtcatgttatttcataccattgatgaattgatacgcgaccaagttgacccgcaacgcgtattttttgttcctatagataaccctatctatttacatttaagtctacaagacattttagacctttgcaaaaaagccatcaatatcaatagtttaaaaggctgttatgtgttttttgatgaaatacaatatctaaaggattgggagcgtcatttaaaagtcttggtggactcctatcctgacaccaaatttgtggtatcgggctccgcagctgctgctttaaaatggcatagtactgaaagcggtgctggacggttcaccgactttatgttgcctcctttaacatttcaggagtttatccatttaaaaaacagaaatcacctgatcaagaaggatgctatacaatatgctaacaagcagctcccttactacattccccatgacattacggagctgaataaagaatttttgcagtatttgaattttggggggtatccggaagtggtattgtctgaaaaaattcaaaaggacatgggacgttacgtgaaaaatgatattgttgataaagtacttcttcgcgatttgccaagcttgtatggtatcaaggatgtacaggaattaaatcgctttttcacttacattgcttataatacgggcaatgaattctctttcgagaccatgtctagggagagtggcattcaaaaggaaaccttgaagaaatatttggaatatttagaagctgcttttttaattaaagttttaaacaaagtgactgtaaatgccaaacgactaaaacggattacgagttttaaagtttatctaaccaatccatcgcttcgtactgctttattttctcccgttaaggaaatagatgaggagatgggtaatatggtggaaactgcgatactttcccaatggatgcatcgcgaaaatctggatttaacttatgcacgttggaaggaaggaagggttgaaggtgaagtagatttagttctggttgatgataagaaatttaaacccgtttggggtgtggaaattaaatggagcaatcgattttacgaaatgccacaagatttaaagagtttaatccatttctgtaaagccaacgcattgaatagtgctttagttactactattgataggttaggaacaaaggaagtgagcgatttaagttttacttttctgcctgcttctgtgtatgcctataacattggcgaaacaacgttgagaatcaagtctactagctactaaactatcaagatcatgaaatcagttatacataaagcatacgttgtcgctaacattcgtttgaattactactgaaaggaattagaaatgatacacctgaaaatgatcctctcatgacagcacttatagaggtcagtgatattatcgaacactatgaagaaatccatttttcaatacggtctgattacttcggttcgatttgtgccagtgctttcggttcatagttccatgcattttggtccaaactgtgccgttttttgcctgtgtgctaaaaacctataacggttcaatttgtgccactttgaaagatcgaggatagttaccttgtcgcccaaaacgagcgatatggccaacacacttgatccaatagtgaagtgatttctgaaaatcttagagcattcaaacagcgttcttatactgcgtctagagacttttacgacctctatcatttaacccaagagttttatatggaaaattgggaaatggtcattcctatttttataaaaaaaatgatgcataaaaaattggaatatcaatcgcctgatgatctcatagatggttctaaaataacaaatgtaaaacgtgcctggagaactagtgtagcccaccaaattacagaagcacatctagcgcaaacgaaaattacagaaatagtagcagacggtattaaaatgtatctacctaatgataaaactttaaagtaagttcaaatctgaaacgttcaaaaaaaaaatggcatcggcctagtctcgctttgtttaacgaatccttatttttaacaaaggatcaaataccgagatgataaacataataactttatagaccaatatttcatttatgtaggtatatgtattgatatcaataaaataatcgaaattcaaggtaaatgtgggcgaagtctaaaattaattatgtacaaaaacaaaagtttaattatcatcttttggagctattttctccggaatatagagaatttcatcaggtaaagaagtttccaaaatgtctcgactagaaaagcctacctccaattcctgacccatgtaatcttcataatagagtacttgtaaatcatggaatccggcatcaagagcaaccttgccttctctgcgacgtgaactatggccaccatcattatccacaatttcttggccgtcaatgaagagcttagaaccatcatcagagatggtataaaaacgatatacgcccttttcagggatttttatttgagtacggaaatcatatccaaaatgatctttaatgggagcttccttaatagagaagttcctcatatttccttctttaacttttttccccgaagtaacctgatttgtcattttaaattttccttcataataggtgtaagcaacgccctgagcttttggctttacattttttgcgggtaaataggtcattgttttctcgtcaaaggatgtaatgccagaagggtagtggtaagtgtcttcatttcctgaaggagtaacgatccatgtgtcaaattgaggtttaccctcaaatatttcaatgatgcggccgcctctttctaacgatccataggcatcagtgcctgttacgcgtccataacctaaggctatgtcatattccattccaatataatcattgttatgatcatgtccagcaaagactcccataacatcctgcatgtcgataaatgcgttaaacaatcctgaatttatggttggtgaagacaccccactttcaagtttttttccaaaggttgtttcgcgaccaactacattattatattcgagaagtggaatgtggaaaaaggccaatgaagggatgggactaccaccattattttgtgtgaactgcgtactttgcttcctgtaccattctatctggttaaaatgaatccaatcgtagtggccgtaattattttctggcgtgtagtcattggaatcgaaacaataaagcagagctgcaatatcatttttagagttgtaaattgaaattacattattgcccattcccataatgtcttttgggcccttatctccgatataatagggcgatttcaatagaagatcgtacatgtcatctttaattaaatgctctggatcgtgatttcccattgttacagtaaaaggtgttttagcattctcaaaaatactaattactgatttccatccatccaatgcagggtcacctgttacgatgtcgccagtcaaaattgcgagatcaggcatttccgattttaaaactgactgaatggttgtggttgtttgagaggaattcgccgagtttggcatccagtggatatccgtaaattgtacaattttaaattttccatctttaaaagtaaattgcttttggccataagcctctgaatggagagttacaacccagataagcaaaagtataagtgtttttttcatgtttatttgttttaattaattgatttcgatttcatcaagagcaagtttgctttgttccccctcccgataatatccatttggtataaggcctccacttaatatttctaatctgacaaacaatgcttcaatctcaggaaatgttatcgatacaggaaatctagtgccctctgttggagataaatcgtaagtaagttccttttgctttttctcagtataagtcactccatccaatgatgttgaaatttttatagaacgggatggccaggtgtaattcactggtcgccataaaaacgaagttgcgagttcgctgattaaacttttagtctctaaagccaggttaatttgaattgtatcttgacgatagcttacccaatggcgcatgttatttgcatatccccgaatgccatccgttagtccaaaaccttcatttacgttttccgataggggttccggtatgctcacatatttgcgacccgtagctttgtttacaacaaaacctttgttggttattttcccttgggcaacaccattattatatactgcagcataaattgtggcatcctctgttataattattggcttggtgtatgctgatgatgaggtggttactatggagtcgttaactgaatagaatattgtggtgttgggactgaaagtttttaatgccacttcaaatttactacttgtagggttccaggcaccagttagatttacatcataaaaattgcgcgaagcattaactccat

SEQ ID NO: 4150 - DNA, 24305 bp, synthetic construct
  misc_feature 1..24305: note = Synthetic
  source 1..24305: mol_type = other DNA
gcgtttattattattgattttttatcgtatttttgctcgataacgcaaaatatttatgttagataaattacaaatagtaaaacaacgttttgatgaggttagtgatttaatcattcaaccagatattatctcagatcaaaaactttatgttgagttaactagagaatacaaaagtttacgtttgttaatggacaagcgtgagttatatatagaacagacaaataatttagctgaagctgaagaaataattgcagatggtagtgatgctgaaatggtagacatggctaaaatgcaatacgatgaagcaaaagctgaaatcccaaaattagaggaagaaataaaagtacttttaattcctaaagatccacaagatgctaagaatgcagttgtagaattacgtgcaggagcaggtggagacgaagcaagtatttttgcaggagatttatttagaatgtacagcagatactgtgaagctagagggtggaaagtagatactgtagattatagtgaaggtacaaatggaggttttaaagaaattcaatttgaagtttctggagacgatgtttatggaactttaaaatttgaagcaggtgtacaccgtgtgcagcgtgtgccacaaacagaaacacaaggtcgtgtacatacaagtgctgctacagtaatggtgtttccagaagccgaagagtttgatgtagttgttgaagcaaaagatgtaagagtcgatttcttttgttcttctggacctggaggacaatcggtaaacacaacctattcagcagtacgtttaacgcatattccaactggattagtagcacaatgtcaagatcaaaaatcgcagcataaaaataaagagaaagcttttaaagttttacgttcacgtttatacgatttagagttagctaagaaaaacgaagaagatgctgccttaagaggcacaatggtaacttctggagatagaagtgctaaaattagaacctataactattctcaaggacgtgtaacagaccatagaattgggttaacactttacgatttacaaaacattgtaaatggagacattcaaaaaatattagacgaattaatgctagccgataataccgaaaaattaaaggctaatagcgatttattgtaaatattaagcctctttatagaggcttttttattataaaaaaaagttaaactatttgttacaccacccacaagtgcaacgtttgttgtagtgtaatgtggaactcacaattttaaagcatgacaacacagcaactaacagcagaaattaaaaaaaagaactctttcttatgtatagggttagatgtcgatttaaataaaattccacagcatttattagaaaccgaagatccaattttcgaattcaataaagcgattatagaagcaactcatcatttatgtgtagcctataagcctaatacagccttttacgaagcttatggtattaaaggatggcaagcattagagaaaacaataaaatacttaaataaaaaccatcctgaaattttcactattgcagatgctaaaagaggagatattggcaatacaagtactatgtatgcaaaagcatttctcgaagacttagcgttcgatagtgttaccgttgcaccttatatgggaaaagattctgtagaaccttttctagcatttaaagataagcacactataatgttagcattaacatctaatgctggagcattcgattttcaaacaaaaacagtagaaggtaaagagttgtataaacaagttttagaaacatctaaaaactgggagaactcagagaatttaatgtacgttgttggagcaacgaaggctgagtactttgcagatattagaaaaataattccagacagttttttattagttccaggtgttggagcacaaggcggaaaccttcaagatgtatgtaaatatggaatgagcgataatgttggtttgttaattaattcttcaagaggaattatttatgcttcaaacaatgaagattttgcacaagcagcagctattaatgcaaaagacttacagcagcaaatggaagctattttaaataactaatgtcattgcgaggaacgaagcaatctctaaataagtagttaaattaatctagtaactcaaatagtattgcaaatattactgtcattacgaggaagtatgacaaataaatctcatcattttaagcgttcctgctattcatagagcagcgaataatctcataaaaagaagatatatcttaaatgaaaatgaaagatcaaataggtagacaattaaatatagatactattccaaagcgaataatctcactcgtaccatcgcaaaccgaattactttacgatttaggtctagaacattccatagttggcatcactaaattttgtgtacatccatttcattttaaaagcataaaacaaatagtaggaggtacaaagcaaattagtatagagaaaataaaggcacttaagccagatattattctttgcaataaagaagaaaatactaaagatatagtagaagcttgcgaagccatttgcacaactcatgtgtcagatattgtaacaatagaaaattgtattgaagtcattaaccaatatggagaaattttcaataagcaaataaatgctcaaaaaatatcagataaaataaatgttaatttaaaagattttaaaacatttattaaaagcaagccaactttaaaagcagcttattttatatggcgaaatccatggatggcagcaggaagcggaacatttataaatcacttattagaattaaataaattcgagaatatttataaaaatttagaacgctatccagaaatagaattaaaaaatttgcgattagaaggcgatcctgaaatcgtgttattatccagcgaaccttatccatttaaaaacgagcacgctttagaagttggcagtgcatctcaacatgcaaaaatcatttttgtagacggagaaatgttttcgtggtatggctcaaggcttataaaagcatttaactattttaagacgctacgtgaaaatttttaggatgtttttttattatgtacaacttcaaaagactgtacagtcttttcttttattgcacttaaatttaaggtcttatttaaattaggtgttattcttccaactttacaaaaatgtgtactcatagctctttttatataaatacgagtaattttcctacttagacgtccaaaagtaaaaatgataatttttatactgtagaatacgaattatcgagagataaaaacttaattttatttaatttgtgcaacaatttcatgacttataaatttataatcatcaccaagtgcatgatctatttgtctaagattatatccttcttttgctaattacttataacggttttgtagtttttgttcatgagatagtaataggttacttctgttcatggctaatttggtgttagtcaaataaaaacacattaagtattgatatatagcaatatatgtcagtaaaacatttttttagccataaaaaaagccaatcataatttatagattggctttcattatactaaactaactaactcaagtaaaattgaagaataatacttgaactacaaaagtatagaaattactctttttatatgttatctaaactttagtttaacattattaatgtgtattgtttaaagaaaatttagtcctgcaaagcaaaaactttttgtaacaaactagttgttctagagcctactttctctctaatttctaattcctctacagcaatcattttgtaaacaccttttaaagcttcagtagtaacataatctgttaaatctggatttacattattagtaaatggtattgcattatatttattaattaagttagaccaaatctggtctgcaccaactttagcaaaactatttttaatcacaggattaaatttagcataaagcgcagtttgtgttttctcgtttaagtattgtgtagcagcatctttgttacctaataaaatgtttttagcatcattaaacgttatgtctttaacagcatcaataaatataggcgttgcttcgcttacagcgtcttctgccgcacgatttaatacctttataccatcgtctgctaaacttcctaatccaatatctcttaaagctttgtctactttttgtaactcttcaggtagtaaaatttttactaattcgttattgtaaaatccatctttagacgttagtttactaacctgtttgtcaatacctaaatcaagtgcttcgcgcaatccgttaccaatatctaattgagagatacttccattaccttgaggtaattggtttacaacctgctgtaattctgcacaagcagataaatttaatactaataaaagggcaataaattttttcatcttttgttattttagcggtaaaggtaataattattagagcaaatattttgttaaaactgtttcgcaagctacacagttttaaaaaataccgcgttttccgttatatcttttttttgccatatatggcagcaaaaaaaaggatgccaccgcaaccgctttcgcaaaaccactgttacgagaaaataaccgttttattattaaacaccatcaccttacgttttatgtgtaatttaatagcattagccaatacaacgcgctctaagtcacgtccttttgcaattaaatcttcaatagtgtaagtgtgagatacacgctctacatcttgttctataattggtcctgcatctaattccttggttacataatggcttgtcgctccaataatttttacaccacgtttataagcagaatgatagggttttgcacctacaaaagctggtaaaaacgaatggtgaatatttataaccttattagggaacttgctaataattttactagatacaatttgcatgtaacgtgctaaaacaataaaatcgacaccatgagaatcgcataactttaattgttgtacttcggcttcagctttagtatcttttgtaacaggaatatgataaaacggaatcttaaaactatctgcaataggctttaaagtattatgattgctaacaataaaagggatttctaaatccaattcacccgaattataacgacctagtaaatcgtacaaacagtgatcgtatttagacacaaataaagccatttttggtttgtcttcagcatcataaatacgccatttcatattaaaccgttcagctaattcagttttaaaattaagagtaaaactttccatagaaaaggaagtaaattcactctctaaacgcataaagaaaatgtcttgttctctatctacatgttggtctatgtaaacaatgtttccattgttgttagctataaaattagtgactgttgcaataattccagattgatctttacagtgtatttgtaatgttatttttttcatagaaaacttgttctttcatttccattcttaaggaaatacgatgactattgaccatactaaagtagtgtaaaaagagtagtgtaattttgttcattaaaacttttagataattgtagattttagagcgaattttttgaatattccgtaaattgcaagcctaaatcagattattttttccgaatgatacaagcaacaccatacaaaccaaaatataaagttagaatagtaacagcagcagccttgtttgatgggcatgatgcatccataaatattatgcgacgcattatccaatctacaggagttgaggttatccaccttggacacgatagaagtgtagacgaggttgtaaatacagccattcaagaagatgcaaatgctatatgcttaacctcttatcaaggaggacacaacgagtattttaaatacatgtacgaccttttaaaagaaagaggagcagaacatattaaaatcttcggtggaggaggaggtgtaattttaccttcggaaattaaagatttaatggattatggtatttcacgaatttactcaccagacgatggtcgtgaaatgggattacaaggcatgattaacgatttggtacaacaatcagactttgccattggagataaattaaatggtgaagtagcattactacctacaaaaaatgcaaaagcaatagcgagagttatttcttcggctgaaaattttcctgaagttgcaaaaaatgctttagaggaaattcatttaaaaaataaaaattctaaaacaccagttttaggaatcacaggaactggaggttcaggaaaatcgtctttagtagacgagttagtacgacgttttcttatagactttccagaaaaaacagttggtttagtttctgtagatccttcaaaacgtaaaactggaggtgcacttttaggagatagaatacgtatgaatgccataaactcaccacgagtttatatgcgtagtttggctacacgccaaagtaatttagcattatctaaatatgtaaatgaagctgtacaggttttaaaagctgcggaatatgatttaataattcttgaaacttctggtattgggcaatctgatacagaaattatggagcacagtgatgttgctttatacgttatgacaccagaatttggtgcagctacacagttggagaaaatagatatgcttgattttgcagatttggtagccattaataaattcgataaacgtggttctttagatgcgttgcgtgatgtgaaaaaacaatacatgcgtaataatcatctttgggatgtgcatcaagatgatttacctgtttatggcacaattgcatctcagtttaacgatccaggaatgaacacgctttacaaagcgataatggataagttagttgagaaaactgaatctaatttaaaatcgacttttgaaatttcggaagaaatgagcgagaagatttttgtgattccaccaagtagaacacgttacttatctgaaattgcagaaagtaatcgtgcgtacgataaaacggcttctactcaagttgaagttgcacaaagactttttggtatttataaaacattagaatctgtactaaacgtcattgcgagtgaaacgaagcaatctcttttagataaacatggcgtaaatagtgatgagattcagaatctagttaccgaagaaaataaagactttgtgagattacttcttggagagttcgatcgtgtaaaactaaacttaaacccacacaattgggaggttataataggttgggacgagaaagtaaataaatataaaaatcctatctatacttttaaagtaagagataaggaaataaaaatagaaacacatacaaagtcattatcgcaaagtgatattccaaaggtagctttaccaaagtatcaagcttggggagatattttaaaatggtgtttacaagaaaatgtgccaggagaatttccgtacacttcaggattatatccttttaaacgtacaggagaagatccagcaagaatgtttgcaggagaaggaggtccagaacgtacaaatagacgttttcactatgtaagtgcaggtttaccagcgaaacgtttatctacagctttcgatagtgtaacactttatggtaacgatccagatttacgtccagatatttacggtaaaattggtaatgcaggagtttcaatttgttgtttagacgatgctaaaaaactgtattctggtttcgatttagcacatgtaatgacatcggtaagtatgactattaatggtccagctccaatgttattaggtttctttatgaatgctgctatagatcaacaatgtgagttttatattaaggaaaacggactagaaaaagaagtagaagctaaaattgctaaactatataaaggcaaagagagaccaagttataatggcgatttaccagaaagcaataatggtttaggtttaatgttgttaggtgttactggagatttggttttaccagcagacgtttatgccgaaattaaaaagaacactattgctcaagttagaggaacggttcaggcagatattttaaaagaagatcaagcgcaaaacacctgtatattctctacagaatttgcattgcgtttaatgggtgacgtacaagaatattttatagaaaataatgtgcgtaacttctattcggtttcaatttctggatatcatattgcagaagcaggagcaaatccaatcacgcaattagcattaacattatcaaacggatttacttatgtagagtattacttaagtcgtggaatggatattaataagtttgggccaaacttatcgttctttttctcgaatggtatcgatccagaatattctgtaattggtcgtgtggctagaaaaatatggtctaaagctttaaagcataaatatggtgcaaattctagagcacaaatgcttaaataccatattcaaacgtctggtagaagtttacatgctcaggagattgattttaacgatattcgtacaacgctacaagcattatatgctatttacgataattgcaactcgttacacactaacgcgtacgatgaggctattacaacacctacagaagaatctgtacgtcgtgcaatggcaatacaattaattattaataaagagttaggattggctaaaaacgaaaatcctattcaaggttcttttattattgaagaattaaccgatttagtagaagatgctgttttaacagaatttgacagaattacagaaagaggaggcgttttaggagccatggaaaccatgtaccaacgttctaaaattcaagaagaaagcttgtattacgaaacattaaagcataatggagagtttcctataattggagtaaatacatttttgagttctaaaggatcaccaacggttattccaaaagaagtgattcgtgcaaccgaagaagaaaagcaatttcaaattaaaacactagagcatttacataaagcaaatgatactgatgtattactaaaagaacttcagcagaaagccatcaagaatgaaaatatttttgaagctttaatggaagtttgtaaagtatgttctcttggagagattacagcttcgttatttgaagtaggaggacagtatagacgtaatatgtaagcagagaaccacgttttacttttgtaaaacgtgagtgaatcgcttatgctgagcgtagtcgaagtatctcagagaatccatttttcgtttttacgaaaaatgagtgaatatcttatcctaaatttattttgggatctcataaaaaggattaacctttaagagcgtcgtttgtaattcagaacaaagtgaagaatcttaaaaagaatcgtttgtctttcaaagcgtagcgaagaatctcaataaatttaaaaaaaagcgtttcaaaatggaacgctttttttacatcaaaaaactaaaataatatgattcaaaatcacacctttaaagcaaaagtaaactggacaataaacgaaggcggaagcactcgaaatccaagaaatttcagtagaaatcatagcgttacaattgctaataaggcagcactactacaaatgtcggctgcaaaaccatttagaggagacgatacgttgtataatccagaagatttattgttatctgctttagcatcttgccacatgatgtcttatttatatgtttgtgctcaaaataatatagaggttttaagttatacagatactgcagaaggcgatttagaagtaaaaactacaggtagcggaagttttaaaagagtacgattaaaaccaatagttacaataaaggatactacacaaaaaacactagcgcttagtttgcatgaaaaagcaaacagtttatgttttatagccaattcgtgtaattttccaatttctcatgaggctttagtttttgtaggttagtattttaaatgaataacaaaaaaaaagtcctaccgaagcaggactaaagattttcatctacggcatatagccttattgtgataagattaaagattagaaattttaatctgaagtaaatgtactatattttttttataaaaacaatgaggaaaaccgtaaactactcattttgttttattgtagttttattgtttaaatatagctagttaatgaataagatattaggattagatttaggaaccaatagtattggttgggcaattgtagaaaaagagaaaagcgaaaaagaatattctttaatagacaaaggtgttcgaatattttcggaaggtgttaatattgaagcaaaaacaagtagcgagagctcaaaagcagcacaacgaactgattatagaagtggtagaaaactaaaatatagaagaaaacttagaaagctaaggctattaaaagttttatcagacaataacttatgtccaacactttcagacgaagaattaaatctttggcgttataaaaaaatctatccagaaaatgatggctttagattatggctaagcacagataatcaagacaatgaaacagaacggaaaaaacaaaataaaaacccttatgcatttcgttataaagtctcaacccaaaaattagatttaaatacgactgttgaaaagcatgaattaggcagagctttgtatcacatggcacaaagacgtggttttttaagtaatagattagatacttcggacaattcgattattgaagaaaaaaatagcgaaattgaagatattattcagcaatgtaatacttctgaagaattgcttaaaatatataatgaatttttagaagtttatgataaatcagatgcatacagtaaggcattatttactttaggtagagcttttaaaaccattttaaaagaaaacgtaaatgcagaatttgttgcaattaaagaaaagttattagaacgattaaatcgcaaagaatttttaggcaaagttaaaagtgctattagtgatttgtctgcaaaaatagaagaagccaattgcaatactttgggagaatatttttatggcttacataaagaaggacttagaataagaaacaattacacccatcgtgaagaacattacttacacgagtttcatgttatttgcgaccaacaaaatctttcaacaatactaaaaaaagaaattgaaaatgctatattttttcaaagaccattaaaatcgcaaaaaggattggttgccaaatgtcctttagagaacgacaaggcttgtgtgccaatttctcatccagattttgaattgtttagaatgtatggttttattaattcaattaaaacaaagccaatagatgaagacaagttaaggtttttaaataccgaagaaaagttaattatagcaccacttttttatagaaaatcgaagcctaattttgattttgaagaaatatctaaaaaattaactcctaaaaatttaaaatcaggctattataaagacaagaatacaaaagattttgatattttattcaacttcggaagctatacaaatgttagtggttgtccaacaattgcaaatttaagatctgtttttggtgaggattggaaaacctatttaattcagaatttcaaaaaaaagaataaagacaattctaataaaacagaagatcaaataattgatgctatttggcacatcctttttagatttgataaaaccgaaaaactaaaacaatttgtaatagattatttaggttgcgatgaggtaactgctataaaattttcaaaaataaaattaaaacaagactatggttctttaagtttaaaggctattcgtaatattttgccttatttagaaaaaggattgttgtattcgcatgccgtttttcttgcaaacatgaaaactgttttgcctaaagaggcttggaataatgaaacagatagacatgttattaataaagaagtgttttctataatagacaattttaatacttataaaaatagagttgacattgttaatgggttaattaaaaaggtaaaagacaataaagaaacctggagcgataacaatacttttgtaattgaagcctataaaaaagacatagttagaaatattcaagactattttggattaaaacgttgggattcattctctgaagaaaaacaaaaaaaacttttaaaagatagttttagtgttttttcttctcaaatgaaactaaattctgggcgaggagaatttttgaaaagagaaacattagatgagcgtgtaaaagattttttaagagataactttaatattgaagaagataaacttaaaaaactctatcatccgtctgcaatagaggtttataacaaagcaaaacgcagcgacaaagacgaaaaactgtatttagggagtccgctaatatcatccattaaaaacccaatggcaatgcgagccttgcatcaactgcgtaaagtcattaatcaattaataaaagatgatgctatagacgagaatactattgtacgtattgaaatggcaagagaacttaaaagtgctaacgaaagagttgctattaggcaatggcaaaatgatttgcagaataatagaaaagagtatgttggtgctatacgaaaactttataaagaagattgtggtttagatattgaaccatctcaagatgagattttaaaataccaattgtggttagagcaaaatagagtatgtctttatacagggaaaagtattgggatttgtgattttattggcgcaaacccaaaatttgatattgagcatactgttccaagaagtaagagtttagataattctcaaaccaataaaaccttgtgttgctctatttataatagagacattaaaaaagataaaatacctacagaatgtagtaatcatgaagaaatattaccactaataaaacattggtatgctaaatataaaaacttagaaactcaaattagagatattactaaaaaagtaagagttgcaagcacaaaagaaggtagagatagttacatccagaaaagagccaaattacgtttcgaatataattatttaaagcataaatacagaacgtttacaataactgaaattccaaaaggatttaaaaacagtcaatctgtggatattggaattattagtaaatatggtaatttatttttaaaatcgttattcataaaggtgtatcctgtaaaaggaaaaacaacatcaaatttaagagatatttggggattagataaaaaggaaagagttaaccatgcgcatcatgctaaagacgctgtagtagttgcgtgttgctccaaagatataaatgatgctttagcagaatattatcataattacgaagattataaattttacggaaagccaaaaccttcttttaaacatagaatcccatggaaaggctttaataatgatgttaagagctttgatgttaatacattaattagtcatcacacaccaaatgttttaccaatacaaagtaaaaaagcaatacgtaaacaaggtattatacaaagaaacgaaaaaggcgaaattaaatacaaacaaggtgatactgttagaggagcattacataaagaaagtttttatggcgctataaaaagagaagaaaccaataaaaaaggagaagttgaagatgtaataaaatatgttttaagaaaaccgttagaaagtttttcggatacagatttaaaaaacattgtagacgatacaattaaagcaattgttataaatggtcgtagtcaagaaaatatattaaagaaagaaattgaaacttttaaaaaacaaattaataaagtaaatgatgccgaagagcaaattataaaagctcaaatagaaatattatctaataaaattaagaatgaactttatgtattaccaaacaaaaatggaaaaccagtaccaattaaaaaaattagatattttacaacagatgtaaaagcgccattagaaattaaaaagcatcgggatatttctagacatgagcataagcaacattattttgctaaaaatgatagtaactattgtatggcaatctatgaaggtgttgatgtaaaaggaaaagtaaaaagatcgaatttgttaatcaataatttagatgctggaagctattttaaaaagagtaatacagataatgaaatttacccaatagcaccagaaaaggatgaaaacaataatccgttaaaatatattttaacaaaaggtaaaatggttcttgtttatgataaaacacctaatgagttgtttgatatggaaggatctcaattgttagaacgtttatttcaaattacacaaatggatgtagaagcttcgtgtattaagctcttgcatcatagtgaagctagagaaaagaagtcattaacgtcatttatgggattaaaatctggaatgaaaggtggtaaaaatattggtgaacataaaaaatttccatggataaaagttggtgttaatagttttgattgcttagtggaaggttatgattttagaatttccgcttcaggaaaattagaatttgtaaattagaactagacaaagtgtttccttatctaaaaaaaaaatgatgaatagtttttaaaaaaacaagtagcagaagatgagtttaatagtaaaagtgaagctattaactatctcatgaaacaagcgcgaaattaaaaaggatattataatttcatacgattaaaaatagaaaacggagagaaagtcagttttgtctcaaaacaaactaaagaggagtttttgactgaaattaagagtagtatagataaaaagaaatatacataatttattcacaaacgttcattgacataaatctgattatcttaaacagtcaaaccacaacgaaaaattgacctttttaattttttgcaacgatttttcgttgtggtttgattaaagattagaaaacacgatattcttctacacattctatatccgtcaccaactgttgtggtttgattaaagattagaaaacacgatatttcagttctgctggtatatagtccaggagtggttgtggtttgattaaagattagaaaacacgatattggaaaaacataatacattttagtaatggtagttgtggtttgattaaagattagaaaacacgatattattatcaccctattttgttctaacacaatagttgtggtttgattaaagattagaaaacacgatattaatgtttggcaaagatatagataaagaaaggttgtggtttgattaaagattagaaaacacgatattgtaagaagtaatgtatataataaacgaggagttgtggtttgattaaagattagaaaacacgatattacatcttcctctggttctgtaccttcgtaagttgtggtttgattaaagattagaaaacacgatattaactggaagacatataaacgagttctttaagttgtggtttgattaaagattagaaaacacgatatttttttattgtttgttatataatcgtaatacgttgtggtttgattaaagattagaaaacacgatattataacaataaagtttataggtgtttgaatagttgtggtttgattaaagattagaaaacacgatatttaaaaaagcctacctatataaacgtaggtagttgtggtttgattaaagattagaaaacacgatattgtttcgctcgctttcagtcgctacactactgttgtggtttgattaaagattagaaaacacgatattaataacaatactagatacagttcttataagttgtggtttgattaaagattagaaaacacgatattttacgtctttatgcttatctatattgctaagttgtggtttgattaaagattagaaaacacgatattggtaatcttattaaaggtcgtgacgacttagttgtggtttgattaaagattagaaaacacgatatttttcattgttgtttttaaatgctggttacgttgtggtttgattaaagattagaaaacacgatattactaacaaaaaaagtaactttaactatatagttgtggtttgattaaagattagaaaacacgatattggcaatttctgtcgcgttgaacaaagcttagttgtggtttgattaaagattagaaaacacgatatttagataaatcaagagggtttaatattgatagttgtggtttgattaaagattagaaaacacgatattttacagaaattattgatgtaccaattgcagttgtggtttgattaaagattagaaaacacgatatttgtacagaataaatctgtcacttagttcttgttgtggtttgattaaagattagaaaacacgatattcctttcttgtctgtagtaacgtgtactatgttgtggtttgattaaagattagaaaacacgatatttacttacatctctttgtttggatggtttaagttgtggtttgattaaagattagaaaacacgatattaacttaatagaaaaagaactcaagctcagagttgtggtttgattaaagattagaaaacacgatattccaccgtctacactttctcctaatctccaagttgtggtttgattaaagattagaaaacacgatattagaaatgatggagataataatggagagtatgttgtggtttgattaaagattagaaaacacgatattggaaactacttattaatgagtggtgcatggttgtggtttgattaaagattagaaaacacgatattaagttttcttacttcgtttacatcatcaggttgtggtttgattaaagattagaaaacacgatatttcaaaaagaaatacaaagctaataggcaaagttgtggtttgattaaagattagaaaacacgatatttttataacctcttttttctaatacttcactgttgtggtttgattaaagattagaaaacacgatatttttttctccagatcgcataacatcgaaagggttgtggtttgattaaagattagaaaacacgatattttaggtgagttaggtttaggttctttatcagttgtggtttgattaaagattagaaaacacgatattagaagcacggaacaaagcattaactataccgttgtggtttgattaaagattagaaaacacgatattgtttcccaacaacgaactatactattaatggttgtggtttgattaaagattagaaaacacgatatttttagtctctttagtagatttaagaaaacagttgtggtttgattaaagattagaaaacacgatattaattttatatcacttacttacttggataacgttgtggtttgattaaagattagaaaacaagatattaaggtggatgctataaacacgtctgtaaagttgtggtttgattaaagattagaaaacacgatattcccattatgtcgtttcgcattccgtcaatagttgtggtttgattaaagattagaaaacacgatattgtaaaacacaaacacatgtacacagaagcagttgtggtttgattaaagattagaaaacacgatattaatcattgcaatctaaactcttgtctttaggttgtggtttgattaaagattagaaaacacgatattcattgctaaaagaaatgtagccaaagccaagttgtggtttgattaaagattagaaaacacgatattaccttttgtccgtatcaatagaaagtatatgttgtggtttgattaaagattagaaaacacgatattcgacaacacgtaaataagcagtgtaagcaagttgtggtttgattaaagattagaaaacacgatattttttagttgttatttcttttacaaatctacgttgtggtttgattaaagattagaaaacacgatattaataatgtattttaagcctaatgtaataacgttgtggtttgattaaagattagaaaacacgatatttaaactcttacagcgaagagagaaaacaaagttgtggtttgattaaagattagaaaacacgatattttgcttagatttttcaaatgcgttttctaagttgtggtttgattaaagattagaaaacacgatatttaatagtcaagatattactaagaatacttcgttgtggtttgattaaagattagaaaacacgatatttagaattagatattaaagaatctaatgatcgttgtggtttgattaaagattagaaaacacgatattgctactgttcttatataccaaggatggtaggttgtggtttgattaaagattagaaaacacgatattctgcatctacgtaataagaccatgggtgtgttgtggtttgattaaagattagaaaacacgatattgaaaaagatttccattgagaaacggcaaaagttgtggtttgattaaagattagaaaacacgatattttagttacagaagtgtctaacctatctgcagttgtggtttgattaaagattagaaaacacgatatttacaaaggaataagaatatagtagctaagagttgtggtttgattaaagattagaaaacacgatattctccacctattgcgccaattactaacaagggttgtggtttgattaaagattagaaaacacgatatttagagcagcaagcaaacacatacgggcgtggttgtggtttgattaaagattagaaaacacgatattgtctttaaattatttttaaacggagcagaagttgtggtttgattaaagattagaaaacacgatattataaccacgtaaagcaggaagcacagtgtcgttgtggtttgattaaagattagaaaacacgatattagttggcttgttaccttctgttattcagtaaattaaatataaatatcgtttaaaaaaatgcttcttttttgcagtgataaggcaagattgttgcatttttttgtttttaaaatagttctaattgtgttggttgtggtgtttttggcgcttcagctcttccccaaaaattcataatatttccaaattgtttatctgtaatacgtaaaatactcactttgcccaaaggcggtaataatgcttttatacgtttttcgtgtgcatcggcactttcgctactagcgcaatggcgcatatatacagagtattgcatcatattaaacccatctttaagtaggttttttctaaagccagcagcattttttctgtctttagctgtgtctgttggtaaatcgaagaaaacaaataaccacataattctataaccgtttaattccataattttggatacttaatttttttgcgttctccagtgtagcattgctgtaaagagcttgcggttttttgcaaaccaagcataagtatggttttttcggttttaaaatatactgttctggtaagtatttgtagtaatatggattttgtttctgttgttaattcttgctcgtcataattttccattatactataaacggcttcatctacaattggtctgtaaggttccataatatcatctgctaaagcaaatgcattgtatttatttttatggtgtatgcctaaagtatttaatagcccgcttccagaaagagctcttgcagttgctgcacgtaaaatggcgtatccataatttaaaaaattatttggatagttaccaaaacgctctcttttaaaatctagactaaaaaaagacttccaataaaaattagcagcaacaccttccatatttgttgtgtctccacttttaactttgcttgctaaatacttaaaagtgttttcttttcctgtaattgtatttaataaaaatccttgatttttaattttttctttaaccgtttgttcccataatttttttttgagaggtaagctggcatctatttgttttttaaatagttgttgttgtatgtggtggccattaaggtttaataacatgccattaggtaagtgtttttcattacaaaaaataatagctacattgttttgggttaagcaatttattgcaggaatactaatgtaaatttcggcatgatctaatactaaaaagcctatgtcttcaataggtatggtagcttttcttacctcattttctatatgtagttgtaataattttaattgtattttactttttcgctctacaagaattgtctttttcatgttggttgttttggttaacaaaagttaaggctatttttttaagtaaaataaaatgaaagtagtcgcttttttttgcatctttttaaaacattctgcgtctattatataaacttaaaattagatatcatgaaaaataaagaatgtacttgcaactgcaaaggttgctctaaaggaaactgtgctaattgtacatgttctaactgtaattgttaaaataaaagtgggtttaaaggaatatgcttttaaaccgactaatttaaaactatgactacacaacatgtttggcaaagttattctcaagacttaaaacactttattttaagtaaagtaaaagatccagcaattacggatgatattttgcaggatacttttattaaaattcatacaaaattagaaacgcttaaagatgaatctaaagtgaaagcttgggttttctctattgctagatattcggttttagattattttaagtctacaaatttaacttttgagattgctaattcttaaactgaaacatttatagaggagtctgtacatacagaaaaagaatgcttgtatggtattataaagcgcttgcctaaaaagtatagagatccattatttcttttcggatattaaaggtttaaaacaagctgaagttgcaaaccaattacacgttagtttaccaacggtaaaatcgcaaattcaacgtgcaagaaagatggtggcacaaggttttaaagactgttgtggttttgtagaaaacgataaaggagtgttaataggtgaaatacaggagaaaaaagactgtaagatttgtaattaatagttggctaaatgttttttaatcacgacaaaaagggttatatttgtgtaaaatgtcgcaattatgaaacaatataaacaagacaacagtattcaaaatttagcaaacgagccagaagcattctacggcttagataacaaatacgatagaattataagtgttttaggaggtagtacaagtatttctcaagatataagtagcgatttcgatcttattcaaattacaagaaaagggttgccaaaatcggctgttttaacgttaagtaaattgttaggggtttctatggagcgcatgagtgatttaattcatatttcgcatcgtaccatacaacgcaaaaacgatagcgatttattaaatgtatacagtacagagcaaattttagagattgcgcaagtggtttctagaggtatcgaagttttaggaacgttagataattttacatcttggctacatagcgatattcgcgttttaaattataacaagcctattagtttactagatactagttttggtactgctttaattttagatgttttaggtcgtatagaatttggtgtttactcttaatacatgcgcgtatttagaatagcaaaaaagcaatatttagaagatttatctggagaaggttctcgattgtttggaggacgatggaataaaaaaggcatggctatgctttatttttcggatagtctatctaccagtcttcttgaagttttagtgcatttagattttaagcatcttactaatgattttggttacattgaaatagagattcctgatgcgttaattgatactaaattaaaattaaaagatctaaacgatgattggagagataatccaccaagaaatagcactgtaaatttagggtcagcatttttaaaagctaataaaaaattaggcttaaaagtgccatgtactattctgccaatggcaagcaatattttaataaacccaaggcataaagatatctctaaaataaaagtgattaaagtcgaagatttagatatagatagtcgtctggttgtggatgggaagctttaaaagttaaaagagaaattattccaattgtaaaaaagaacatttccattttgtgaatttttaattaaatttaatctattcgccaaggcggatttttcctgttatcatcagccttaaacaatataatgctattaccatctggatcttgcaatttagcttgtctccaaagccaagattcatccttaggtaattgattaagtgttattcatttttttcttaagctcttgaactaaaatatctagatttttatcttcaaaatataatgttgtattgttgttcgatggtgtttcagaaaaataaatagataacgttgcctcaccatctggacattctagtctagcgtaacgaggcaatgcatctactattaattttaagcctaattttttataaaaaggaactaatgcgcttgtattatttgtagctattgcgatttggtttaagtttattttatgctgcttttttcttcatatataattttaaaataaataataaaagcacgcataaacccgacagagctgtcattattgtccatgtattgttaaaaccaatacctgatattgtttgcaatcctgcattaaaaccaaaaacgctagccacagaaaaagacataatatacatggccatatattcgccttgatttcctttcttggcttgttccattgcaaaagaatttgaaaacggaaatgcaatcatttctccaatagtcattaataacattccaattattataacgccagaccaagttgtaaggtttaatacaagaaaacttaagcctactaaaaaggctccaaataatattaatccaattttgttataactacttttttcgagccagcttattaaaggcatttcaaatagaaatataaaaaaaccattagctcctaataataaaccaatttcaattttgtctaataagtgcacatctctataatacaatggcattgcagaaaagtattggaaaaatattacagcaaaaattaacatagcaaaaaagaaaatcataaacgctttattactgtacacagattttggattttctacttctattttatcttgcactactgtttttttagggtttaatactttaaatagaacaaatgttgctaaaatacatgtaatgccatctgcccaaaataaaccagaataacccataatggtaattattattccacctaaagcaggaccagccgaaaatccaagatttattgctaaacgtattaatgttacacttcttgttttgttttcgggtttactatacgcactcattgctacaaacattgcaggcctaaaagtgtctgcaactatcattagaaaaaagatgccaaagcaaaaggattcaaatgtttttaaatattgaacagcaataaaaataagaccagtaaggaataagctacctaccataactttataaaaaccaatagagtctgttagttttccaccaatccatgttccaattacagagcctaaaccaaaacacgtcattatccaaccaacattttctaaagatagatttaagtcttctgttaaataaattgataaaaacggaattaccattgttcctgcacgattaataaaagtaattagtgcaagccaccaaacttcttgagagaggcctttaaatgtttcgaaatagttgttaaataattttttcatggtttggttggttttttgtttatttcatttactaaaagtttaattcgtaatagtcttaaattaaaaaagtccaactacgaagttggacttttaatattgtattaatcgatatttatatcattacaaaatatagcaagcccaatctgtatctctacaagaggtttgttttctataatatgtaatgactaaattcattttatttatcttttcaaagtataaaattaaacaaaaaaagtaataagttgtacttttggaatgaaataaatatattctttatgaagaaaatagttttaatctttagtgtttttcttttgcttttttcttgcggaagtgcgtcgtttcaaggtttttacaataaccataaaacagatttaggagctacttcttttcaagtgccaaatgttatgaaagcacttttaagttcggtttcaccagaaacaaaaagtgtaattggtaatcttcaagatgtaaaatacataaagcttaatagtgtttcttcttttagaagacaacaaataataacagaaataaatgcggttacaagtgcaggatatttagatatgtttagagataaccaggttaataacacgcgtattatttcggttaaagaaaatggtaatgtactaacagatgttattctttttaattgcgacgaaaaagaagcaactgcattttatttacaaggtcgttttgatccagataagattaaaacactgtctgaagtgaaaaattttgatgccttatctttagatttattacaatcttataaatcgaatatgagtcctagtttaaacccatctttcaacccaaataattaaaaatttactcttaaattatattatgaaaaaaatcatattactttcaattttattcgtttcagcattaagctgcgcacaagataaacaaccgcttttaggagatacagaacaccaaaaagaacaaaatgctgaatttaaagatgccttaaaatcacctttaactgaaaa

SEQ ID NO: 4151 - DNA, 24302 bp, synthetic construct
  misc_feature 1..24302: note = Synthetic
  source 1..24302: mol_type = other DNA
  variation 14435..17648: note = note, n is a, c, g, or t
accacttattaaagaacaaaaaacaggtgctttgtttgcttatagagaaggtgagattgattacacagcatttacacaacttataaaagaagctattcaatcggaactggaagcacaaacagcgttagcaaactatttagaaagtacatttcaattacaatattttaatcaataagaaaatgaaaaatagattatataaatttttagccataataatgttatccatttttgtttctgcttgcggaaataaagaaagccacaaagaagacaatggcaattctcataacgaagaacaaaaaactgaagaaaaagataaccataacgaaggcgaagaagtgatgctttcgcaacaacagtttgaagccttaaaaatgaaaatagacactattgcctcacgcaatatgagtggctatgtggaagccaatgggactttagaagtaccaccacaaaacgaagctgccataacatcagtaattggagctaatgtagtttctattgaagtgattgaaggtgacaaagtgaataaaggtcaagtagtggcatatctttcacatccaaatattattcaaatgcaaaccaattatttaaatgcgtatagtgatagtaattttttaaagaagaattatgagcgtcaacaaaaattgtacgatgcaggtgtaggatctggtgcaaatcaccaaaaagctgaagcagaatatgaagcctcaatggcaatggttaagggtttggaagctcaattgagattattaaacattaattcgtcatcagttcaaaatggaacaattgctcaaagtatatcattacgcagtcctattgaaggctatgtgcaaaaggtagaagtaaaaacaggacagtatgttgaacctcaaaccgaactttttgaaatagtaaatacacatcacgttcacgctgatttaatggtgtttgaaaaagatgtgtataaagttaagaaaggtcaaaaagtaacctttaatgtacaaacaatgcaagatgaagaattaacagcagaaatttattcggtaagtaaaactttcgaagataatcctaaagcggtgcacgtacacgcagaaattgagaataaaaaaggcattcttattcctggaatgtatattcaagggaaaatccaaactgaaaatacgaaaactatggcgttgcccgaaagtgccatagtaaaagaaggcgatagatttttcgtgttttcggcagaaaaagaaaatgaagattggagttttaaacctattgaagtgcttttaggagcaaaagatggcaattggatagctattcaattttctgaagatataaaaccaaatacaacatttgcttataataatgcctattatcttatagcagaaatgaaaaaaggcgaagcagaacacgaacattaattatgcaaacaatagaacaattattagagtcaaaagatattcgagttacggcaatgcgtttattaatttataagtttcttgcagaaaaggaagtagcagtaacattaagtgatattgaaaatgcttttgataaagcagatagaacgacattgtatagaacagtaaaaacatttgaggaaaaagcaatagtgcatcaaatagatgatggcacaggaatcactaaatatgcgttgtgtgaaaacggctgtaattgcgagattgaaaccgatttgcatttgcattttcattgcaataactgtaatgaaaccatttgcttaacagatcataaaattccccaaattaaagtgccagaagggttcgtttcagaaaatgtaaacttggtagtaaaaggtatttgtgataaatgtagtgggcaataattgcacttccattgcacgcattggtattatatttttacaataaaaagagataataatgaaactgaattataaaataccaaagtatttaaaagatgcttataataaagaacttggtttatatgaagttgctttagctaaaagtgattttactaatgcgtggtatcatttagaaagaagccacattataggtcaatcttatcctattgagcatacctattcacattggttaatgctaaagtttggcttaatgcaaaaaaacaccaaagaagtatttggacaaataataagattaattgttggaggttggaaatcgttcattaatcacgtgccaatcggcaatacaggaggtgcaaatgtaccaccattaaaacgtatgcctatacctaatgatattaaaaatttattcaattcaaaatgaaaaaaaagaaagtcaaattaagagatttaaaaccaaattcagaagagcaacatagtcacgatgatggtcacaataatagtggcaactcaagtaaaattaaagcctacataccagctatcataagttttacaatgctaattataggtattgggttagactattttgatgttaccgttttcaaggattggattcgcattatttggtatggtattgcttatttgccagttggacttcctgttgtaaaggaaggttgggaaagtattaaaaaaggcgatgtgtttacagagttctttttaatgtccattgcaacaattggcgcattcatcattggcgaatatcctgaaggtgttgcagtaatgttgttttacgcagttggggaattattccaaaatgcagcagttaacagagcaaaaggaaatataaaagccttacttgatgtaagaccaaatgaagctctggtatatcgcaacaatgattatgtgtctgtaagtccagaaacggttgaaattggtgaaaaagtgcaagtacgtgtgggagaaaaaatccctttagatggtattctactttccgacaaaggttcatttaatacagctgcattaacaggcgaaagtaaacctgatactattgcaaaaggcgaaaaagtatttgctggaagtatcaatatggatggagtaattgaaattgaaaccaccaaagaatttaaagatagttccattgctcggattttagatatggtacagaacgcaacagctcgcaaatctaaaacagaattattcatcagacaatttgctcgtatttacacaccaatagttgtgtttttagcaataggtgttacgtttctaccatacttttttgtagatgattatgtttttagagattggttatacagagccttaattttcttggtgatttcttgtccttgtgcgttggtaatatccattccgttgggttatttcggaggattgggagcagcttcaaaaaacggaattttatttaaaggagcttcctttttagatgcaatgaccaagataaacacgttggtgatggataaaacaggaacggttactaaaggtgttttcaaaataaaagaaatcaaagcaattggttgggatgaaaaagagtttatgcagtacttgatggctatggaagaacaatccacacatcctatcgcaaaagccattttagaatataaagcagaaggcgaagattatggggcttctgaagtatctgaaatagcaggaaaagggttaaaaggtattgtaaatggtaagactgttttagttggtaataaagccctaatgacagcaaataatattaaagttttagaggaaacagaaactatcgttgaatctatagtattagtatctatagccaatacatttgcaggttatgttgttattgcagatgaattaaaagaagatgcaaaagaaacaattacagccttacataaagttggtattaataatataatgatgctttctggagataaggattccattacccaacaagtagcaagagaattaaatattgaaaaggctaaaggtggtttgttaccagaagataaattaaatgaagttgagcttttaaaacaaaatcctgaaaataaaattgcttttataggtgatggtattaatgacgcaccagttttagcagcaagtgatgtaggaatagcaatgggtggtttaggaagtgatgtcgctattgaaacagcagatgttatcattcaaacagaccaaccttcaaaagtggtaaaggcgattaaaattagtcgttccactcgcaaaattgtatggcaaaacatcattttagcatttggagtaaaagtaattgtattgattttaggtgcaggtggtttagcaacaatgtgggaagctgtatttgcagatgtaggtgtagcattattagcaatattaaatgcagttagattacaacggatgaattggaattaggtaattaaaatagaattagtaatgacatcataatccgtgagcaggtaataaggtgttcgtcagttgttccatttagttccataaaacatatctgcaagccagtttgtttatttatcgttattacgtagtaatcgaagcaatctcataattaaaaaactctcaagttgtaagggcttgcatataccataaatagtaccactgcggcgacacgtcctcgttggtactttttatttgttttatttcacacattactcgccttcctcacccgtagctacttttgccccttaaaatcccaataaggttagcacgttgtgctgttagaaattattaaggggcaaccgctacttaatgttatgcgagcctgcgggtcgcttcgggcaaaacccacatataatttcgcttcaattgattattttgtgaattaattgaaattacacaatcttataacatttgatttaataaagtatgtgggtctacgggtgtcacattttttgaatgttccaagtttgcaaataagataaccgcagtaatattaaatatatgtgagtattgcattttaaatcttgatttttcagaaaacttaaacttcaatgaatactgcggattatcctatttcgcaagcagtacacaagagcaactcattcagtcagcaattacatccaccacacaatagtttctacattacggtttgccttcagataaattcaattcctaacttccttcaaatacggcatttccttaacttcattacttcgtatcaaatacggcaaaccttaaatgaaaactattcccataccttccattgcttccttcaatccttgcacttgcctaaacagtaatattttgaactacgaataaaaacccttctgatataatataagaatcaaaaaatccgccacccttgcggtaaaccgttgctgtggtacgcacttatgcaaaaaaaatgcaacgtgctattaccacaacacccttgctcatctcgcagccggctcgcgccttttagattacctgctcgaaagaataaatagtaactttgtagaatgattgatgatttaaaaaaactatatctgcgttttaattatactgatgaaaatggtttcatttttaatgcaccaatattaaaagaaggagaacatttatcaataggctttgataataaaaggaaagaatttaatattcattttacgaatgataacattaatgaatcaggagctaaacgaagggattttattttcgttatttcagcatttagatttttcctattcctaaaacgatttgacgctttctataaccaaagcattttaaatttaataattgaatcaaaaaccaatcttggtaaattaaagaagcacaaatttattttaaatacgattactacatctgaagaagcagaggataagttgattcacaaaaaaaagaatggtcgctattggaagtttaggaaaaacttggatttagactttattgcagaaaatttcaaatatattgatgaggtagctttatcaaataatagtttctatttagcttataaattgaagaacaataatttagccttacaaggcatcctttataaatttgaacatttgaatagcctttatttcattccaattaaaaaatataatcgttttacaaagcatatggcaattgcaatgtataattactttaatgcctatccaaccgaagaaactttaccattcagacaattaatgtacgaacgccttaaacatccatatttagataaggaagaagcaaaaaggttgcaaagttagatgccttcctacatccaccgctatcatactataaagttcaagccctacgggttttgaaaaaaattttgcacctgtattttggcatatcctgctgtagtcattttgtatagcaatattttttccaaaaaacttgacagtatgtccacgccatcaattgaattgctttcttttttctctttttctttgtaaaaaaaatattgttttttttatttctgatgcaaaaagaagcaatctaaagcaacaaaatccatattgaaagaatagcataaaacttgccatatatttcagcggaaggtacagcttcgtgttaagtccgtaccaagtccgaagaaaagtaagtttcatttaaatcatttatgttatgggtaaaattgctcaaggtattttaggagggctttcaggtaaggttggaaacattatcggtggaagctggaaaggaattgactacattagaattaaaccttcaagtgtagcgaatccaagaactgtaggtcaggtaaaccaaagaaataagtttacagtgactttagaatttattcaagctgttaaacctttcatccagaaaggatataagtttttagcagtgaagaaaacagcattcaatgctgcaatgtcgtatgtgttaaataatgctattggtggagttgagccaaacttcaatgtagattatgctaacgctttggtaagtagaggaggtttatcgactgctttaaaccctactactgatcttacaactgcgggagaagtaacttttaactgggatgataactctgctgaaggtaatgcaaacgctaccgataaagcaatgttattggtttacaatccatcaaagaaagaatctatttctttaactgatggaacagacagaacagtaggaactcaaattgttgctatcccaacaacctacgcaggagatacagtggagctatttatggcatttatcactgctgatggtagtcaagtatcaaacagtacttatttaggctctggaacagctaattaatgcttggtgttttatgtatgaaaaccactctttatgagtggttttttttatgctatatttgtaattaacattattaatgtttgttgctaatcttctcttattttgtgttttttgtttcccatttgttgcccaaatgctacaacaccaatgaatatagggatagttaaatattgtattgggaagtaggtctggtaagcgttccatagtttttgaaatgtcatgtttgacagtttcagaggtgcaaaggcatttagatattcatgtacttgtttttagattgtttccacgtggcgcctactggtagctttatgttacttcttgttgtgatgcgtttcttttagtgctactattagccttactttacttctttctgttatgttttgtgtatttgccgtactattttcccgtatatggtggctatctagattactataaccttgctttaatcattttataatcatgttataaccacgctataactattcatttttattttgtaatttagctttcatatgattggttgttagtggattatgtgtgttatgggtgattctgattgttgtgattggaactgtgtgattcattttaaaatttcatgttatggcaaagcaaaaaggtgttattccattggttgggacgattggtgggattaatttttattatttgaatgggaagcctgtagcacgcgttgctggtggtggttttaatggtgaggctattaaaactaaaataagtatggagcgtgtgcgggaaaatgcgagtgaatttggagattgttctcatgtgaataaggtatttaggcaggcgttacgaccgttttataccaaccataggtttacattttttcatagtagattgatgagcatgtttaccgatttgaaaaaattggatactgatagtgcacgtggttcgcgtcaggtttataaaggacttctaactgatgcaggaaaacgcttgttgcaggattttacgtatacgccagattgcaaaccacagttggttttgccttttagttatggtatggattggccaacgtatacgcttagcattcctcaatttaatatagagcatgttcagtttataacgggttctacccatattgccttgcagtttggggttttggattttaattttgagactttagattctgccttgcatttggctgcgcctctggttttggccaaggattttgcgggtacttttttaggttttactcctgtgacggctccaactggattgggtttgcagttggctgttatgggtgtgcggtactatcaagaagttgatgggttgatgtatgtgctaaatgctgagaatggtgttgggataggagtttttggtgttgactagtgaaaggtgactagtgactagtgaaaagtgagaagtggaaagtgaataatgaaaagtgaagcgtgaaacgtttaaagtggctcatgctgttgtttgttgttgtgttggattgaaactttgaattttgttttttggcggtatagggttttatttttttctcgcgaaggcaggaaggcgcgaggttgaaaaggttttgggtacaggtattttattatgaatatttagttattattctggtattccgtaaggctattgtttataaatgttggatttttagattttttggttttctagcaaaggcggagaggtggaaagttgcattgctgttaatttgttttctgcctagcggcagacagggttgtggagttgtttaactgtaaagctataaagttatttttaagtaaactggattccttggtttttaggttgtgttatttttgtatttatttcatagctattataattttaaaaaaaactgctgatttattgtgaattaaagttgttagacttctatttaattttaaattagcatcgaatttttaaccctaaaaaacctacttatgaaaaaaattacttttttatcagctttattgtgcgtaacatttagctatgcgcaatcgtttacggaaaattttgatgtggatacgggcgttaccacaacgctaactaaaacgcttcagggtgtgtcttttacctttacctttacaagtgatggagatggcggcgattttgcttgggaaaatgtttatggccttggtaattcagcgtccattaatgtgttatcaggtgctgaaaattttggcactactgaaaaagtgaccattaaaagaacggatggtaacgagtttacctttagcagtatttttattaatagcacagatgcggctacagtatttgttggaggatatgtggctgatgttttagttggaagtacgcaaacggttgcaacaggaattgaagcgaccttaacgtttggtgatattcaggtggatgaagtccggttgacatcaactgatttttacaatattaatatagatgcttttacgggtaatttaaacaccttaagtcttgatagctatgcccttgccgaaaacaaggtgtttattagtccgaatccagtaaataatcagctgcaggtttctggattgccaagtgctgaacagtatgttatttacaattctttagggcaagtggtgcaacgcggcggttttattaatgtccaaagcattttggtggaaaccttgcaaactggagtttattttttacaggctgataacaaccaagcgatccgttttattaagctgtaatagctgtatgcgattttatatttatgcccagccaatttatttggttgggtttttttttgttggatttttagattttttggttttctagcaaaggcggagaggtggaaagttgcattgctgttaatttgttttctgcctagcgacagatagagttgtagcgtttttttatttgttgaataccttaaaaattagggttttaggagtgaaaaaaaagtcctacagagtatgcaggactaaagattttcatctacggcatatagccttattgtgataagattaaagattagaaattttaatcagtttcaaatatactgaaaacatttttaatttgcaatgtggaaacccgtaacattaattaaaggcaatttgtatcttgagtgctgatttaatttaagatattatgagtaggatattaggtttggatttgggaactaactcgattggttgggcagttgtagaaaaagacaagaatgagaaagagtttacgctaattgataaaggtgtaagaatattctctgagggtgtaaatattgaagccaaaacaagtagcgaaagctccaaagcatcgcaacgaacaggctacagaagtagcagaaagctaaaatacaggagaaaattaagaaagttagaacttctaaaaattttatcagataataatttgtgtccaaaattatcagacgaagaattaaagttgtggcgttataaaaaaatatatcctaacaatgataagtttagattgtggttaagtacagataatcaagacaatgagctagaacgaaaacagcaaatcaaaaacccttatgcttttcgttttaaagcttcaacccaaaagttagatttaaataatttaaatgatagaaacgagttaggaagagccttttatcacatagcacaacgacgaggttttttaagcaatagattagatacatcagacaattcaattattgaagagaaaaacagtgaaattgaggatataattcagcaatgcaacacgccagaagaattgcttaaaatctataacgaatttctagaatcttatgataaaacagatactaacagtaaagcgttatttactttaaatagagcgtttaaatccataataaaagaaaatgcagacgaagcgtttgatgatattcaggaaaaactttccgaacgacttaatagaaaagagtttttaggtaaagttaaaagtgccattagtgatttgtcctctaaaatagaagaagccaattgcaatacacttggggaatatttctatggattacataaggaagggcaacgaattagaaataattacacgcaccgtgaagaacattatttacatgagtttcatgcaatttgtgaccaccaaaatttacccaatacgttaaaaaaagatattgaaaacgctatattttttcaaagaccgttaaaatcgcaaaaaggattggtagcaaagtgtccgttagaaaatgacaaagcatgcgtgccaaaatcccatccagattttgaactgtttagaatgtacagttttataaattccattaaaataaaacctgaaaacgaagataaattaagagttttaaatactgatgaaaaggcattgattgagcctcttttttacagaaaatccaaacctaattttgattttgaggaaatttcaaaaaagctaacacccaaaaatcttatctctggatattacaaagataaaaatgccaaaaactttgatgttttattcaattttggtaattataccaatgtttcaggttgcccaacgattgctaatttaagatatgtttttggtgaggattggaaatcgtatttagtcaaaaaatttaataagaagaataaagacaattccaataaaacagaatatcagattatagatgctatttggcatgtactttttagatttgataaaaccaaaaagctaaaacaatttgtaaaagattatttggattgtgatgaagaaactgcttcaaaattttcaaaagtaaaattgaaacaagattatggttcgttaagtttaaaagctattcgcaatattctaccatatttggaaaaaggcttgctttactcgcatgccgtgtttttagccaatatgaaacatgttttaccaaaagatatttggaacaatgaaacggacagaagcgttataaagaaggaggtgttttcaatcatagaaacttacaatacttataaaaattcggttgatattgttaatggaatcattaaaaatataaaagacaaacaagaatcttggaacgataaaaacacgtttgtagttgatgcttttaaaaaggatattgataaaaacattcaagattatttcggtttagaaacatggaactcgttttccgaagacaaaaaagaaactattttaaatgatagttttcagcgcttttcaaaacaaatggccttaaattctggacgaggcgaattcctgaaaaaggaaaccttggatgaacgtgtaaaagattttttacgagataactttaatgttagtgaatttcaattaaaaaaactttaccatccatccgctattgaggtttacgataaggcaaaacgtagcgataaagatggaaaactatatttaggcagtccattaatatcgtccgttaaaaacccaatggctatgcgttcacttcatcaattgcgcaaagtcattaatcaactcataaaagaagatgctatagatgaaaacactattgtgcgtatagaaatggcaagagaacttaaaagtgccaatgaaagggtagccatacgacaatggcaaaatgacttacagaataatagaaaagattatataggtgccataaaaaaactctacaaagaagtttgtgggttggaaattgacccttctgaagatgaaatcttaaaataccaactttggttagagcaaaacagaatctgtctttacacaggtaaaactattagcatttgcgattttattggagccaatccaaaatttgatattgagcataccattccaagaagcaaaagtttggacaattcgcaaactaataaaaccttatgctgctctatttataatagagatgtaaaaaagaataaaatacctgctgaatgtaataaccatgaagatattttaccaagaataaaacattggtatgccaaatataaaagtttagaagaccaaacaagagacattaccaaaaaagttaaagccgctgctactaaagaaaatagagatagttacattcaaaaaagagcaaaacttcgatttgaatatgtatactatcgcaataaatacaaaaccttcaccatgactgaaatcccgaaaggatttaaaaatagtcaatcggtagatattgggataatcagtaaatatggcaatttgtatcttaaatcgctattttcaaaagtatttcctgttaaaggaaaaacaacgtcgaatttaagggatatttggggcttggataaaaaggaaagagacaatcatgcacatcatgctaaagatgccgtggttgtggcatgctgctcaaaagatattaacgatgctttggtagaatattaccataattacgaagattttaaatattatggtaaaccaaagccatcctttaaacacagaattccatggaaaggctttaataaagatgttaaaaattttgatgataacacacttattagtcatcatacgctagatgttttgccgatacaaagtaaaaaagccattcgcaaacgtggcatcattcaaagaaacaaaaaaggcgagattaagtaccaaaagggcgatactgtaagaggtgccttgcataaagaaagtttttatggtgctattaaacgaaaagaaaaaaataaaaaaggagaagtagaagacgttataaagtatgtattgagaaaaccattggatagtttttcggacaccgatttaaaaaacattgttgatgatagaattaaggagattgttacaaacggaaggaaacaagagaaacaattaaaaaaagaaatagaaaccttaaaaaaacaaatcaacaaggtaaatgatgttgaagggcaaaagatggaagctcaaatagaagatatcactaataaaattgacaacgaactttatgtgttgcctaacaaaaacggaagtccaatacctataaaaaagattcgatattttgctaatgatgtaaaagcgcctttagaaataaaaaaacatcgtgatgtttcaaggcatgagcacaaacaatattactttgctaaaaatgatagcaattattgtatggcaatttatgaagggattaatgatgagggaaaggtaagcaggtcaaatttgttaattaataatttagaagctggcagttattttaaaaccagtaatacaaacaatcaactatatccaatagcaccagagaaggatgaaaataacaattctttaaagtatattttgaccaagggtaaaatggtacttgtttatgataaaatgcccaacgaactgttcgaaatggcggagtcccaattactagagcgtttatttcaaattacccagatggatgtagaagcttcttgtattaagcttttgcatcatactgaagcaagagaaaagaaaacactaactgaattcatgaatttaaaaacaggaatgaaaggcggtaaaaatattggagaacacaaaaaatttccatggataaaagtgggtgtcaatagttttgactgccttgtggaaggttatgattttataatcactccaacaggcaaactaaaatttatttagattaaaatagttctttgacatacatttttatcttaaacaaccaaaccccaacggaaaattgacggtttcaattttttgcaacgatttttcatttgtggtttgattaaagattagaaaacacgatattttccannnnnnnnnnnnnnnnnnnnnnnnnnnnnnnnnnnnnnnnnnnnnnnnnnnnnnnnnnnnnnnnnnnnnnnnnnnnnnnnnnnnnnnnnnnnnnnnnnnnnnnnnnnnnnnnnnnnnnnnnnnnnnnnnnnnnnnnnnnnnnnnnnnnnnnnnnnnnnnnnnnnnnnnnnnnnnnnnnnnnnnnnnnnnnnnnnnnnnnnnnnnnnnnnnnnnnnnnnnnnnnnnnnnnnnnnnnnnnnnnnnnnnnnnnnnnnnnnnnnnnnnnnnnnnnnnnnnnnnnnnnnnnnnnnnnnnnnnnnnnnnnnnnnnnnnnnnnnnnnnnnnnnnnnnnnnnnnnnnnnnnnnnnnnnnnnnnnnnnnnnnnnnnnnnnnnnnnnnnnnnnnnnnnnnnnnnnnnnnnnnnnnnnnnnnnnnnnnnnnnnnnnnnnnnnnnnnnnnnnnnnnnnnnnnnnnnnnnnnnnnnnnnnnnnnnnnnnnnnnnnnnnnnnnnnnnnnnnnnnnnnnnnnnnnnnnnnnnnnnnnnnnnnnnnnnnnnnnnnnnnnnnnnnnnnnnnnnnnnnnnnnnnnnnnnnnnnnnnnnnnnnnnnnnnnnnnnnnnnnnnnnnnnnnnnnnnnnnnnnnnnnnnnnnnnnnnnnnnnnnnnnnnnnnnnnnnnnnnnnnnnnnnnnnnnnnnnnnnnnnnnnnnnnnnnnnnnnnnnnnnnnnnnnnnnnnnnnnnnnnnnnnnnnnnnnnnnnnnnnnnnnnnnnnnnnnnnnnnnnnnnnnnnnnnnnnnnnnnnnnnnnnnnnnnnnnnnnnnnnnnnnnnnnnnnnnnnnnnnnnnnnnnnnnnnnnnnnnnnnnnnnnnnnnnnnnnnnnnnnnnnnnnnnnnnnnnnnnnnnnnnnnnnnnnnnnnnnnnnnnnnnnnnnnnnnnnnnnnnnnnnnnnnnnnnnnnnnnnnnnnnnnnnnnnnnnnnnnnnnnnnnnnnnnnnnnnnnnnnnnnnnnnnnnnnnnnnnnnnnnnnnnnnnnnnnnnnnnnnnnnnnnnnnnnnnnnnnnnnnnnnnnnnnnnnnnnnnnnnnnnnnnnnnnnnnnnnnnnnnnnnnnnnnnnnnnnnnnnnnnnnnnnnnnnnnnnnnnnnnnnnnnnnnnnnnnnnnnnnnnnnnnnnnnnnnnnnnnnnnnnnnnnnnnnnnnnnnnnnnnnnnnnnnnnnnnnnnnnnnnnnnnnnnnnnnnnnnnnnnnnnnnnnnnnnnnnnnnnnnnnnnnnnnnnnnnnnnnnnnnnnnnnnnnnnnnnnnnnnnnnnnnnnnnnnnnnnnnnnnnnnnnnnnnnnnnnnnnnnnnnnnnnnnnnnnnnnnnnnnnnnnnnnnnnnnnnnnnnnnnnnnnnnnnnnnnnnnnnnnnnnnnnnnnnnnnnnnnnnnnnnnnnnnnnnnnnnnnnnnnnnnnnnnnnnnnnnnnnnnnnnnnnnnnnnnnnnnnnnnnnnnnnnnnnnnnnnnnnnnnnnnnnnnnnnnnnnnnnnnnnnnnnnnnnnnnnnnnnnnnnnnnnnnnnnnnnnnnnnnnnnnnnnnnnnnnnnnnnnnnnnnnnnnnnnnnnnnnnnnnnnnnnnnnnnnnnnnnnnnnnnnnnnnnnnnnnnnnnnnnnnnnnnnnnnnnnnnnnnnnnnnnnnnnnnnnnnnnnnnnnnnnnnnnnnnnnnnnnnnnnnnnnnnnnnnnnnnnnnnnnnnnnnnnnnnnnnnnnnnnnnnnnnnnnnnnnnnnnnnnnnnnnnnnnnnnnnnnnnnnnnnnnnnnnnnnnnnnnnnnnnnnnnnnnnnnnnnnnnnnnnnnnnnnnnnnnnnnnnnnnnnnnnnnnnnnnnnnnnnnnnnnnnnnnnnnnnnnnnnnnnnnnnnnnnnnnnnnnnnnnnnnnnnnnnnnnnnnnnnnnnnnnnnnnnnnnnnnnnnnnnnnnnnnnnnnnnnnnnnnnnnnnnnnnnnnnnnnnnnnnnnnnnnnnnnnnnnnnnnnnnnnnnnnnnnnnnnnnnnnnnnnnnnnnnnnnnnnnnnnnnnnnnnnnnnnnnnnnnnnnnnnnnnnnnnnnnnnnnnnnnnnnnnnnnnnnnnnnnnnnnnnnnnnnnnnnnnnnnnnnnnnnnnnnnnnnnnnnnnnnnnnnnnnnnnnnnnnnnnnnnnnnnnnnnnnnnnnnnnnnnnnnnnnnnnnnnnnnnnnnnnnnnnnnnnnnnnnnnnnnnnnnnnnnnnnnnnnnnnnnnnnnnnnnnnnnnnnnnnnnnnnnnnnnnnnnnnnnnnnnnnnnnnnnnnnnnnnnnnnnnnnnnnnnnnnnnnnnnnnnnnnnnnnnnnnnnnnnnnnnnnnnnnnnnnnnnnnnnnnnnnnnnnnnnnnnnnnnnnnnnnnnnnnnnnnnnnnnnnnnnnnnnnnnnnnnnnnnnnnnnnnnnnnnnnnnnnnnnnnnnnnnnnnnnnnnnnnnnnnnnnnnnnnnnnnnnnnnnnnnnnnnnnnnnnnnnnnnnnnnnnnnnnnnnnnnnnnnnnnnnnnnnnnnnnnnnnnnnnnnnnnnnnnnnnnnnnnnnnnnnnnnnnnnnnnnnnnnnnnnnnnnnnnnnnnnnnnnnnnnnnnnnnnnnnnnnnnnnnnnnnnnnnnnnnnnnnnnnnnnnnnnnnnnnnnnnnnnnnnnnnnnnnnnnnnnnnnnnnnnnnnnnnnnnnnnnnnnnnnnnnnnnnnnnnnnnnnnnnnnnnnnnnnnnnnnnnnnnnnnnnnnnnnnnnnnnnnnnnnnnnnnnnnnnnnnnnnnnnnnnnnnnnnnnnnnnnnnnnnnnnnnnnnnnnnnnnnnnnnnnnnnnnnnnnnnnnnnnnnnnnnnnnnnnnnnnnnnnnnnnnnnnnnnnnnnnnnnnnnnnnnnnnnnnnnnnnnnnnnnnnnnnnnnnnnnnnnnnnnnnnnnnnnnnnnnnnnnnnnnnnnnnnnnnnnnnnnnnnnnnnnnnnnnnnnnnnnnnnnnnnnnnnnnnnnnnnnnnnnnnnnnnnnnnnnnnnnnnnnnnnnnnnnnnnnnnnnnnnnnnnnnnnnnnnnnnnnnnnnnnnnnnnnnnnnnnnnnnnnnnnnnnnnnnnnnnnnnnnnnnnnnnnnnnnnnnnnnnnnnnnnnnnnnnnnnnnnnnnnnnnnnnnnnnnnnnnnnnnnnnnnnnnnnnnnnnnnnnnnnnnnnnnnnnnnnnnnnnnnnnnnnnnnnnnnnnnnnnnnnnnnnnnnnnnnngtcaataaattaaagtgaaatatcgtttaaaaaaacgcttcttttttgcagtgatagggcaagattgaagcgtttttttgttttaaatctttatggaaaggaaaaagggagatttattaatgataccgagcaccctttttagtcagggccatcctcaaacggccaaccaaatttactacatatttttataaattaaaacaattccaattgtgttggagtaggttctttagggacttccgctctgccccaaaagttcatgatgttcccaaattgtttatcggtaatgcgcaaaacgcttacttttccaaaaggcggtaatagccgttttattcgcttttcatgtgcatctgcactttcactgcttgcgcaatgccgcatgtaaacggagtactgcatcatattaaaaccgtcttttagcaagtttttcctgaacccagcagcattacgtctgtccttggctgtgtcggttggtaaatcgaaaaatacaaataaccacataattctataaccgtttagttccataatttaggatactttattttctttcgttttcctgtataacactgttgtaaagaactggctgttttttggagtgccaccattagtggacttttttcatttttaaaatacactgttcttgtgagggtttgtaatagtaccgatttaatttctgtatttagttcttgttcatcatagtgttgcataatggtatgaactgcttcatcaattatgggacgaaacggttccataatgtcgtcggcaagagcaaaggcattgtacttatttttatgatggatgcctaatgtgtttaacaaaccacttcctgataatgctctagcgatggctgctcttagaattgcatatccatagtttaaaaaattgtttgggtaatctccaaaacgttcgcgtttaaaatcctgctcaaaaaatgatttccaataaaaactggctgcaacaccttccatgtttgtagagtcaccactagttactttacttgctaaaaattcaaagttgtttttggatttcgttatttgctttaatagcaatccttgatttataattttctctttaacggtttgttgccaaagttgtttttttaatggttgacttgcgtttatttgatttttgaatagttcttgttggatgtgatggctgtttaaatttagaaataaaccatttggtaagtgtgtttttccacatataattaccgcgctgttgttttctatgagtaaatttaaagcggtaatactaatatagacttctggattgtctattataagaaatccaatatcttcaattggaatggatgcttcacgggtttcacttttaataagtagttgtagatttttgactgttatcttactttttttctcaatgagaattgatttttttagcatatgatttatgtaaatcttaatgagttgtttaactaaaatagtgatttaaaaataattactactttttgctttaaaccgggttaataataaaatcatattgtgaactggttttaaaggcttttagtagattcgagttgccactaaaagctttaaacttctcttaaacaaaacagtgtgttgtaaaattttcgtaacttcgcaattagtatgaagcaagtattccataaaataatgtctttagccatggcttttgtcgtgttatgctctacaatgtcatttactatgaatatgcattattgtggcgatactttagtagaaacagctattttccataaagccaaaggttgcggtatggacatggaaaaaccgtctaccgaaggatgttctatcaccaaaaagaattgttgtgatgatgaacaattagttgttgatggtcaagacgaactacaactgcaagttgacaaaattacgtttaagcaacaggtattcattgcttcatttgtttatacctatattaaccttttcgaaggtttagatagtaatgtttcttcttacgaagactacaaaccaccactcgttgtcaggcaaatcttcaagattgacgagacgtatttaatttgatttttaaattttagactgttttatcctatggctgtgtgtcataaggataaattgttgtattcggtgttttctcaacatcaatgtctaactgtttaataatcaaactatatgcttaataaagcaatcaaatttttaatagagaataaactcgttgcagttctgctacttgcactttttgttggatggggaactgtaaacgcacctttcaattggtatactggatttttaccaagtaatcctgtggctgttgatgccatcccagatatcggagaaaatcaacaaattgtatttacaaagtgggatggtcgttcgccacaagatatagaagaccaaatcacttatccattaacgacttctttactcggtattccaggcgtaaaaaccattcgtagttcgtctatgtttggcttttcaagtatctatatcatttttgaagaagatatagaattttactggagtaggagtcgtattcttgaaaaactaaactcattaccaagtggtttattacctgaaggtgttaatcctgctttgggtccagatgccacaggattaggacaaattttttggtacactcttgaaggacgtgatgaaaacggaaacgttactggtggttgggacttacaagagctacgtagtattcaagattactatgtgaaatatgcgctatcctctgcaagtggtgtatctgaagtggcttcaattggtggttacgtaaaggaatatcaagtagatgtaaaccctgaactaatgcgtcaatataatattggattaaaccaagttgtaaaggcagttaaagagagtaataaagatattggtgcacaaactttagagattaatcaggctgaatatttagtgcgtggtttaggttatgtgaaatctattgaagacatagaaaatgcagtcgttacttccgaaaattatacagccatacgaatcaaagatattggaaaagtctctttaggtccagcaacacgacgtgggttattagataaagaaggtgcggaagttgtaggtgctgttgttgtggctcgttatggtgcaaatccaatggaagtcattaataatgtaaaagaaaaaattaatgaattaagtgcaggattaccttcaaaagtattagcagatgggagaacatcacaagtaaccattgtacctttttatgatagaacggaattgattcaagaaactttaggcacacttaatgaagccttaacattagaaatactgattaccattttagttataatcattatggtatttaatctacgtgcttctgtgttaatctctggcttattgcctgttgcggttttaatggtttttatagctatgaagttctttggagtcgatgcaaacatcgtcgcattatctggtattgccattgctattggtacaatggttgatgtcggtgtcatactttcagaaaacattataaggcatttggatgaagatgatggaacacaatccattaatacagtagtttataatgcgacagcagaagtttcaggcgctattgttaccgcagtaatgacaaccataatcagtttcattcctgtatttactatgattggtgcagaaggaaaattatttagaccattagcctttacaaaaacctttgccttaacagcatccattattgtcgcgttatttttaatcccgccatttgcagcatttttattcagaaagaaaagcattaaaaccaaatttaaaactattttaaatggtgttttaatagctttaggtatcgtagcaatagtctatgggtattggttaggattgattttgatagcttttggaattacagcacttctcaatcttcaaaataaaataacagacaaacaagctaatcttgtcaatatcattatttcagcatctgcgatagtattccttttagcagaatattggagaccattaggtgttgataaaagcatcttctggaatctcatttttgttagtgttatatgttttggtttattaggtgttttctcattattcatcaaatattacacacgtattttaaggtggtgtttagataataagttattgtttctatctataccaacagctattgtaattgcagggtttttcataatgaagaatacaggaaaagagtttatgccatccttaaatgaaggctcatttctactaatgccaacctctatgcctcattctggcgtagaagaaaacaaacgagttttacagcaattagatatggcggtggccagtattccagaaattgaaacggtagttggtaaagcaggaagaacagaatcagcgttagacccagcacctctatctatgtatgagaatatcattcagtataagccagaatatatgctgaatgcagatggagaaagacaacgctacaaattaaatgaggatggtttgtttgaattaaaagatggtcgttttatttctaatcctaataattccaaaaatgttgcttatagcaaagtcaaaagctctcaactaattgaagatgacgatggtgaatactatcgcaattggcgaccagaaatcgaatcaccagacgatatttggaatgaaattgtaagagttaccaaattaccaggcgttacgtcagcaccaaaactacaacctattgaaacccgattggtaatgcttcaaacaggaatgcgagcacctatgggaataaaggtaaaaggtcaagacttaaagcaaattgaagcgtttggagtgcaattagaaaacattatcaaggaagccgaaggtgttaaaaaagaagctgtttttgcagaccgtatcgttggtaaaccctatttgttaattgatattgatagagagaaaatcgcacgatatggtatttcaatacaagatgttcaagatgtattaaaagtcgcagttggtggtatggttttaacacaaacggttgaaggtcgtgagcgctatggtgttcgtgtgcgatacccaagagaattaagagcaaacccatcagacttgcaacagatttatgtgccagttgaaaaaggcagtcctgtgcctttaagcgaattagcaaccattcgctacgaacaagggccacaagtcattaaaagtgaagacacctttttagtaggttatgtcctgtttgataaattagatggttttgcagaagtaagcgttgttgaaaatgcacaagcattgattcaagaaaagatagattctggtgagttaattgtgccaaaaggtatcaattatcaatttacaggaacttacgaaaaccaattacgtgccgaaaaaaccttatcggtagttgtaccattagcattggctatcatcttttttattctgtacttccaattccgttcggtgggtacatcattaatggtgtttacagggatagcagttgcttttgcaggtggttttttaatgatttggttgtacggacaatcatggtttttaaacttcagtgtctttggcgaaaatcttcgcgatttattccaaatgcatactattaatttgagtgttgctgtttgggtcggttttattgcacttttcggaattgcaaccgatgatggtgtcgtaatggcaacttatttaacacaaaccttcaatagaaattcacctgaaacaaaaaggaaattagagcgtccatagtagaagcaggagaaaaacgtatcagaccttgtttaatgactacagctacaaccattttagcattattaccagtattaacttctacaggacgaggaagtgatattatgattccgatggcaataccaagttttggtggaatgttaatcgctttaatcaccttatttgttgtaccagttttatatagctggaaagccgaagttcaacttaaaagagcatcaaaatgaaacatataaaaacagtcttttttcttttttcaattctcttttgtctcaaaggtaacgcccaacaattagaaattttaattaatgaagcgttggaaaacaatcccgagattcaaaaattcgagttacagtacaaaagagtttcagaaaaagtaaatgaagtcaatacgattcctaatactgaatttggcgtgggttacttcgtaagtgaaccagaaacccgaacaggagcgcaacgctttaaagtatcagcaaaacaaatgttaccgtggtttggcacaattacatcaagagaaagttatgtcagttcattagctgatgcaaaatatgaagacatcgttattgcaaagcgaaaattgatggcttctgtatcacaatcctattataatttatacgctaacaaagcgaaacaaagggtgctaacagaaaacattaaactattggaaacctatgagacattagcactaacatctgttgaggttggtaaagcatctgctgtagatgtgttgcgattgcaaatgcgtcaaaacgaaatgcaacaactaaaagatgttttaaatcaacaatttttagcagaacaaacgaatcttaataatcttttaaacagagaaaatgatattgctgttactgtggtagatagtttaattatgccttcagaagattttgaaatcacttctaaaaatttagcattacatcccgaattattgaagtatgaaaaactctaccaatccattgaacaatcagaattactaaatcaaaaagaaagcagtcctatgattggttttgggttggattatattaatgtttccgaaagaccagatatg

SEQ ID NO: 4152 - DNA, 18643 bp, synthetic construct
  source 1..18643: mol_type = other DNA
  variation 8790..10905: note = note, n is a, c, g, or t
  misc_feature 1..18643: note = Synthetic
gaatctgtgacatcaaaaactaaataactaatgtcaataccaaaatatttaatatctttattcataacaaattatttttttgaaaggacatactacgcgagtttcaacgacttaaaatcgagatctaaaagcctcacagaactgttcgaaatctgtgtagaaaagagaggggatttacaatgttgacgagatctgtagtctctccgtatatattaaccttattcctctcttttgtgctttctattttatatgtttaaattagtcttttttatttaaatgctaacttaagacgtataaaaaaaattgctattttaggcttaactaaaggttgttgcccatttgcttgcatctgattttccttcggaaaatcctcgcacacaaacacgcaacgttccttatacataaacgttgtgtgtaatctaaaaaatgaattttcctgaaataggttgactaaaaattaagcaattaattacagtcacttatgaaaacagaaaatgaacactggcgaaaaaaagctaccataaagtaactttagaaaccaaattattcgtcgttgaccaaatcttaaacggtcaagtatccacaaactttgcttctaaaaaatatgatgttcctagaacaactatttcttattggattagaaaatacagtaccttagtacaacaaaatacgggtatgagtaaaaacgatgaaattaaaaagttcaagaaaaagattgaagaacttgagttccaaaaagactttcaacaagacattattgctgatatggagcttattacaggcgtcgatatgtcaaaaaagtcgttacccaaaacattagcaaaagagatagaactaaaaaagaaaaaccgtttaaaagaatgtggttctatgggtgttttactcattgtttaatattattttttttaggaaatcgtgcatccgcttcactcaagtgggatatctaaacaagccttctataaaagactcagatctcaacagaaaaaagaaatagatcatcaaaaaatgattaaaatggttaaagactaccgtaaaaaagtaggctcaaaaactggtggaataaaactacactcagaacttaaacaagactttataaacgctgatattaagatagatagagataagttctatcgcttcttaagactcaataaccttttaattcctaaaacaaaaaattatattaccactacaaactctaatcatatgtacaagaaatataagaacctgatcaaagaccaagtccctactcgacctgaacagctctgggttagtgatatcacttatattaagacagaaaacggacacaactatctagcattagtcacagacgcttattctaaacaaattatgggatataaactcgataatcatatgagaacatcgctttgtacagaggcgctcgctatggccattaaaaacagaaaatatcctaatcaaaaaattattcaccattcagatagaggtttccaatactgcagccccaaatatacacagtttgctgaagataatggaattacaatgagtatgactgaacaatatgatccttaagaaaatgcaatagcagaacgcattaacagaactctcaaatacgaatacggtctaaaacaaaacattaaaaacactgaattagcacaaaaaatgacacaacaagcggtgtatatttataacaatttgagaacccattttagcctgaacctcagaaaacctgctgaagtccatctgaatccaaatatcaaatacaaatcctatcgaaaaaacaatgtaaatttacctgaacttacgatttaagaacagacctagtttaaacggttttttgccttctaaattgctaaaaaaatcttttgaacgtccaaataacaacaaaaaagagtcaatctatttcagtataatacacatcagactttacttttttaggtttaagctccacattatctcctttatgagtgaatgattcttttttagattttcgctgctctaacagctttgtattatcttcaaaaggattaaatccttcttttaaaagttttaataaggttttcctataaacagatagaaccctctagtcgttcttctttggttttataactgttagcttttccataaatcggtgttaatcgttttaattttccgctttcaggatttcgatatgaaaaataaacataccaacgtttttttaaatcacctttggccgtgtagatttttagttcggaaaagtttttgggttttgtcaaatcgtatgcactttcgtattcaatatcgtatgcaaatgtaataatttgttcactggtaagcataaaaaaacggtttagcaaaaactaaaccgttgtttttaatacatttaaacttagtagcgggaactggactcgaaccagtgaccttcgggttatgagccccgagacctccatttttggaaccattttactggggtttcgcgctgttattttgtagaatcgtgttcaaaaccatgttcaggtttatgttcacttgttgtacaattatttaagtgcaatttaaacaaaaaatgatataataaaaactatcccaaagaaaataaagctggatgcatttttagtaaacttccaatcaaaaaaggatataccttcgttttaataaatcaattgattactttattaaaatttgttgagaatagtttccaaaggttgatttcacaataaagtcatagctagtattattttctgtaaaattttctactttaagccatacttgattacgaatgataatttctaacacattattttttacagaccatgtccccaactcagtttctgacggaatatcttcacaaccattagttggctgtttttgctctaccgttccgtccgctagaaactcataataatatatcgattttggataatatctaaaataaatagtttcattatctatcactttggtaattgttgtccagcatcctgtttgtatatttgttacaaatccttgattatcccaacgcttccatgaaccaatagcccattgtggatgaataattgcgcactcctctattcctgtttctcctccaacacattcctcacaatcatcaaaatatgcagcaccacctaacactccattacaatcttcaacacatttatccttacccgtgttaccctcaacacaggtattacattcatcaataaaagcggaaccattttcaacgccattacaatctaaaactagataattaaatatttcatctaaatcatcatcactaatttctccttcagtaaatcgagttattaacgtgttaataaaatctttcgaagaattattgataaactgtttagcttcatttaatttacctgtaacttttgatagattatctaatatcttttttgtgttattactaattctgttagaaatagcgcctaacttttctgccgaatcattatataaatttgtactaccttcttttaatcctataacaattcctttccaaaaagcagttatgggatgagtatttgttggatccgaaagaaattcaccagtttcataaacctcctcttcaagttcatctgaagaatcattcaaagttgttttaacccctgcacttctgccagccacttcttttctctctaattcaaaacgatctttaattattatacttctattaattggattaatctcaattaattcaagcacatctgttttttcatccttgataataaatctgaacccttcactttcaataacgccgtttccatctttataatatacaattaaagtatcagccaacttattagattttactgtaaacaactcattactattgcttaaaaccttaattttagttacaacactgttattctgtgttttggttgatgtaaattctacttgtccatcattattctttatttgtaaagacaattcattctcaaaattttcattcgagtttaatttaaaggaaaaattattttcatttaaatcttctgttttaggagagttactatcctttgaacaattaataaaaaataaagaaaaagctaatacaagtaaaactttaatttttgatagggttctcatttttaaaatttctgattgataactggattaaaataagctatttgcatgatgattaaaaatcaaaaataaatttaattattaatatagccaatacttaattccggtatttaaacaaaaaaaaagtcctaccgaagcaggacttaagattttcatctacggcatatagccttattgtgataagattaaagattagaaattttaatcagttacaaatataatacaaaaaaattatattgttttacgggtacccgtaaatgtagtatttttctttttcttacttttaaaaaaataaagtattagataatggcaaaaattttagggttagacttaggaacgaattcaattggttgggcgatagtagaaaagtacaataatgaaaaagaatttactcttatagataaaggtgttaggatatttcctgaaggtgtaaatatcgaagctaaaacaagtagtgaaagttcaaaagctgcacagcgtacagattatagaagtggccgaaaacttaaatatagaagaaaattaagaaagttagagctattaaaggttttatctgataataatttatgccccaaattaaccgatgaggaactaaaactttggcgatacaaaaaaatatatcctgataatgatcaattcagattgtggttaagcaccgataatcaggacgaaaaattagaacgaaaagctcaaattaaaaatccttatgcgtttagatttaaggcttcgactcaaaaactagatttaaatagaataagtgataagcacgaattaggaagagctttttaccacatagcacagcgtcgtggttttttaagtaacaggttagactcctcagacaattctattgttgaagaaaaaaacaatgaaattgaagaaataattcaacacgcaaccactgttaatgattttttacaaacttatgacgattttttagatgcttatgataaaacagacgataatagcaaagcattatttactttaggaagagcctttaaatctattttaaaggagaatactacggaagaattacatgatgtaaaagaaaaattattagaacgtttaaaccgtaaagagtttttaggtaaagttaaaagcgcaattagtgatttatctgcgaaaattgaagaagccaattgtaatacattgggtgaatatttttatggtttacacaaagaaggaaaaagaattagaaacaattatacacatcgtgaagaacattacttgcatgaatttcatattatttgtgataaacaaaatgtatcatcaacattaaaaaaagctattgaaaatgcaatcttttttcaaagacctttaaagtctcaaaaaggattggttgcaaactgcccactagagaatgataaagcttgtatacccatatcacatcccgattatgagttatttagaatgtatagttttataaattctataaaaataaaaactgaaaaagacgataaattaaggtttatcaattctgaagaaaaagaacttataattcctcttttttatagaaaatctaagccaaattttgattttaaagagattgtaaaaaagctgacaccaaaagatttaaaatctggttattataaagataaaaatgtacaagattataatgtgttattcaattttgggaactatacaaatgttagtggttgtccaactattgctaatttaagatctgtttttggtgataattggaaaacttatttagttgaaaatttcaataaaaaaaataaagataattctaataaaacaccctatcaaataattgacaccatttggcacgtactctttagatttgataaaaccgaaaaactaaaacaatttgtaattaattatttaggttgtgatgctgataccgctaccaagttttcaaaaataaagttaaaacaagattatggatcactaagtttaaaagctatccgtaacattttaccatatttagaaaaaggtttgctctattctcatgctgtgtttttagcaaatttaaaaactgttttacctaaatctatatggaataatgaagctgatataaaagttataaataaagagttattttcaattatcgatagctataacatttataaaaacacagtcgatattgttaatggtttaataaaaacggtaaagaataacaaagaaacctggagtgataaaaacagttttgttgttgaggcttataaaaaggatattaataaaagtgttataagttattatggattaaaacgttgggatttatttttacatgaggaaaaagaaattattttaacggataactttaagcttttttctactcaaatgaaattaaaccctggtcgtggagaattcattaaaaaagaaacattggatgagcgtgtaaaagcatttttaagtgataattttaatgttgaaccagaacaactaaaaaaactttatcacccatctgcgattgaagtttataaacaagcaaagcgtagtgaaatagacggcaagttatatttaggaagcccgttaatttcatctattaaaaaccctatggcaatgagagcgcttcatcaattgcgtaaggttattaatcaattaataaaagacgatgctatagatgaaaacacaattgttagaatagaaatggctagagaacttaaaagcgccaatgaaaggacagcaataaggcaatggcagaatgatttgcaaaacagaaataacgattacaagaaagaaattatagcaatattaaaaggagagttacaagcagtcaattgtaatgatgttgtaaattctaattatgagcccacagaaaatgatattttaaaatatcaattatggaaagagcaaaatcatatttgtctatatacaggaaaaaccatttgtatatctgattttattggagcaaacccaaaattcgatattgaacacactataccaagaagtaaaagtttagataattctcaaataaataaaacgctttgttgttccgtttataatagagatattaaaaaaaataaaataccaaccgaatgtaataatcatgaggagatcatgccaagaataagccattggtatgctaaatataaaaatttagaaaatcaaattagagatattactaaaaaagttagaggagcaacaacaaaagaaaatagggataaatatattcaaaatagaaccaaattacgttttgaatataattacctaaagaataaatataaaacttttgctataactgaaatacctagaggatttaaaaacagtcaatctgtcgatattggtattattagcaagtatggaaacttgtttttaaaatcattgtttaccaaagtataccccgtaaaaggaaaaacaacgtctaatttaagagatatttggggcttaaataaaaaagaaagaattaaccatgcacatcatgcaaaagacgcagtagttgttgcgtgttgcgaaaaagatattaatgatgccttagcaagttattatcataattatgaagactatcagttttacggaaagtcaaaacctacctttaaacatagaataccatggaaaggcttcaataccgatgttaataattttgataacaatacgctaattagtcatcacacacccgatgtcttgcctatacaaagtaaaaaagcgattagaaaacgaggtattatacaaagaaatggtaatggtgatattaagtataaacaaggcgacaccgtgagaggcgctttgcataaagaaagcttttatggcgctataaaaagagaagaaaccaataaaaaaggagatattgaagaggtagtaaagtatgtattaagaaaacctatagatagtttttctgactcagatttaaaaaatattgttgatgatagaattaaagaaattgtaaccaatgcgcgtaaagaagaaaagataataaagaaagaaattgatactatcaaaaagcagattaataaagttagtaatgcagaagaagtaattttaaaagctaaaattgaaaagttaatatacaaaatggaacatgagctttatgttttgcctaacaaaaaaggaaaccccatacctataaaaaagattcgatactttactaaagatgtttcaaatccacttaaaataaaaaaacaaagagacacttcaaaacatgaacacaaacaacattattttgcaaagaatgacagtaattattgttttgcaatatatgaagggattaataataataaaaaacctttgaaggaatttagagttgtaaataattttgaagccggaaaatatttcactgcaaatgatactaattcaaaacaacctctagaattaaatattattgataaacacaaaaatattttaactctcaaatttttattaaaaacaggcactttagttatattttatgagaatgataaaaatgaaatttatgatttagaggattcagaattatctaaaaggctttataaaacagttgcaattgaatctgatggtagagtacaatttagacatcatactgtggccaaaccagacggagaattaaaaaaatcctcaagtgttaattttcaaatacctaatgaaaaactaagactttcgaaatctggcttaaatattatagtacaaggtgttgattttaacataaactcaacaggtaaaataaaaaaaatataaccatttataattgaaaactatactactatcctaatcagaatatgccttaccccctaaaaaggtttctattaccgaaataaataaaattgagttctttgacataggttattggtttgattaaagattagaaaacatgttattcatatnnnnnnnnnnnnnnnnnnnnnnnnnnnnnnnnnnnnnnnnnnnnnnnnnnnnnnnnnnnnnnnnnnnnnnnnnnnnnnnnnnnnnnnnnnnnnnnnnnnnnnnnnnnnnnnnnnnnnnnnnnnnnnnnnnnnnnnnnnnnnnnnnnnnnnnnnnnnnnnnnnnnnnnnnnnnnnnnnnnnnnnnnnnnnnnnnnnnnnnnnnnnnnnnnnnnnnnnnnnnnnnnnnnnnnnnnnnnnnnnnnnnnnnnnnnnnnnnnnnnnnnnnnnnnnnnnnnnnnnnnnnnnnnnnnnnnnnnnnnnnnnnnnnnnnnnnnnnnnnnnnnnnnnnnnnnnnnnnnnnnnnnnnnnnnnnnnnnnnnnnnnnnnnnnnnnnnnnnnnnnnnnnnnnnnnnnnnnnnnnnnnnnnnnnnnnnnnnnnnnnnnnnnnnnnnnnnnnnnnnnnnnnnnnnnnnnnnnnnnnnnnnnnnnnnnnnnnnnnnnnnnnnnnnnnnnnnnnnnnnnnnnnnnnnnnnnnnnnnnnnnnnnnnnnnnnnnnnnnnnnnnnnnnnnnnnnnnnnnnnnnnnnnnnnnnnnnnnnnnnnnnnnnnnnnnnnnnnnnnnnnnnnnnnnnnnnnnnnnnnnnnnnnnnnnnnnnnnnnnnnnnnnnnnnnnnnnnnnnnnnnnnnnnnnnnnnnnnnnnnnnnnnnnnnnnnnnnnnnnnnnnnnnnnnnnnnnnnnnnnnnnnnnnnnnnnnnnnnnnnnnnnnnnnnnnnnnnnnnnnnnnnnnnnnnnnnnnnnnnnnnnnnnnnnnnnnnnnnnnnnnnnnnnnnnnnnnnnnnnnnnnnnnnnnnnnnnnnnnnnnnnnnnnnnnnnnnnnnnnnnnnnnnnnnnnnnnnnnnnnnnnnnnnnnnnnnnnnnnnnnnnnnnnnnnnnnnnnnnnnnnnnnnnnnnnnnnnnnnnnnnnnnnnnnnnnnnnnnnnnnnnnnnnnnnnnnnnnnnnnnnnnnnnnnnnnnnnnnnnnnnnnnnnnnnnnnnnnnnnnnnnnnnnnnnnnnnnnnnnnnnnnnnnnnnnnnnnnnnnnnnnnnnnnnnnnnnnnnnnnnnnnnnnnnnnnnnnnnnnnnnnnnnnnnnnnnnnnnnnnnnnnnnnnnnnnnnnnnnnnnnnnnnnnnnnnnnnnnnnnnnnnnnnnnnnnnnnnnnnnnnnnnnnnnnnnnnnnnnnnnnnnnnnnnnnnnnnnnnnnnnnnnnnnnnnnnnnnnnnnnnnnnnnnnnnnnnnnnnnnnnnnnnnnnnnnnnnnnnnnnnnnnnnnnnnnnnnnnnnnnnnnnnnnnnnnnnnnnnnnnnnnnnnnnnnnnnnnnnnnnnnnnnnnnnnnnnnnnnnnnnnnnnnnnnnnnnnnnnnnnnnnnnnnnnnnnnnnnnnnnnnnnnnnnnnnnnnnnnnnnnnnnnnnnnnnnnnnnnnnnnnnnnnnnnnnnnnnnnnnnnnnnnnnnnnnnnnnnnnnnnnnnnnnnnnnnnnnnnnnnnnnnnnnnnnnnnnnnnnnnnnnnnnnnnnnnnnnnnnnnnnnnnnnnnnnnnnnnnnnnnnnnnnnnnnnnnnnnnnnnnnnnnnnnnnnnnnnnnnnnnnnnnnnnnnnnnnnnnnnnnnnnnnnnnnnnnnnnnnnnnnnnnnnnnnnnnnnnnnnnnnnnnnnnnnnnnnnnnnnnnnnnnnnnnnnnnnnnnnnnnnnnnnnnnnnnnnnnnnnnnnnnnnnnnnnnnnnnnnnnnnnnnnnnnnnnnnnnnnnnnnnnnnnnnnnnnnnnnnnnnnnnnnnnnnnnnnnnnnnnnnnnnnnnnnnnnnnnnnnnnnnnnnnnnnnnnnnnnnnnnnnnnnnnnnnnnnnnnnnnnnnnnnnnnnnnnnnnnnnnnnnnnnnnnnnnnnnnnnnnnnnnnnnnnnnnnnnnnnnnnnnnnnnnnnnnnnnnnnnnnnnnnnnnnnnnnnnnnnnnnnnnnnnnnnnnnnnnnnnnnnnnnnnnnnnnnnnnnnnnnnnnnnnnnnnnnnnnnnnnnnnnnnnnnnnnnnnnnnnnnnnnnnnnnnnnnnnnnnnnnnnnnnnnnnnnnnnnnnnnnnnnnnnnnnnnnnnnnnnnnnnnnnnnnnnnnnnaataactaaggacttataatgaaatatcgttaaaaaaaacgattctttttcacagtgataaggtgaaattgagtcgtttttttaatttaaaagagttctaactgaattggttgcggttctttaggttgagcagccctaccccaaaaattcataatattaccgaattgcttatcggtaatcctcaaaatactcacttttccaaaaggaggtaatagtttttttattcttttttcatgggcatctgcactttcactacttgcacaatgccgcatatatacggagtattgcatcatggtaaaaccatcttttagtaagttttttctaaatcccgaagcattctttcgatctttagctgtatctgttggtaaatcaaaaaagacaaatagccacataattctataaccgtttagttccataatttagggtaattgattttttttcttttaccactatagcattgctgcaaagaacttgctgttttttgcaaagcaaccattaatgtacttttttcatttttaaaataaaccgttcgtgttaacgtttctaataacacagatttaatttcggtattaagctcctgttcatcatagtgttccataatagtatataccgcttcatctataattggacgaaaaggctccattatatcatcagcaagagcaaaagcgttgtatttacttttatgatgtatacccaaagtgtttaacaatccactaccagacaacgctcttgcagtcgccgctcttaaaatagcgtagccataatttaaaaagttgtttgggtaatttccaaaacgctcgcgtttaaattctatatcaaaaaaagatttccagtaaaacttagctgctacagcttccatgttagtagtatctccactaagaactttactagctaaaaaatcaagtttatttttcctttttgtaatttgctgtaataatatgccctgatttttaattttttcaacaattgtttgttgccaaagttgtttttttaaaggtacactagccgctatttgatgtttaaaaacatcttgttgaatatggtgactattaaggtttagaaacatcccatttggcaaatggcttttactacatgtaattacggatgcgttattttcaattaataaatttagtgccgtgatacttatataaatttcagggttatctataacaacaaaaccaatatcttcaattggaactaaaccatctcttgcgtcagatttaattactaattggtaatttctggttgttattgagcacttattcgagaataacaatgttttttttagcatagcaaattatttaaaaattatagctaactaacaaaacagcagggaattactaaattaataaattagtttttaaaaaactaaaattctttgaatatctcaccagaaaaacaatacctaaagcattaataatcaataaaaaaggcacaatagcttagtaccattgtgccctaaaaggaataactgaaacaaattgatattatctatgtaagtttttctgttttaaataagataataactcctccggtaaatctgtttgtataacatttacatatcgcttttctaaaagcctatcaaacccggagtttttcttattcttctccatatcgtcatatttaccaagtgaatttatccaaactctagatccttgttgaatcattttttccatgagagtcgctttgtagaatccagcatctatgtgagttatataaatactatcatacttaaaaattctttttacatctcttttactataagctctaggcataatttttactttagaatttatatttcgtaataatggaatcttctcgtaatcgtataaataaaacaaaatttgatcttccattccatattctttaattaaagcataagtcttactaatagcgtccacactactcgccttaaaatctacatcaattagaattttccctttagtaactttcaaaacatcttcaaaacttggaattttttcactagtctctttttctttaaataaaaggtttaagttttgtaaataattccagtttaattcatccactttaccttttccgttagtagttctatccactgtactgtcatgcattattattatttcaccatctttagtttgcctaatatctaattcgacaatatcaactcctaaacgaatacattcttctatcgcttttatagagttttcaggatattcttgatgagctgctctatgtgacgctaccagtacatttttattgtcatgaaaatcaataagaatactgtctactctggtggtttgtgcttgaatttcaaagtctaaaaaaagacagaatagcaccagtacttttgaaattattataattttagtatttttcatttatttatgttcattattaaatgtctacgtcaattccataaacacttcattattcttttataaaatcgcttttaaatctcatgaattcctgactttcaggatcattaattactttcttagtaccatcctctttttttattagatgaaagctatcatatacgcttcccattggggtgtatgaatcgtactttaaagtgtctccttctattgttattatctgaaaaagctgagtaaattccccgcgcttaaccatccaatcttgattctgagattcatacattttaggaccactaacagaaacagcataaatagctcctgcttcttcaactactgtttttcctaaaccttcgttcgaagcataacctctggcgtaagtatgatcgtgcccttgtaaaaccaaatcaacattatatttatctattaaaggctttaaaccttctcttaactctttattatctcttccttttttagttgaataaattgggtaatgcattgtaatggttatccattttttagtattgcttgctaaaacagaatctaaccattttatttgttggtttcgtgagtactcactattaataaaactttgtgcatcaatagaaatcaatttcatactttgatactctaaagcataacaagtttctttaagctcttctataggtgcattttcaggcaatgtaaattgtggtttccataaggctgataatttctttcgttctacagttttatcatattcatgatttccaggcgtcatgacactaggtactgttgcatgtataaaactccccgcataaaaccactctccccattctctatctgattcactatgattaattaaatctccagcatgtagcataaaatcgacttctggcatcattttgtatgatttacgaagaactctagaccacatagatttcacatcgttttgcgcatctccaaaataaataaaactaaaaggttcgcttttgtttgatgaaggcgtttttatttgaaaccattcgctccaagtatcattgtttttattcccatcaccaactctatacacgtaattagtgcctggttttaagttattaataattgcagaatgatatgccgcttttaccaaaggttcttggtctctaatattttctacagctatgaattctgttttagcagtaaattgttgcttgtttttatctagtaaaaaatctggtccatgagtttcttctgctacctgtacgtatgcagtatcaacctgttggtttgttctccagttaacagcaaaactatgattagcgtcttccgttaaactcacaattattctatcaggagtttttgatggaaaaataagtttatgtgcatctacctcggacattgatgaatattgcgaatggaaatgttcatgatcttcatcatgagaattggattctttatttgctgttttacatgataataaacctaaaacggccataagaacaaaaacactttttttcatgatttaatttttaattaacaaccagaaaactcttaaattttctggttgtttataattatcaaaataacaatatgttatttatgatttatttttaatatccaatattttgagggaattcaacggtgcttaaatctatttgcgcttgtggaattggacgtaattggtgatagtcttttatattaggagccccattaggattatataatttcacccgttctaacaactttcctgttcttgctaaatccatccacctcaattcttcaccacctaactccaatgctctttcgtctagtatggtatcaatattcatatcttcagctttaatttgggtcatacttaagcttggtttagctgctctatttctaacaatatttacaaaacctgcagcttcctcttgctttccttgaagcacaagagcttctgctactattaaataagtttcagacaatcgaaacacaaaaaaatctctaaaccctgctttatcttgaaagcttgctctagtaggatcatcgtgttttttcataccccaatgcattttatcaatattaggagctacaaaggagaaaacattaggttctatttcccactccaccatctcgcctaagtttttgccttcgggaagtgtttccgctttattataataccagttatatcgaaaagtagcatcgaatcttgagtcattttcttcaaaaaggtttctaaaaaattctgtaggtctaaatctagtatatggacgacctccttgtgtaacatcacgagttaaaccagcaaattgatcataggccggagtaaaaaacaaatgcccctgattaccgtctccattatttaatgcatcatttaaatattgaacggcaaaaattatttcagtattcacttgattatcataatcaaaaacatctgaataccgattttgaagctgatatggagcgtcatttataacggttttgccagccgcttcagccccttgataatcttccaataacaataaaattcttgctaattgatgtaaagcagccccctttgtaaccctcccgtaatcagctgttgtaaattttaaattatcaacagcaaattgagtatcctccttcataaactcccaaatcgttcttttatccgtgggtaaatcttcagtgttcacccctttagtccccccttctcttaacaccacatcaccgtattgcaacgaaagccaatagtaataatgtgcccgtaaaaaacgtacttctgctttgtaaatatttttttgatcttcggataagtcttcaacctcatcaattctatctaaaacagtattcgcagcatttataccagcataacaataagtccatattctataaaaataagtttctgttgaattcaattcagaagaataggtgtccataaatttagcacctccatcttttccgtgctgaaaaagatctgttccaaaagtcgttaccgaaaacccttcttgagtaccatatatacttcttaatgaagcataaacaccatttacaccatcccttattcctgaagctgtactaaaaattgagttaggtgcagcttcagacaaaggcttttcctctaagctacatccattaataaaaaaaacggataagctaattactaaataataaagtcttttattcatttgaaatactatttaaaaattaatatttacaccaagagcaattgtcttagttgatggatacaatgctcgctctccattagattcaaactcaggatcaaaaccttcatagtttgtaattgtaaatggattttcggctgtaaaattgaaagttaaacctgtaaggttaatctgttttaacacctcttctggaatagaataactgagcattaaatttctaactctaacaaaactgacatctttatacgtaagagttgaacctaaataaacactttcttgacttacgttaggtcttggattttcattagttgggttttctggtgtccaataatcaacatcaaggttattataacgtcctgctaatctgttattattaccataaaactccgaacttattaaattgttttgtcttgtttgcattactactgaaagtaaaaaacctttgtaagaaaaccgctgagtcattcctgctatccattttggagtaggagaacctaaaacaactctatcattcgcatctatagctttatctccatttatatcttcaacttttatttgtcccggttcaaatccaaaagatgccgcttcatctgcctcatctagttgccaaataccaacttttcgataatcatagaaaacatttataggttgacctataaaccatagattaccaatatcatccttaccatcaccataaatttgagtaattttatttttattagttgaaaaagtaaaatctgcttcccatctaaaatcttttgatgataaaatattatttaaagataaattaacctctacccctgtatttctagtagaacctatattttctaaaactgttgtaaaaccagaactcgtaggcaaacttctaggcagcaataaatcttgtgtatcagctttataataattcaaactaccagttaaattccggttccaaacttcaaaatctaaaccaaagttagtttgttttgttgtttcccatttcaattcaggattagaaattgaaccggggctaaaccctggagcagcattatttccaaaagcataatagctcttatttaaagtgctaaaggtttgatatggttctatcgccgtattccctgtttcgccataactcactctaaactttaaatcagatataatttcgtttggcacattaaaaaagtcttctttagataacctccagcctatagctgcagaaggaaaaaagccccatttgttaccttctgaaaacctagaagatccatcggcacggcctgttaacgtgaataaataacgttgatcaaattgatagttaaatcttgctgtataagatagcaacctccatttttgatgattacttccaatacttgtcacctctcctgctgaccctaaattattataagtttgagaatcatatggtaagtttttaacattagtataattagttttctgtatctggttctgataactctgaactaacgttgttgatattgaatgcttatcacctaaatcgggattgtaatttaaaatattctcaattactaatgatgtaacatcggcattactagtacctgcagtagaagctcctccttgattattggttgtattgctgccataaaagtacccggttttattaaattgaagatcaggacctatatttaacctataacttaaattatccagtaatttatattcggcaaacaaactagcaaaaactctagttttaaaattatcactaagagaattatctatatctgataagggatttacgcgttgactttcatcatttgtgggtctaaacaaaacctcattatcttctccatacgcccatcctaaaggatttagcctcaaaacattatcaaataaatcgttttgagttatattttgttttgttctacttataaaagaagataccccaaacttaattttatcactaatttgatgatcaagatttactctaatagacgctcgttcaaatttcgagttctctacaattccttgttctttaaaataatttagagaagtgctaaactgggtactttcacttcctcccattatacctaattgatgattttctttactaccatttccgtatattaacttttgccaatcagtttccctaccttctttaagagactctaatgctatattatcaaaaatagtactatcatcaggataagttccattaccgctaactgttctctcagcctctcttctcaaactagcaaactcttcaccgttcattaaatcgagatgattaatcactgatgtttgtccgtagtatgaagaaaaatttac

SEQ ID NO: 4153 - DNA, 15480 bp, synthetic construct
  source 1..15480: mol_type = other DNA
  misc_feature 1..15480: note = Synthetic
ttactatgtctaattttattaacttcttgtggaggtaatgatgaaaacatcacaggaaacttttccaatgatgaaaaactaataacgcaagttacagtacagaatcctgaatttccagattattacaacccagacacatttatatatgaaaacggaaaacttataaaagcgtggcttgttgggggttctggttctttatatgaatttgaatatggtgcaaatgggaaaatagcaactgtatataaaggatcctctaattattcagatataaatacctctattaaagatacaggtcaaataacaaaacaaatctataacggggatggaaatttaatttctattactgatagtggaggaaaagtgctttgtagcatggattatgattcaaacggaaggttctataaagtagatgttaaagataatttgattggaaaactagaaacttatatttattccgattttgatacaaatgggaaccctagaaaaatgagtgatcttaccattacttatgataataaagtaaatccaatctatgttctatttaaaaagtatggtttttttaatgtaataatgagtaactctctagaaggaagcctaggtggactttatttttctcccaacaatataaaagaaataatagataccgacgacaataataaaatattatttagtgcaatttattcttatgatgcagacaggtatcctgtctctaatagctttagtggttatggaaacggcagttatagtgatgttgaagtctttgagtattaagatttaactgtatctatgaaaattaacctaaatttaaacaaataaagaaggtataccaaatagctaatttgccttataataaaatataggaagaggttaaagtgaattcatctatttgctttttcgtagatttagaaaagtaaaatattttacaggtcttctttgatgagattgcaattagctaaggacagcaagcatctaatatttatcaatgcaagtagagagacattatttttgaatcatagaaatcacattgattctattttaagtatgtacttatattttgtaataaataaactaattttaataaaaaaaaccaataaatcaatttaattattaaaaaaacaaatatggaaatagtaggaaaataaaagttttaaacgagactcaaaatataggtagtagtggctttaggaaacgagaagtagttattacaacaggtgatcaatatccacagcatgttttaatagaattcattcaggataaatgtgatttactaaataattatgcagtggggcaggatgtgaaaataggcattaatgttagagggaaagaatggataaatcagagggtgttgcaaaatattttaattcgcttcaaggatggagaattgaacttttaaatactcaagaaataaaagaagatacgctaccagaagttcctcctatgagtcttgtaaagggtgaagaggaggatgatttaccattttaaaataataattgcaacattaataaattcagaagaatgaagaatgaaattatagaagctataaaaaactttgacatagctaggcttaatgtattacttgatgatgatacttcatatatggatgttacaaaattccgatttctaaataggctagaaaaaaagtttaacactgctagaaaagaggggtgttgtcattttgatgagattttttttggaatctgtggagattgtaataaaggttgtgagggattgacttttttatctacatctggttactacttagacctacttattaaaagtaaagacgagaaatttgtagatgatatttacacatgttctaaaattatagggtctaatattattgagaaaaaatatagtttagagccacatttttatgaagatgaaaaagtgagttttcaaccatactctgattacaaatttgtagaagaacagtataaattaatgataacagatattgatagttttaaagaagatttaagctttgaagattttatagcctggtatgaaacatacggcgatttaagaaatttaaattttttagaaacaactattctaaaattatataccaaaatatatgatgatgtaaatgcgataaataaaattcttgagaaagaaatagaaacagagaattttgtaaggtctataaaagaggcagtaagtgtttaacagagaattcaccaagtattataaaagtacatgctaaaaaatagattttattttttcttattgttaacatcaataacctattcacaagataggtgggttaattttgctgatgaaaacgaaataaatattaaaataacaaaagacacaaataagtttaaagttaacgatttagaatttgtagctgtttggaatagcaaaatgacacctaatgaaaaatatgggtatttaggaggtattaaaaaccttaaaatattctataaagagcaacaaatggatgagcatgttaatttacctgacaatataggattgggttatgttataatgaaattctatgattataattttgatggattcttggattttacaattcaagtggattgtggaggtagttgctattctcattattatttatatgatataaagcagcaaaaatttatatatcaaaaagattggaattttagaattcaaaaaataaataagaaagaaaaactaatattaacacaaccagatgggatgctggataatagagagttatttagagttgaaaagataaattaataaaattaaaaagagagtaacaatatgaaaatatcaacaatgtaccccaattttaaaccagcagtaaaattttggttagatggtaaaaactattctttagtttcagatgattctaaaaaagtaagttttatgattcctttagcttctcataaaaaaggatttgattattatgaattagataatgtaaatggaggggtagttttttctttagtaacaatgttaggatttaaaactattaaaaagtcaagctctaaaattattaatgatgaattaccttatgatgattggcgttatttaatagatgaggttatgagcccacatttaagaagtgaagaatatcaagcactaaaaaaaggttatgctaaaacaagcactggttgttttggtatgttagctgttttatttatttcatttttattagtaattaaaaatctttaaaatcatgtggttattttatattatagtattattagtagtgttttatttattagataagtacaccccaaaatataagccaaaagtaaaagacttaaatgttaaggaaaaaatctcattaaaaaaagaggtatatattgataattctaaaatcaataatattaacattaacgataaatttaagaaatctgtggagtttgttaacgaatttgtttacagttatttatatgtaaattttattaataaagaagataatacttattctattgttgaaggttacacagaagaatttgaaaaatctttttttgtaaacgaattaattaaattttccattgttaaaggaataaaaattaatattccagatgaatgccttatttctttcgaagaatttaatactcatagtatctataatgtatggactgaaatctattgggaaactgagcataaagtttatcaattcgaatttggtttatctcaagatttggattattcagatatggcagttattgattctgtaattgtacttttagattctgaaaatactgtaatagacataactattaaagagaattcaaaattaggaggaattccaaagctaaaacatttaacagcagatggagcttttagtttgaatacaccactttattttgagaatgattttgatttgaaaaatagtcaaaatttccgtataattaatgagcaatttaatgacgccttatattgttattataaagattccaaaataatataaaaataatttttttcaaaatttttaaaaacttttcctatcgtgaaagcgaggtaatctaatatcaacccccactcacttttaccattgcgggatacccccgcactattaaataatctttaaaatttaagaaactatggtaaaaattgtaggatttaagacctttgaaagaaaagatgggtcagagttttgtgcattaattgtacaaggaggaattgaagctgtaaaaagcagtgaaacaggaagaacttattttacagcacgtaaagtaaatgtcagttgtacttttgatgaagaaatgtgtgaaagtttaattggttcagattttcctggtagtattaaaaaagtagaggtagaagcatatgagtatgcaataccagatactggggagttggttatacttacacatagttatcaatatgtaagtgaagatgaaaacgttgttaaaaacaatgtagtggaaaaagaattggttttataaactaattttttaagttaagatagaataaagagtttacagagatgtaagctctttttttatgtcttttttttagtgagataatctcattgaatttaattataaacaataatatttaaaattatgcaattacaaaaagcaaaaaggcaccaagtaaaattaagattaggattgtctggtgcatcaggttttggaaagagctattccgctcttttattagcctatggaattacaagagattggactaaaatagctgtaatagatacagaaaataatagtgcttccctgtattctcatttaggggattttaatgtggtttctttaaatcaaccttacagtccagagcgatatatagaggctataaggctatgtgaaaaagaaaacatggaagtagttataatagattcaatcactcatgagtggcaaggaaaaggaggttgtttacaaatacacgaacaattagggggtaggtttcaagattgggctaaaattacgcctagacatcaagcttttatagatgctattctacagtcaaaatgccacgtaataacaacagttagaaagaaaatggactattctatggatagggattcaagtggtaaaacaagggtggtgaaacacggtttaaaggatattactcgtgagggttttagctatgaattaaccgttgattttgagataattaatgagaaccatatggcgaaagcaacaaaagatagaacaggtctatttatggacaaaccagagattttaattaacaaaggagttggcaaaatgctaatagattggtgtaatcaaggagtttcaattgcagatgctaaaaaggaaatagcagaatgtacaactgttgaaggtttaagacatttatatcaaaagtattcaagtcttaaaaaggagttgaacgatactattttaaatcgtaagcaagagattgaaaacgtaaaatctatggttatagaaagcaaagaaattattaacaataataaaacatcagaaaatggaattagtagctaatcaccaagtagaaagtatgattgaagatactaaaaacttagtaaagaaatcatctagtaaatttatagaagcgaatactgtagaggtaagtttaaatcatcttagagaggaatgtataatccctgtttttgcaaaagataacgaaactacgttatcacattttcaatttattgatgctaccaaagaaattgcagaatctacgtttaatggagtgttaataatgccttctataagggtttctcatcaaattaagggaagaattccttcagcaattgggaagtctgtaaaagagctcttagagcatgaaaaaactacctactatgaacgtatggcttttatgatggagataccaaatagacaaatagtggtaaataatcagatactaaatttatctattggaggtgtgagagcgtacaataaggagaacttattttcaaagaaatcaatagaaaaatttcaagtttttattggttacgaaaacacggtttgtacaaatctctgtattgctactgatggtttgaattctgaaattagagttagtagtattcaggaattacaggaagctgttaagaacctgatatataattacaatcaagaagctcatattgataagttagaaagattaagtaattattatttagatgaaaagcagtttgctcatttaattggcaaaatgcggatgtatcattttttatctaaaatagagaaacaaggtaagtttccattgcaactaacagattcacagataggatcagttgttaaggattattttacagacgacaatttcaaaaggtcagaaaatcaaattagtttatggaatgtttacaatctttttactgaagcaaacaagtcgtcatacattgattctaatttagaacgaaacgttaatacacacgagtttatacaaaacctagctaattctattgaaaacaggacacctaactggtacctatcaacattataatatagctattttgtataaactgattattaacctagtgtaaaataatggaaatggatgatgaagaattagcagacttattaaaatatatttctccttttgagatttatattgtgaattcagaaaatgaattagaatgtttaaaatgcccttttaaagttagagtgaagtataatattggtgttttggtaaagaatgaaattgttttagtagacaaagttaaaataacaaaagacctactatctgtttatgtgattagaaatcaatcttattattgctatcattttatacttgtttaaatataatgggagtctatgttgtattttgaatattcaaacttttgagacttttcctcctatataattaaagaaatactgaaaaagtttagctaaagtatacacaacatattggaatataatatatgttgtgtatttttataaaaaaaacttgtcagacttgacgagtcaacttgtcaactttttaacagatgaaaaagaacataacttttaaagacattttaattcctgaaaattttcttgaattacagaatcaatacaaatcaacagataataaaaacttagggaatagagatttttttcaagaagcccaaatagaagattttagtgtttcttattttaattttaattttgaaaacgtaacatccaaagaggttgaagtttttttttataaagattatttaaaaccacaactgattgaaatacacgaggtgtttatgcaatcttttcaaaatgaaatggatagacttaatttaaataaaggtgatgtagatttattttgtagtcagaaaattaatgatttattgagttttgaaaagattctcctaaattgttcttatttatctaatgatattaaaaatttaattgcttcaaatataattttttgtttagatcagattcaagaatttaattttaacaaagaggttttaactggagataaaatgagctttaatttaataagacaagatgttcttgttttattttttttacttagagaaaaaaaacatattaaatggcatagtaattcagaattaaaagttttattagaaaataactttatgtcttatgatgtaaaaactgaaaagcatataaacttcaaagttggtaaaaataatttctcagattttaaaagtggtagtagaactataaatcaatcagtagagaggttaagaaatatttttcaagaaaaaaacttctttgatatcacttagttttattaggggtgcgttactttatcccccactaaattttccttccaaatatacttttgcaacagcaagagacaaaactgtccgttaagaatagttgctatagagactcaacagcaaatctaacacagttattcctttgtgaaaataataataaatttaaaagtattaaaaatgattaaaaaggaatctccattttggagttatgatgaaggaagtctaaaaatatcacattcaaagttatatgattttttagcattacatggttttatgaggttaaaattgtcgcctacaaactatttgttagtaaatgaaaagaacaatataattgaactatcatccgaggatgaaatgataggacttgttgcgaattatttgagaaataatggtgaatataaagtttatgagacttttgtaaaaagtgttggtcaatatatatctaataaaaaattaagctttttaccattaggtgagttgccaaaagatagagatagtaaggatacaggtgttttttattataaaaactgttattgtatagtttctaaggatggaattgacgtgaaagattatagtgagttaccatatgttatatggagaaataggcttattgaccataactataaagaagacaagagtgatgtaattggacaattccaccagttctgtaacaatatatctaagaatgatataaatagatttttatcattaaaaactattttagggtacttgtcacataggtgcaaaaccaaggatgagtcaaaagctattatattttatgatgaaaatatgcttttaaatgataaaacaaatggaggtacaggtaaaactctattatctgttgctttatctaaagttagagatttagaattatttgatggaaaatctataaaagctgagagttggtttaaaaatcaaagaataaacttgacaacagatattattacatatgatgatctaaacaaagccacaagcttagagttgttttattccatgattacaactggtgttgaggtagagaaaaaaaggaaagatgcattttacattaaacatgaagagtctcctaaaattataattacttcaaattatccagtaaaaggtccaggaggctcatctgatttaagaagaaggtttgaatttgaagttgcaaattactacaatgaagagtttacacctgaaatagattttggtaacaggttttttaacgatgcttggagtgttgatgaatggcagaaattctattattttttaatggagtgtttaatggaatatttgaagcacggtttggttgaagcaccttctataaaccttgaagaaaagaaattagagatgaatacttctaaggagtttgttgagtttgctaatgatttttttgaatttaacaaatgggaggataaaagagaagcccaagagttatttcaaggttactttcctgaagtaggattttctgctcacacatttaaaaaatggatggatgagttttgtaaagataatgatgcgaaattagaaataaaatctactggtggtaactacttgtttaatatggtcaaaagtgcagaggatgaaagtgatatataaagtaacaaataaggaatcagaagaagtctatattggggcaacttctaaaactttagaagaaagaaaaaaagaccatttaaaaaagtctaaaaaaggcaagagttatgcatttcaaaatgcgatcgctacttatggagctgatgcttttaaatgggagcagattgatacagcaatcacaacagatgaattagcaaaaaaagaaaaagaatatattttagaatataattcaaaagaagaaggctataattctgatagtggaggtggaatccaaaaaacagtttatcagtatgatattataacaggagaattagtagacagttactctaatttgaccatttcaggagctgtagtcggtttaaataagcaagacttgtcaaagatttgtttaagtgttaataaggtctgtaaaggcttctattgaacttatgactttatagatgagtttattcctttaacagataagaggagaaaaaagatacatcaatattctatacaaggtatctttataaaagaatttaactctgtgtctgaagcatcaaaattgacagggtgcaataaaacaagtatagccaaagttagcagaggtgaacgaaatagttgtggaggttttatttggaagtatttatagaattaattaaaaaagaaaggtagtttaaaagctaccttttttaaaaataaaaaagtcctaccgaagcaggactaaagattttcatctacggcatatagccttattgtgataagattaaagattagaaattttaatctgtatcaaatataggaaaagtttttttattttaactattatctctaactttatgagaaaataaaattgctataattatgacaaaaatacttggactagatttaggtaccaacagtattggttgggctattgttgaaaaagataataatgaaaaggaatataaattaatagataaaggagttagaatattttctgaaggtgttaatatagaagcaaaaacaagtagcgaaagctctaaagctgctcaaagaactagctatagaagtggtagaaaactaaaatatagaagaaaacttagaaagctagaattgttaaaagttttatcagacaataatttatgtcctaaattaacagatgaagaattaaatctttggagatataaaaaaaaataccctactaatgacgactttaggatatggttaagtaccgacaatcagaatgataaattagaaaggaaggaacaaaataaaaacccatatgcatttcgcttcaaaagctctactcaaaaacttgaattaaacaatgtaattaatcgacatgaattaggacgagctttctatcatatggctcaaagacgtggctttttaagtaataggctagacacttctgataattcaataattgaagaaaaaaataatgagattgaagatattattcagcaatctaatactaaagaagagttatttcttgattataataatttccttgaagcttatgataaaacagacacgcagaataaagctttatttactttaggtagagcatttaaaaccattttaaaagataacgcaaatgaagaactagtttctttaaaagaaaaattgttagaacgtttaaatcgtaaggaatttttaggaaaagttaaaagtgcaattaataatttgtctgaaaaaattacggaagctaattgtaatactttaggtgagtacttttatggattgcatataaatggacaaaaaataagaaataattacacgcatcgtgaagaacattatcttcaagagtttcatattatttgtgataagcaaaacctttcattaacattaaaaaaggatattgaaaacgctatcttttttcagcgaccattaaaatctcaaaaaggtttagttgctaaatgccctttagaaaatgacaaggcttgtgtgccaatatctcacccagcttttgagttatttagaatgtttagttttttaaataatattaaaataaaaccacaaaatgaagataaattaagaattttaaatactgatgaaaaagcaattataaaaccacttttttacagaaaatctaaacctaattttgattttgaagaaataacaaaaaaactaacccccaagcacttaaaatcaggatactacaaggataagaatgcaaaagatttggatgttttattcaactttgggaactacacaaatgttccaggctgtcctacgattgcaaatttaagatctgtttttggtgaagattggataacctatttaaatcagaattttacaaaaaagaacaaagacaattctaataaatcagaaaatcaaatcattgatgctatttggcatgtgctttttagatttgataaaacagaaaaattagaaaaatttgcgataaataacattggctgtgataaaattactgctttaaaattttcaaaaataaaattaaaacaggattacggatccttaagtttaaaagcaattcgtaatattttaccttatttagagaaaggattgctttactcacacgctgtttttcttgcaaatatgaaaactgttttaccaaaagatatttggaataatgagaaagatagaaaaatcataaataatgaagtattttcaattatagaaaattataatacttataaaaatatagttgacattgttaatggattaattaaaaatgttaaaaacaataaggaaacgtggagtgattcaaatatttttgttataaatgcttataaaaaagaccttgataaaaatattaaagaatattttggtttaaaactttgggattcattttctgaagataaaaaagaaatgcttttaaaagatagttttactcttttttcaactcaaatgaaattaaattttgaacgtggtcaattcttaaaaaaagaaacattagatgagcgtataaaagagtttttaagagataactttaatattgaagactataaacttaaaaatctctatcatccttcagcaattgaagtttataataaagctaaacgtagcgataaagatggtaaattatatttaggaagcccactaatatcatctattaaaaatccaatggcaatgagagcattgcatcaacttcgaaaagttattaaccaattaataaaagatgatgcaattgacgagaattccactattcgtattgaaatggctagagagcttaaaagttcgaacgaaagagttgcaataaggcaatggcaaaacgatttggaaaataacagaaagagttatgttaatgatataaaaaaattatatcaagaacaatgcaacttagagattgaaccaacacaggatgaagtattaaaatatcaactttggatagaacagaatagagtttgtctttacactggaaaaagcataagagtttgtgattttataggagcaaacccaaaatttgatatagaacataccattcctagaagcaaaagtttagataattctcaaacaaataaaactttatgctgttctatttataatagagacattaaaaaagataaaataccagcagattgtgttaaccatagagaaattttactacgaataaaacattggtatgcaaaacataaaaatttagaagatcaaattagagacattaccaaaaaagttagggcagcaaccacaaaggaaaatagagacagcaacattcaaaaaagagctaaattacgttttgaatataattatttaaagcataaatataacacttttacaatgactgaaattccaagagggtttaaaaatagtcaatctgtagatattggaatcattagtaaatatggaaacttatttttaaaatcactattcacaaaagtatatcctgttaaaggtaaaacaacatctaatttaagagatatatgggggctagagaaaaaagaaagagttaaccatgcgcatcacgcaaaagatgcggtagtcgttgcatgttgctcaaaagacataaatgatgctttagcagaatattaccataattatgaagattatactttttatggtaaacaaaaaccatcttttaaacatagaattccatggaaaggttttaataatgatgttaagaattttgataaaaatatattaatcagccatcatactccagatgctttaccaatacaaagtaaaatagctatacgtaaacgtggaattattcagagaaatgaaaaaagagaaattaaatataaacaaggagatactgtaagaggatccttgcataaagaaagtttttatggagccataaagagagaagtaatcaataaaaaaggggagtcctcagaaatcataaaatacgttttaagaaaaccattagaaagtttctctgatacagatttaaaaaacatagtagacgataccgtaaaggaaattgtttgcaatgcccgcaaactagaaaaaggattaaaaaaagaaattgaaggattaaaaaaagaaattaacaaagtaaatgatgtagaagaacaaattataaaagacaaaattggagttttatcaaacaaaattgaaaatgaactttatgtattgccgaataaaaacggaaatccagtaccaataaaaagaattagatattttacaacagatgtttcaaatccattaataataaagaagcatcgcgatgcttcaagacaccaatacaaacaacattattttgctaaaaatgatggaaattattgttatgcagtctatgaaggtattaataataaagctaaaaaactaaaagaatttagagttgtaaataattttgaagcaggcaaatatttcacatcaaatgagagtaacagtaaggaagcattagagtcaaatattattgataaaaacaaaaatatattgacacttaaatttatattgaagactggcaccttggttttgttttatgagaattatagaagtgaagttcatgatttagataatataggaatttctaaaagactttataaaacagttgctattgaatctgatggaagagtacaatttagacaccatacaatagctaaaccagacagtgaattaaaaaaatcatcaagtgttaattttcaagaacctaatgaaaaattgagaatatcaaaatctggtttaaacatattggttcaagggtatgattttgaaatatcgccctctggaaaagtgaaatttaataatcattaaaaaaaaggttaagttcattgacatattgcgtagctttataagactgaaatcgcaaataaaaatttagttttctttggctagtttttgttcaggtttgattaaagattagaaaaaaagatatttcatccgaagtaattaatttgtctattgaagttgtggtttgattaaagattagaaaaaacgatatttgagagcgtgcaaaccgcaccaactcaaaagttgtggtttgattaaagattagaaaaaacgatattaccttttttattatacttaactaattggtggttgtggtttgattaaagattagaaaaaacgatattctttctaaattggtactacaccaaaccatggttgtggtttgattaaagattagaaaaaacgatatttatgttttcgaaatctttaggatgcggcaagttgtggtttgattaaagattagaaaaaacgatattttcggcagaacgaccaacaacgtacccaccgttgtggtttgattaaagattagaaaaaacgatattaaatgtgatacaatatctagtgagaaagcagttgtggtttgattaaagattagaaaaaacgatatttacatcaggaacattaacatctactgtttgttgtggtttgattaaagattagaaaaaacgatattttactacttactaacgcaacgttacttgtagttgtggtttgattaaagattagaaaaaacgatattagcatgctataggttcgtaggcacttgtacgttgtggtttgattaaagattagaaaaaacgatattcagataataggtgggatgttaggattctagttgtggtttgattaaagattagaaaaaacgatatttagagctaaggatttacaaggcaggtttacgttgtggtttgattaaagattagaaaaaacgatattaatgggacacaacaaagtcatccacggtaagttgtggtttgattaaagattagaaaaaacgatatttgttggaattgcattgccttgtagtgaaaggttgtggtttgattaaagattagaaaaaacgatattagtgtcatgtatagctcctcagtagttacagttgtggtttgattaaagattagaaaaaacgatattggtatctataatagaacgcaatgctctgtggttgtggtttgattaaagattagaaaaaacgatattcgatagaaatggcgctgttgaag

SEQ ID NO: 4154 - DNA, 9711 bp, synthetic construct
  misc_feature 1..9711: note = Synthetic
  source 1..9711: mol_type = other DNA
tgcttattgtagatattgtaaatcaataaaagataatatatgctagtaagagtaaacaaatacttaatttagatttaaaaaacaacgtgggttggtctaattatgttaaaaaaatggtcccgcaatgcactgtaaccaagaataaaagttgcctaagcttaattattctacgtcagttcgattgattttcacgcattgaaatggtgtgaaaattgtatcgagaacccatcctaatccgtcagttcgggtggtatttgtgaagtaaaacggagcaaaaatatcaagaactttttaaaaatttaatattcatctttttttacctctttacgatttccagtaaagattacttttatactattttttatgtttaaaaaattatttctaaaattggataaacgaaatgaaatccacaatttttgaagttataccaatctaatttgcggcttttattaaacccaaagacagtgaagaattctatttaatttcataaaatttaaatctcatttttattataaaaacaaaaaagtcccaccgaagcaggacttaagattttcatctacggcatatagccttattgtgaaaagattaaagattagaagttttaatcagtcacaaagataagtaaaacattttaatgttggtttacggttttccgtaaaatggttaattattttttatttacctttcaaaattgaattaaaagcagttagttatggcaaaaatattagggctagatttaggaacaaactccattggttgggcgatagttgataaagatggaaatgatttttccttggtagataaaggtgttagaatattttctgaaggagtaaatattgaggcaaagacaaatagcgaaagttctaaagcagcaaaacgaacagaatttagaagtgctagaaaattaaaatacagacgaaaaattagaaaaattgaattgctaaaagttttgtcagataataatttatgtccaaaattatctgatgatgaattatatgattggagatataaaaaagtttatccgcaaaatgacgaattcagaatttggttaagtacagatagtcaagatgatgaagctgaaagaaaaaagcaaatcaagaatccatattcatttagatttaaaggtgcaaaagaaaatcttaatttaaacactaaagaagataggtatgttttaggaagagcattttatcatattgctcaaagacgtggttttttgagtaatcgattggacagttccgataattcaattattgaagaaaaaaattctgaaattacaggaataattattgatgcaacttcaattttagaattttcagatttgatttcagaatttttatcaagctatgataaagaagagacaagtaacaaacctttatttacactttcaagagcttttaatgccattataaaagagaattctactttagtctattcagatttaaaggaaaaactacaagaaagattaaacaaaaaagagtttctcggacctgttaaaagggcaataagcgatttgacggaaaagatacaagacgaaaaatgtgctactttaggagaatacttctatacattatatcaaaaaggagaaaaaatacgaggtgaatatactcatagaattgaccactatttaacagaattcaatttcatctgcaaaaagcaaaacatcccgaatgagataaaagaaaaaatagagaaagcaatattttttcaaagacctctaaaatcccaaaaaggtttggttgccaaatgtccgcttgaaaataggaaagcgtgcgtgccaatttcacatcccgattttgaagagtttagaatgttgagctatttgaataatgttaaaattaaattgccaactgatgaaaaattaagattactaaatgaagatgaaaaggagcaaattcaatctttattttttagaaaatctaaagctaatttcgattttattgatatcgccaaaaaacttacaccaaaaaattcaaaatctggttattataaagataagaatgtttctgaatttgatgttcttttcaattataatttgggaagtaacgttgcaggttgtcctacaatttctaatttagttgatgtctttggctcagactggaaaaaatatttactttcaaattttgtaaaaaacacaaaagtagagagtaatacaaaagttcaaaaatcgattgatgatattatagatgatgtttggcatgttttattccggtttgataatgaagaattattaaaacaatttgcaattgaaaaccttaattgtgatgaaaaaacagcaacaaaattttcgaaaataaaactcaaacaagattacggttctttgagtttgaaagcaattagaaatattttgccatatttaagacaaactcttatttattcacatgctgttttcttggctaatatgaaaaatattttgccagctgaaatttggaataatgaagaaaacagaaatattattaataaagagataaattcaattattgaaaactataaattgtatagtaacaatatagatattgtcaacggattaataaaaaatgtaaaaaaagaaaacggaacttggaattctactaatgtatttgtggcagaagcatacaaaaatgcattaaacaaaaaagtaaaagatttttttggaactaaaaaatgggatgaaactcctgaaacttttcaagccaaagtcttatcagaatgttttgatcttttcacaaatcaaatgaaactcaattcagatagaggagaatttgcaaaaaagcaaacaattgacgaaatattaaaagcttttttgagtgataattttaatgttaccgaagagagcttgaaaaagttatatcatccatcagcaattgaagtttataagaaagctaaacgaagtgatgaggatggtaaaaaatatttaggaagtccattaatttcctctataaagaatccaatggcaatgcgttcattgcatcaattgaagaaagttgtcaatcaattaattaaagatgatatgattgatgaagatacctcaattcatattgaaatgccaagagaattaaattcttctaacgaaagagttgcaataagacaatggaatgaagatttaaagaacagaagaaacaaatataccgaagaaattaaatcaatttttagaggagaaataataactgaaggttgcaatgattcaaatccaaattataacgattatgaaccaagcgaaaccgatattctaaaataccaactctggattgagcaaaacaaagtgtgtctttatacaggaaaaactatttgtttgtctgattttattggcaataatccaaaatttgatattgaacacactattccgagaagtcgaagtttagacaattcacaacagaataaaacattatgttgtgcaacttataatcgtcaaaccaaaaaagataaaattccatttgagtgtgcaaatcatgatgaaattttaccaagaataaaacattggtatgcaaaatataaaggattagaacaacaaattaaagatttatctaaaaaaataaaagcagcttcaaccaaagaaaaaagagataaatatattattgagcgtaccaaattgagatttgaatattcatattattttaagaaatacaaatcgttcacaatggaagaagttccagaaagtttcaagagtagtcaatcggttgatattggtattattagtaaatacggaaatctatttctaaaaactgttttcaataaagtatatccaataaaaggtaaaacgactgccaatctgagacaaatgtggggattgaatgaaaaatccagagacaatcatgcacatcatgcaaaagatgcagttgtagttgcttgttgcacaagagatattaatgatgctttagcaaattattatcacgatctagaacaatttgatttttttggaaagccaaaaccatcattttctcacagaattccatgggaaggttttcacaaagatgtagataattttgacaataacactttaattagtcactacacgccagataatttgccaattcaaagcaaaaaagctatcagaaaaagaggaattattcaacgaaatgaaaaaggtgagattaaatacaagcaaggcgatactgttcgtggtgcattgcataaagaaagtttttacggtgccattaaaagagaagaactaaataagaaaacaggagaaacagaagaagttataaaatatgtaaaacgtcaaggtatcgaaatgtttaaggatgctgatttgaaaaatattgttgatgacaaaataaaagaaatagttactaatggtcgtgaacaagaaaagcaaataaaaaaagaaattgaagagttaaaaaaacaactaaagaatttaaaggaagaagaagagcaacctataaaagaatcaattcaagtacttgaaaataaaattaaaaatgatttatatgttttgccaaacaaaagcggaaatccagttccaattaaaaaaatacgctattacacaagcgatgtaacaaatccgttattcataaaaaagcatcgtgatgtttcaagacatgaacataaacaattttatcacgcaaagaacgatgggaattattgtatggctatttatgaaggattggacaaaaaaggtaaaatatcaagaagtaatcaactaattaatattattgatgcaggaaagtatttcaaattgagcaatgaagataaaaaacaatatccaattgctcccgaaaaagatgaaaatttaaactctttaaaatatattttaacgaaagggaaaatggttttaatttacgacaaatctcctaatgaactatttgaaatctctgaggaaaaattattagaacgcttatttgaaataacacaattagatgtagaaaaatatgcggaaataaaacttttgtttcattcagaagctagagataagaaacgaatcaccgaatttatggggttaaaaactggaatgaaaggaggtaaaaatgtcggcgaacaaaaaaaatatccatggattaaaattggagctaatacatttgattgtttagtcgagggttatgagtttgttttgacacctacaggtaaaataaaatttttgaaataaattattttggtgtatatttacaccactaaataaattttattatggccagacaaagtatcacattagctaatcaaaatgatgaatggctaaaacagcaagttgcaaatgaagaatttactagtaaaagtgaagcggtaaattatttgataaagcaagcccgagagcaagatgcctatgtggaatttgtaagaatgaaattggaaaaagccgaaaaaagcggtttcagtataaagaccaaagaagaattattagcagaaattaaaaaaaaattgaatgtatagttataaactaaatattcaagtggaagaggatttaaccagaatttttgagtatggtattggtcaatttggtttaaaacaagcagagaaatattacgaaatgttttttgaatgtttttctaaaatagcatcaaatccttttctttttcctaatgctaatcattataaaataggttatcgctactgtgtttgtggtgtagatacgattttttataaaatcaatgctgatgaaattgaaattatggcaattataggaagacaaaatttttaagaagttcattgacataaagttttcaaactcttaaacagctcaaaccacaacggtgttccagcgatagctcactctgttgtgggttgattaaagattagaaaacacgatatttcctcagacgttaaatctttaccatcgggtgttgtgggttgattaaagattagaaaacacgatattgaaacctagtgcggttaatacatcttttaagttgtgggttgattaaagattagaaaacacgatattagaatcgttaaacaatgcagtagtcaatatgttgtgggttgattaaagattagaaaacacgatattgcaatcccacttataaaagtacgtctgtaagttgtgggttgattaaagattagaaaacacgatattaaatggattctttaagttgggaagtagctgttgtgggttgattaaagattagaaaacacgatattagagccattagcatttaatgcgcttacagagttgtgggttgattaaagattagaaaacacgatattaaatcttcataagtcacgccctcattaaaagttgtgggttgattaaagattagaaaacacgatattaacaacaaacggcacaagtgtaccaacgatgttgtgggttgattaaagattagaaaacacgatatttttgctaagttttcagatttaaaatcattagttgtgggttgattaaagattagaaaacacgatattattacgcaatagttatgcgttgtttagaatgttgtgggttgattaaagattagaaaacacgatattttccgtttataacacttttcataagattagttgtgggttgattaaagattagaaaacacgatattcgacaacgaaaaaagttacttaaaccatttgttgtgggttgattaaagattagaaaacacgatattgcaaagtctaataaatcatcatcatcatttgttgtgggttgattaaagattagaaaacacgatatttatcacacgtaatttagatgcaattgagcagttgtgggttgattaaagattagaaaacacgatattcttaaaaacaaattaaacaacgttctacccgttgtgggttgattaaagattagaaaacacgatatttctccagccaatttagtgaagcaggaacagttgtgggttgattaaagattagaaaacacgatattgtctgaactatggtttagaatggttactttgttgtgggttgattaaagattagaaaacacgatattacaaatgcaacgaatgtaatacagaaatggttgtgggttgattaaagattagaaaacacgatattcaattagcaaggttagtagatgttttacctgttgtgggttgattaaagattagaaaacacgatattatttacagaagaaattaaacccgatttattgttgtgggttgattaaagattagaaaacacgatattttattgattattgcaattacatcagaaccagttgtgggttgattaaagattagaaaacacgatattattgaaagaaaataccaagtcaacacgtgagttgtgggttgattaaagattagaaaacacgatattagttggctcgttaccttctaataatcaagagaataaagtattatatcgtgataaaaaacgcttcttttttgcagtgaaaaggcaagattgaggcatttttttatttcaaaataattctaactgcgtaggttgtggttctttaggcacttctgctctaccccaaaagttcaaaatatttccaaactgtttatcggtgatacgcaaaacacttaccttacccaaaggcggtaataatctgtgaatgcgtttctcatgcacatcggcactttcactactagcgcaatgccgtacataaactgaatattgcatcatactaaaaccatcttttagcaagttgtttctaaatcctgatgcattttttttatcctttttagtttctgtcggtaaatcaaaaaatacaaatagccacataattcggtatccgtttagatccatagttttggatattttatctttttcctctcgccggtgtaacattgttgtaacgaacttgctgttttttgcaatgcaaccatcaacggacttttctcctctttaaaataaacagtccgagtaagaatctgcaacaattctgattttagtaaagtattcaactcttgctcatcataattttgcattaactcaaataccttttcatctacaattggtctaaatggttccatgatatcatcagccaaagcaaaagcattgtatttacttttatgatgaattcccaaagtatttagtaaaccacttccagataatgctctcgcagttgcagctctcaaaatagcataaccataattcaaaaaattattaggataatcaccaaatcgttcacgcttaaatttcatttcaaaaaaagatttccagtattgacttgctgcaacgccttccatatttgaactatcgccacttaaaactttactcgctaaaaagtcaaaactgtttttacttccagttatcttttccaaaagaattccttgattagtaattttttcaacaatggtttgctgccacaattgtttttttaagggaacgcttgcattaatttgctgtttaaaaatttcttgttgaatgtgatgactattcaaattcaaaaacaaaccatttggtaaatgattggtactacaaacaatcaaagctgcattgttttcaattagaaaattcattgctggaatacttaaataaatttctggatgatctagaacgataaatccaatttcctctattggaattgtgctttctctaacatctgttttgataactaattgtaaattctttgtagtaagcgaagccttattctctaataatatagtttttttaagcatcttaaattatttttacactaagttataaaagagaaaatagtattctttacggaaaaccgtaaacaacttaactattaattaaattagctttacaacaaaaaaaaaatgccaagaatcctcttcctcttccttctactatccacaacttcattctcccaaataaaactcctatcctggaatattgaaaacttgggtagttccaagtcagatacaaccattagtttcattgccaacaccattaaaaattatgatgttgtggctttacaggaagttgttgctggtaatggtggtgcgcaagccgtggcacaactcgccgacgaattaaatagaaaaggagccaaatgggattacgtgataagcgatccaacgtcaagtagcgcttataaagtagaacgctatgcttttctttggaaaaccgccaaagtcaagaaaattggcaaagcatggctcgaacaaaaatacaatttagagatagatagagaaccgttttattgcaccttcgaatacaacaacaagcaatttacactcgccaactttcacgcgataaccaaaaagaaacaacccgaaaccgaaatcaaatatttcaaatatttaccagcgcaatatcctgatttaaacttgatttttgtgggcgatttcaattgtccgcaatcgcatactgtttttaatccgttgaaaaagatgggttatcaatcggcattcgtcaatcagaaaacatcgcttaaacaagaatgcaaaaacaacaattgccttgcctcagaatttgataacatctggttcaaaacagccaaaatcgcagtatcaaaaactgaagccatccatttctacaccaattttgaaaccctaaaacaagcaagagcaatctccgatcatattccgattgcagttacattttcaataaattaataggtgattacggttttccgtaaaatacgaacttacgcgtttagtatttttacagaaacgcaacagtcatgaaaaaaaccatacaatttcttgtcggattaattgctgcactactattattcaatacttgtagaacctaagagcttgctcaaccacaacagcttttaccagaatcggcagaagcaatagcgattgactcggctatcaatcatcatgaagacgccacctatcactacgaataccgaacaggaacatcaggagattatcaatacaattatgacgtaattgctaatgatacgatagaaataaactggaaggcaacatc

SEQ ID NO: 4155 - DNA, 24302 bp, synthetic construct
  source 1..24302: mol_type = other DNA
  misc_feature 1..24302: note = Synthetic
tctttcttgtcttgtgaatgcatcgaagaaagttctcgatgtattcgaatattttctgttttagactatcttcctaataagataaggagcacgttgatatcgcttggagatacaccaggaattctacttgcctctgctaacgtttcaggttgaatcttttcgagcttctgtctgccctcagtagatatctcgtgaagttgcgcataattaaatcttcccttgattttgatatcttctaaacgtctcattttatcggcaatgattcgctctctttcgatatatcctctgtatttaattctgatttctgctgcttcggtgatttcttcctctctgttaggaatatcttttaaaatctcgttcaaatggggaataacttcagcaaggttgctcattgtaagttgaggacgagcaattaaatctgaaatcttgatagatgagtggataggagtggtgcccaaacgttctaaacttgcattgatatctttgggttttatgctggttttatcgcagaattgtatgattttagaaatagaatcttctttctgtttccaccaatcgtaacgctctttagtcgcaatacccaattcaaatgccttagaggttaatctatagtcggcatcatcttggcgcaatagaattctatattcagctctcgaggtaaacattcgataaggttcatcgacacccttagtggttaaatcatcgatgagaacgccaatatagctctcgtctcgtttcataacaaactccttattgtcgtagaaacattttagagctgcattgatacctgcaactaaaccttgacctgctgcctcttcatagccagtagttccgtttacttgtcctgcgaagtaaagtccttttatcactttactttcaagagtatgttttagttgagtggggtcgaaataatcgtattcgatggcgtaacctgggcgataaatcttcgcatctcttagcgcagggatcttatgaagtgcgtttaactgcacctcgaaaggcatacttgaagagaaaccattgagatacatctcgttggtgtcggtgccttcgggctctaagaataaaggatgtttgtctttatcggggaatgttacgagtttggtttcaatagaagggcagtatcttggacctgtactttgaatctgtccgttaaacaatggcgagtcggcaatacccttgttgagctccatgtgtgcttcgggggtagtgtaaaaagtccaacatggcaattgtttgagtggcttatgaagattcatatagctgaactgatggaagtcgaagtcgccatcttgtttctccatttcatcgaaatgcaccgaacgtttatcgattcttacaggtgttcctgttttcattcgatcagaacggatacccaattggttgatacattcagtgagatggggtacggcaggctctgcacatctacctccagggaaggttcttcgtccgatgtgcattaagccattgaggaaggttcccgcagtgataatgacacattttgcagtgaattcaactccccaaacggttcttacgccaacaatctcattgtttttaacgatcaactcgtctacttggtcttgccaaatatcgaggttttctgttttatctaaagtttctttccatttagttataaacttttctcggtcgcattgtgcacgtggactccacacagcggggccctttccacggttcaacattctgaattgaatagccgttgcgtcggtaattagacccatttgtccgcctaatgcatcgacttctctaactatttgacctttcgcaatgccaccaatagcagggttacagctcatttgtccaatcttattcatgtcgatagtgattagacaagtcttagctcccatgttggaagcagcggttgctgcctcgttaccagcatgtcctccgcccacaacaatcacatcatatttgaagttcattcttgttattttggttttatccttaaatatgttctcgtataatatataaataggtgtgagtctttcaacgttcttttcaaatgtaaaagaaaccaacctctccttcagtttttaatctgttgttttataagcaatatccttgtgttatgtaataaataaaacatcttcttatagaagcttaaaaacattcgaacacaaaagtacagaataaaattggatttttagtcaaaagctttgatttatcatcaaaatatagtatttttgcaagcggttttacgattcatatacctacaaatgggggtgctgtgaagcgtagaattgtaacttaaacatcaggtttaagcttcaagaagaatatattctaacaattaaataattaattttcagtcaattatgtggttatttaaatcctctattggtagaaaagtgataatgtctgtaacaggcattgcgcttattctatttttgacattccacatgtcgatgaatgttgttgctttgttttcagaagcaggttacaacatgatttgtcatttccttggtgctaactggtatgctgttgtggctacaatgggtcttgcaggtcttgcaatgttgcacattgtgtatgcttttatcttgacagcacaaaacagaagagcacgaggcagcgagcgttatgctgttgttgacaaaccaaagaaagtggagtgggcttctcaaaacatgttagttttaggtattattattcttcttggcctattactacacttgtttaacttctggtataacatgatgtttgcagaaattattggtgttgaatttgctcattctccatcagatggtttcgcatacattagagacacattcgcaaatccagtttacgttgtgttgtatgttatttggattgtggcaatctggttgcacctttctcatggattctggagtgcaatgcacaccttaggtattaatggtaaggtttggtttaagcgttggcaagctatcggcttggtatattctaccatcttaatgttaggattcctcgttgtagttcttgcgtttgcgtttggctgtgcgcctagcttatgctgccattaattcagtgtgtaagaatttaattactttcttttaagatttaaagattatgactaatcagataaattcaaagattccagaaggacctatagcagagaaatggaccaattataaagcacatcaacgtttggttaacccaaagaataaattaaagttagatgtgattgttgtaggaacaggattggctggagctagtgcagctgcatctcttggagagatgggctttaatgttcttaacttttgtatacaagattcacctcgtcgtgcgcactctattgcagcgcaaggaggtatcaatgccgctaaaaactatcagaatgatggtgactcagtttatcgtcttttttacgatacagttaaaggtggcgattatagagcacgtgaagcaaacgtttatcgtttagcagaagtgtcaaatagcatcatcgatcagtgcgtagctcaaggtgttcctttcgctcgtgagtatggtggtatgttagcaaaccgttcttttggtggagctcaagtaagtagaacattctacgcaaagggacaaactggacagcaattgttgcttggtgcttactcagcgcttagctgtcaggtgaatgcaggaaaggtaaagctttacactcgttatgagatggaagacgtagttcttgttgatggccgtgcaagaggtatcatcgcaaagaacttagtcacaggtaaactagagcgtttctctgcaaatgccgttgtaatagcaacaggaggatatggtaatgcttatttcctttctaccaatgcgatgggttgtaactgtacagcagcaatccaatgctatcgtaagggagcttactttgcaaatccatcatacgttcaaattcacccaacatgtattccagtacacggcgataagcaatcaaagcttaccttgatgtctgagtctttgcgtaatgacggacgtatttgggttccaaagaagatcgaagacgctaaagctttgcaagcaggtacaaagaaaggctctgacattccagaagaagaccgtgactattatcttgaacgtcgctatccagcattcggaaacttggttcctcgtgatgtagcatctcgtgctgctaaagagcgttgcgataagggattcggtgtaaacaacacaggtcttgctgtattcctcgacttctctgaaagtattgaacgcttgggagtagatgccattctacaacgttatggtaacctattcgatatgtacgaagaaattacagacgttaatccaggcgaattagcaaacgaaataaacggtgttaagtattataatccaatgatgatctatcctgcaatccactatacaatgggtggaatctgggttgattacgagctaatgacttcaatcgaaggcttgttcgcaattggagagtgtaacttctcagaccatggagcaaaccgcttaggtgcttcagcgttgatgcaaggtcttgcagacggttacttcgtacttccatacaccatccaaaactatcttgcagatcaagcaatttggcctcgtttatctacagatcttcctgaattcgaagaagctgagcgtggagttcaagcagaaatcgatcgcctaatgggcattcaaggaaagcgttcagtagactcgatccacaaagaacttggtcatatcatgtgggaacacgtaggaatgggccgtacagcagaaggacttcgtgaaggtattgcaaagatgaaagaactaagaaaagagttcgataccaacctattcatacctggaagcaaagaaggacttaacgtagagctagacaaagccattcaccttcgtgactttatcatcatgggagaacttgaagcatacgacgctctttctcgtaatgaaagctgtggtggacacttccgtgaagaatatcagaccgaagaaggagaagctaagcgtgatgacgagaactatttctatgtaggatgctggaaatataatggcagcgatacagcagaaccagagcttatcaaggagccattagagtatgaagcaattaaagttcaaacacgtaactataagtcgtaattaagttaacgagtgcatcttatgtcgacagctcacaaataatcgagtacagcagtagcgcacaaggtacccaaaagcccaatggttactcaagtcgacataacaactctaaacgaataagctataaaacccatatggagaaaaatataagtttcacgctaaaagtatggcgtcagaatggtcctaaggcaaaaggacacttcgattcattcgaaatgaaggacatccctacagatacttcattcctcgaaatgctcgacatcttaaacgagcaactcatcgaagaaggtaaagaaccatttgtgttcgaccacgattgtagagaaggtatctgcggtatgtgttcactttacatcaatggacacccacacggaccagctacaggagcaacaacttgccaattatacatgcgccgtttcaatgatggagacgtaataaccgtagagccatggcgttctgctgcattcccagtaataaaggactgtatggtagatcgtggtgctttcgataagattatacaagcaggtggatacgtaacagtacgcacaggccaaccacaagatgcaaacagcatcctaattccaaagcaagatgctgacgaagcaatggattgcgcaacatgtatcggttgtggtgcttgcgttgcagcatgtaaaaacggttctgcaatgttgtttgtaagttctaaggtaagtcaacttgcacttcttccacaaggtaaaccagaagcagcacgccgtgcaaaggcaatgatgttgaagatggaagaactcggattcggtaactgtacaaacactcaagcatgtgaagcagagtgtccaaagaacgaatctattgccaatatcgctcgtctaaaccgtgagttcatcatggcaaagttaaacgactaatattgctttaattaaaatagactaaggatgcctgtctgagaaagataggtgtcctttttcatttaccgccctctcgttcttttattagatagaacatcgagcctaaaaaacgctgccttgtacccttattcatcattccgttacccattgttgtagcagaataagaacgagaaagaaccttcaaaatgccccaatagctgtatttcttcgttattttagccatatttcattaaaacatcttgccccttactttgctccatttaattcattaaaacgccttagaaagaatttaatgaactatattattaatgccttgtgatacacttttattgcattttatttggattgtatgtaataaagtggtatatttgcaacgattaagtttaagaactattcttaactttagtcgtgcgtcggggggcttttcggaagtacccgactttttttatatatatagaagtcctaaaatccactctcttttattacacaatcagtcttttaaaagatattcttttcgtgaatatcctttgctattcgtgtacatctaaaaaagaaacagattatagttgttgaattatttaacggcaacaacatttatgtccgcaccttattttattattcgtagatagaaaacaatgtttgggaaatatcacattggggtagttgatagataataaaaaagaaaacagaatgagctaacccgtgtttaaatccatggggaatgctacctctgttttctttttagcaaataaattacttattgttttgcaacgatataatgtttagaatgtaatttgcagacagaattcttacatctctacataatatttattatagaatcttttaaaagattcagcagcttcatagggcgaataatgagttcttatatctattaaacaataatgctttcaatgtaataggtacaccatcgtgggtgctaaaataagtaagtccaacagaaatgtattcgctaaagtaactcattagcaaaggtgagtgtggtttggcaaattccaatagccacgcacgttcatacgaccaaagacaagctttgttttgttctcccttgtatgggttctctttttcgcctttgtacaatctgcaaaaactgcaaaattccattagttcttgcttcttatccatacttctgtttgaattgagttactacttcttgaatttcttttggtagatagccccacgctttgtcttgtatgtgttgaggtataccataataagcttctgcaatgcaacctgtaatagcagcaattgtatcactatcaccacctatcgaaactgcaaggcgaatagcactttcaaagtctgtgctttcaaggaaacacacgatggcttgtggcactgttatttgacatgtttcattaaagctgtttgtttgtcttatttcattgcacgtttgactgatattgtaaccataaacgtcttttacaagttcgataataagctcaatattcttttcttgcgagataaatgcaatcggcaatacattcggctcccttgataccttcggggtggttatgtgtacattctgcagattttcttgcggacatcaacacgtcttgtcttgtagaaagatacccacatggagatacacgcatagcggatccattgccaaagctgccgtaaggggtaggagttttagaatttatccactgcgaaaaagagcaaccataagcccctttagggttaggatatttcctacaccactcaagtaatgattgttcgaaacttacactacgcaagattgcgtctgcaatagcaatcgtacagatagtgtcgtcagtaaaagaacattcggaagtaaataatttaaagtctgttttattcgtgttgttgaattcaaatctagaaccaacaatgtcaccaattatagctcccagcatatttattcctttcttttaaaattgaaaaactaaatttaatccgcaatatgacgaatgcaattgcttaagtcaataagtacattgcctttttataatgcgttaatatcttcggtgatatgtctctgcaatgcttctattaataacggctatggtttctgatttattaccttctgtatatactgcaaggtgaataacactttcaaaattggtgttttcgagaaaatatacgataggttgtggtgcggttatagttgcttatgatattgcaaagatatacatttggaagcaaatacaactaagagggaaaactgacacctcgtaaaagcgttgcctacaataacacaaaggtatagattttttattaaataataccgaaacaatgtgctttttattattctaacgagccattattatcgagataagattgcaggggagtggggcgaaaggaaaggttgtgtggagggatgtacgtgcccttttaatcaatgataatcctcattctttttgaagactattatgatacggtcctaaaaccattgcaattgcgtttcaaaagcattggaattgcacaccaatatcatcgcttttatgtactaattgcattgagtttattttttaagttctatattcctacgaaatctttgctgtgcttccttcaaaacgatgtgacccttcttcgctctgtctacattatttcaacgccttagaaagagtttaatgggctatgttattaatgccttgcaataaaaaactatacaaaaaagctctctaacgacctgaaatcatgagagagcaatatatttatatgatgtgattttctatgccactaagcgccaaataaaggcgatgagcatcgtaacgacaatgctaaaaacaagctttgttttgttctcccttgtatgggttctctttttcgcctttgtagtatctgcaaagctccattaatttttctctatcatccatgtttctttttacaatttatattgtcaacttcagtagtatctattattaccttttctcctttagcattgcattctttaatttgtttgttagtatcctttattccttctataatctcttcataaagatcctcgtctacaccgagcttctttgcctcctctttgcttatgtttaggtaaaatacactgtctttataaaaggcataattttttagcgcaagggcagcagctctctttattcttatgtctttaggcatttgtcttagttcttcaacactaagcaatagtgcctttgcctcttcggcctcagaagcatatacacgatttcttacgctattgtttgtttgcgatggagagtcttttttagcgcacgaagatacaatcaatatagccaaaagacttaaaggaataagttttagaaattttttgtccatctgttttatgtttaataggttaataaaatggtatgataaagagcatgaataaaagaaaggaaaattctcttttctgcttaataagtaatagtctttttgcaaatataggtaaaaaaataaatgcagatattgtttttatcctatttaacgcaggcacttctcgttttattttatgtcttcacagaacaattcaaaccgcatttgagtggaagaataacgacatttggatgtattcttttttatttcttttccctgttctattcaataaaagctccgtaaagatagtttaaagaagctttaatcccttgttttctttctttgtgtcatctccttatttttctatgaacagcctcttgcgtcctaaaaccattgtaattgtgttccaaaatcattgcaattacacgccaatctcaccgcttttacatactaattgcatagagtttaagggagacttattttacagacggtttatacatcttatagcagaaaaatagaaagagccaattgtaggggagttgatgatagaatggtgcgttaaaaatattgtcttaatgtatttttatttaaaatattttcttacttttgtaaaagacaacacttaatgaaagatatagggaataactataagctatatataaaaacagtactcccacggttgtccgcaggagcaagaaatcttcggcttatagccttgttgtgaaaagtcttcacatgtatatctgtgtgcaaatataaaactattatttgaaaaaacaaataaaaaccttaaaaatatgacgcaaaaaattttgggtatagaccttggaacgaactccattggtacttctgtacgaaatactgacctcggaaataatctagtagaccagttagaattcttttcttctgacatttttaatgcgagtgttaatggagaaggagtaaatggaggaaaaggaggtagggagtattctttagcaagctctcgatctgcaaaacgtagaaaacgtaggctatatgagcatcgtagatataaattgtgggctacactcgacttgcttatcaaaaacaatttgtgtcctatgacgccagaatcgttagagcaatggcgtacttatgataagaaaaagaaacttttcagacaatatcctattgacgataaagcatttcattcgtggataattcttgattttaatggcgatggaaagcccgattattctagtccatatcagttgagaagagagttggtttcagttcaattagactttaatcaagctatcgaccgatataaattaggacgagctttgtatcacattgcgcaacatagaggttttaaaagtagtaaaggagaaaccattgcagagcaagaaaagcaagaagacgacagcaaaaaagataagaaaaaagcccttgctgaagaacatgttgatgcaataaaggcctctgaagaaaagcattcaaagggactttcaacctatatgcaagagcataatttaaaaactgttggtgtagcttttgctcaactagaagacgaaggaatacgaattagaaaaaatagtgagtataaagcaatacgttcacaacatcaagacgagattaaagaaatatttaaatttcaaaaagggttatctgaacaaacacaattattagatactcttataagcgaaaagcaaggcattggaaccattttttataagcgtcctttgcgttctcagcgtggaaatgtaggcaaatgtacacttgaaccacgcaaaccacgttgtccaataggtcatcctttatttgaaaaattccgtgcttggacattcattaataatataaaagctaagtcgcctgattcagattctgcagaaccactgcctatggatctgaagataaatatctataataaactcttcttgtcgagagttaaggaagattttaaattcgaagaaattaggtatttcattgagaaacaatggggcgtggctctttctaaggacgataaaacaattaattatagagatgatacgagtgtggcaggttgcccaataacagctcgtatgataaaagttttaggcgaaaactgggagaatttccaggttttaggaacgaaagagcgacaaacacaaggcaagtctaataatgcattgcaccaggtttgctacacagcagaggatatctggcatctttgctatgatgcagaagattctggtaaggtgcgtacttttgctgaggaaatattgggttgggacgagaaaaaggcttcagaactagtgcgtctttggtcggcaattcctcaaggatatgcaatgttgagtcaaaaagccattcgaaatattaatcgaatgttgttgtttggcttgaaatattcagacgcagtattgcttgcaaagctaccagatatcctagaattatcggatgaagatattcaaacaatcatcaagaaagtacaacaactagaagaagttgtaaacgaagagaaaagaattggcaatattgttaactcgcttattgctaactataaagctgaaagcctggagcatcgctttgccgatcacaattatgaatatcagttagatgagtcagacgaaagagagattatcaaacacatagagagtaatatcggaaaacaacgttgggaattgatggatgccgacgagcaaatctcaatattagaaggggttagaagcggatatcaagcattctttgctagacataaacgcacatttgttgagcttccacaactaggtaagcgattagtagagttgctctcaaaagtatatccttctgttgagaagaagcaatgggagcgtttgtatcatccttctcaaatagcgatttatcgtccaatattgctggataactcagacgaaaataagcgtttgggcaatccaaacattggagcaataaagaatccaacagtgatgcgaaccctcaataacttacgaaggagagtgaatcagctattagatgatggggtattagtgcctgatgaaacaagagttgtggtggaaactgctcgtgacttgaataatgcgaatgcaaaatgggctttagaacagtatcaagagataaggagaaaggagaataagaaaatcaaagatatcttagaagagttctatccacaatttagcaacatcacaagtacagatgtagatagggctcgttatgttatagaacaatacgaagaagataattataagttggaaaaagaaatcggaacttatagtaagaatattaacaagtataagtgttggttagaacaaggaggacaatgtctatatactggacgaattattagcttgtcaaatcttttcgattctaatgcattcgacctcgaacacactattccagcaagtgttagttttgacaattcagaccaaaatatgacactatgcgaagctcattataaccgtttcattaagaaaaataacattccaacggcaatgccgaattacgaaaaggatgttacaattgatggaaagctatacactgcgataaaacctagattggaaaaatggaaaaaacgcataaaaagactctctagaaatgttgaatattggaaagttcaagcacgacgtgcgcaaatgaaagacgataaagataagtacacaaaagagaaacttctttggcaaatggagttgcaatattggaaagataagttacaacgttttaccattcttgaggttaccgatggctttaaaaatagtcaattggtagacacccgcatcatcactcgacatgcaactctgtatctaaagagtgtttttaaaaatgtagaggtgcagagaggaagcacaactgcagagttccgaaagatactaggattgcaaagtgtagaggaaaagaaagatcgtacattgcactcgcatcatgctatcgatgcaactgttttaacaactatacctgctgcagctaaaagagatcgtattcttgaactcttttacaaagtgcaagagaaggaaagaatacttaaaaattactctggagatgctcctataggtttaaaacaagatttagaaggcttgcaggaaaagcttaaaaaagaggtagaggcttgtaaacttggaaacaaactaggacaacttggtagctttattaatgagaatattattatcagtcataatgtaaaagaccaaactttaaccccttctcgcaaacgattgaggagaagaggacgtgtggtttataataaaaaaagagaaaatgataatgataagaatcctatttggcaaacaggagataccttaagaggagagattcataaagaaagttactatgctgctatcacgcaatacgcaaaagataaagacggaaatgttctccttaataatggaaaacctaagatagatcccacgatttggtatgtaatacatcgagaacttacatattttgatgattggaaacctcttgaaaaggtaattgtagataagaatctttataaattgatgaaagaacagttcccagatggaacttcttttaaaaaagcttgcgagcaaggtttctacatgattaagaagggaaaggacaaagaacataatataaagactcacagaataagacatgttagatgctattcagatgttaaaggggcattgaaaataaaagaacaaaccaataaatcaacaaaggaatataagcaatatttctatgctgcagttggtgatttatacacaatgtgttgttataccaatggaaaaaataaggaatatagggtatatcgtttatatgatattgcacaacatcgtaagagtggaatagaagatatccctgaattcattacagatgaaaagggtaatcgactcgagtgggcttataggttgcgtagtggtgatatgatattgctatacgaaaatactccagaagagttgtatgacatggatcctgtgaacctaaaacaaagattatataaggttgatagatttgaaagtaaaggccctacgatatgtatgacacatcatttgattgctaatggagaaagaggaaagtcaataaaagattataataaaatgccaccaacggctcgatgtagcgtgaatactttaaaattcttgataatgggtgagcataacgacttcgttataaagggtaataatattatattcaatcatcgatgattaagaaaacattatactttggcaatccttcttatctctcacttcgtaatgatcagttggttattcaacaaaaagtgggagagaaggaagcgccaggtataataaagaaaggcatagttagaactattcctatcgaagatataggtataatggtgcttgatcatgcagatatcaccattacacaaggtgttttagctgcattactcgagaataccgttgccgttataacatgtgatgaagagcaaactcttaagggaatgttgctccctttagtaggaaatacattacatcaagaacgctttcgcagtcaattagaagtaaatatccctgtaaacaagcagttatggcaacagacgatcaaagcaaaaatagaaaatcaagccttttgtttgcaacgaaatacatcaaaaacagcttctccacttcatgtgttagcacgtagtgtgaagagtgatgatgcagataataacgaagaacaagcagatgtttattattgggagtacatctttccagagtgtctaaacttcataagaagtgataaagattcacccattaacgaacttcttaattatggatacaccatcttgcgtgcagttattgctcgtgcgttgataggaagtggattgctacctgtgtgtggaatccatcgtcgtaatcacaataatgattattccttagcagatgatattatggaaccttattgcccatttgtagacgattgggtaataaaaacaattcaaaagttaggaaatcctacagaattaactctagactataagcgagaaatgttgcaaatacccgttattgatgtttcaatagcaggcaaacgcagtcctttaatgattgctgcagcacaaacagcagcaagtcttgcaaagtgttatagtggcgaaagccgtaaaatatattatccttcttttccttaatgcaaagattaagcgagtatagaattatgtgggtaatggttcttttcgatcttccaaccaccaacttaaaagaaaagcgggactatattcttttccgaaagaatttagtaaaagatggttttatcatgtttcagtattctatttacgtccgacattgtgccagtagagagaatgctgcagtgcatgtgaaacgtgtaaaatcctttattcctcgctcaggagaggtttgtattattgttataacggataaacaatttggtgaaatagagatatttagtagctctgaaccgcagaagccgaacacacctggagtgcaacttgaattattttagaatataaaaaaagagtcctaatattaatattgggactcttttttgttgcaatttttattttacataaacataagatatattattgaagttcaattaaatatatcattcgaggttgcttatgatattgcaaagatatacatttggaagcaaatcacaaccagtaatgaagtgaagtatagtaaaatcagggttgcttatgatattgcaaagatatacatttggaagcaaatcacaaccaagtattccatggtattttgataaggcagttgcttatgatattgcaaagatatacatttggaagcaaatcacaactcattagcgcattaaataaggctttggcgagttgcttatgatattgcaaagatatacatttggaagcaaatcacaacgtagtatagctttcgtaacagtgaagaaaaggttgcttatgatattgcaaagatatacatttggaagcaaatcacaaccagcgtcgagcgttacaagcgtgcagacgggttgcttatgatattgcaaagatatacatttggaagcaaatcacaacgccctcttctctctcgatagtaagcgtttggttgcttatgatattgcaaagatatacatttggaagcaaatcacaactacttgctccttgtgcagttttttccgcaagttgcttatgatattgcaaagatatacatttggaagcaaatcacaacacctcctagtgagaatatgcctagtggatagttgcttatgatattgcaaagatatacatttggaagcaaatcacaacttaattacttgacctttcgctttgttttcgttgcttatgatattgcaaagatatacatttggaagcaaatcacaacctactagtagtgtagagccgtttgattatggttgcttatgatattgcaaagatatacatttggaagcaaatcacaactacttgctccttgtgcagttttttccgcaagttgcttatgatattgcaaagatatacatttggaagcaaatcacaacaattactaaaacctttgtaacctcgaaagagttgcttatgatattgcaaagatatacatttggaagcaaatcacaacgatattgctactcacactgggtatttctgtgttgcttatgatattgcaaagatacacatttggaagcaaatcacaaccattgtatgtctatattaaaaacaaaggtggttgcttatgatattgcaaagataggcaactttagtcaaatggcaacaccataacacatttttattattctaatgaaccattgcgagatatgagggtgcaggacgaatgtaaagcctttgtagggcagtgtttgtgttcttcctgtttaaaatcattacaattacagactaaaatcattgcttttatgccccaattccattgcttttattgtccaaaagcagtgagtttacaaagtggaatgaatggagatgaaaaagaactcaataggagagaaaagcgaatggggtatattgaagccgtgaaagagtaggtttgtggagtgataaaggctgtaatgtgtgagataatagaataccaaaaagctccctaacgacctgaaatcattagagagcaaatgtgttatatgatgtaactttctatgccactaagcgccaaataaaggcgatgagcatcgtaacgataatacctaaggagagtggaagcaaggttgcaagggccgtccacttcacacttttcgtctctttgtatatcgtataaatcgttgtactacatgggtgatgcaacaaacagaacaccatcacacacacagcagtgagcaagttccaaccacctttcaataaaatcatcttcgtttgctcgtctgttccttccattaacacgccagatgaggcgaaatctgcagggcctaacaccagcatagtgagcattaatatcgttgggatcacaatctcattggcaggaatagctaagatataagctaaaagaataacgccatttaagcccattagccaccctggaacgtctaaaaacgatatcaagtgctgagcaatactaacgtcgcccactgtgatattacaggataaccaaatcaaagcacctgctggagcagcgaaaacaacagcacgccaaagtacgataagcgttcggtctatgaccgaggtgtagagcgtttgccagaattgaggtggacgataaggaggtaattcgaggtggaaggtagacacttcgccacgcaataccgttctcgaaagtacccatgagctaccaaacataaagcctactcccgccaaaacaaccgccatcaccgccaaaagagccaccacattactatattgagagggcactgctgcacctataaagagcgttgcaaggaggatttgagtgggccaacgaccattgcaaagcgaaaagttattggtgataatggcaatgagtcgctctctactactgtcgataatacgagtggaaaccacacctgctgcattacagccaaaacccatactcatcgtaagagcttgctttccgtgtgctcccgaacgacgaaatagctcgtcaaggttaaacgcaacacgtggaagatagccgaaatcctcgagtaaagtgaatagaggaaagaagatagccattggtggaagcatcacagaaacaacccaagccgtagccaaatacacgccatctaccattaaacccgtgaaccattcaggcgaatgcatcgacacaaacaactctctaagatgtggatgtgcaaagccaatcaaaatctcattgagccaagtagaagggtagttagaacctattatcgtgagccaaaacacacaacagagcagtgccaccatgataggaaagccccaaatgcggtgcgttagaatgcggtcgagcttgatatcgaatggaagtctaccccgttcgttaccttgttgcaccacttctcggcatatttcttctgcttgtgcatagatatcttccatccattggtcgtgaaagttattgccaatttgcaagtgaatacgttctgcaagggcgttcaattctgcgttactaaagcgttcttgcacgctcacatcgccttctatcaatctaaaagcaatccattcggcattgtgaatatcaggaaaatgctccttcaccttatccgatagttcttgaataagagcgcttgtttgagcaggaagattgatgcttcgatgaggcttgcacacatattcgcccttcaccacagcccttgtcattgccaaaagctggtctattccttgtccagagcgtgccgatgcgcccacaacaggaatgcccaaacggcgtgaaagcgcattgagattcacctcaatcttatttcttttcgcttcgtctaacaagttaacgcacagaactgctttgttggtgatttgcaacacctgcaaaatcatgttcatattgcgctctaatcgggtagcatctgccaccattaccgttacatcaggattgccaaagagaataaagtcacgtgcaatttcttcgtcttcactcgtagatgataatgaataagtaccaggaaggtccacaattcgatatgcatcattttgataaacaaagaacccttcggccttaccaacagtctttccgggccagtttcccgtgtgttgtttcaagccagtaagactgttaaacaccgtacttttacccgtattggggttgcccgccagtgcaattacatatttagattgtattccttgcgctccttttcgctgcaaagtgtgcaggtttgcttgtgcgcaattggcgcaaggactattgtttgctattttgttcatggatgaaattctttagagttgtaattctttcgtaaggtgataaatgagttgatgcgatagaaaaacagagccgttgaagcctgttctattgcacatcgttggctacctttcttacgttttgaatcaaaatgtattgtgcttggtcgtgtcgaagggcaattgcagtgcctctaaccacgtaagctacagggttacccatcggacttttcatgtcaatggcaattctactacctttcacaaaacccaaatccatcagtctacggcgcaatgctccacggcaagaaggcgacaaacccacaatggtagcctgctcgtttgcctgaatagtggttagtcgttgcgcccttgtctcaggcatactctcggcttcttccttcgttacttccatcctgtttatcgcctctagtgcaacaagaggtaggcacatctgctcgccttcgtatttaaacgagaacgaggtgctattgatttcggtgatataaataatcgagtccttggttaatcctaaatctgtaatctgcttaaacaacttcttgtcatcgtcttccacatgcgtaatccgccaccaggtgtgctctttcaagggtaattcgcaagtgtcgtgaggcatcattgcgagcgattgagtgggaatggggtcgccatgagggtcgaaaagagggttacctaaaagagaggcaatgcgactttgctcctcatctgatataaggtgctccatacgatgcgccctttcgtgccattcggtgggtgcatatccagagtgttcagcaagatattgctcgtaaatgcggtgcgctctaatcaatttaagggcgtttcgcttacccttttcagtaagctctaactgtgcacctgcagtgatttcttttgttaaaacaacagctcctatcaccttttccagttcttcttgagtaacgttcaaaatgcttttctgcttcaaagcatcttcaaacgaaagcgaaccgccaaggttataaagttgttttataaagtcttcttgtagttccttctgtcttttctgagtgcgttcgtttaacgaatagttcttgaaaggcagtaaagtaacaagtttttctatatatttattcatctgtttcgtttactgttatgttgcaaaggtacaaataatatatagagtgcttttatctaacgaactctttttttattataaggtataaataaaagcacagcttttgccttgtaatggcagtgcttttgaggtgtaaaagcattgcaattggttggtaattagatagatattgcaaataaagtgataggcgattggctctcaatgactttgaaagagcaatcctgaaaaaagggaaatacaccttatcctcataaatgaggaaaaaaatcttcaatttttatacaacattaaaaataaagtattatatttgacccataaacatattaattagcctatggatatacgtaagctgataaaagtgaatactttgttcacctatcgtcaaaagattgttggattggtaatgtgtggtactattgtaggtttggttctggtgtttgcctattacttgcgtttgcatacttatttaataggagatgacccaggagcttgcgtcaattgtcacatcatgacaccttattatgcaacatgggcacattcttctcacggaagaaatgcaacgtgtaacgattgtcatgtgccacatcaaaacatcgcaatgaaatactttttcaaaggaaaagacggaatgaaacacgtcgcttactttgttactaattctgaacgtcaagccattagagcagaagaagcatcttcggaagtgataatggacaattgtattagatgtcactcagatttaaatcaggctgcagttaaaacgggacgaatagattatatggctgccaaaagaggcgagggaatggcttgttgggattgtcatcgtgatgttccacatggcggaatgaactctcttacaaagacaccaaatgcagaatcgcaggtacctttgcctccaaatcctgttcccgagtggttacaaaaagctttaaaacgataaaacttaaatcctaattaataactcaatagaaaagaatagaatttcatcttcttttgaattaaaaagaaaataaagcgaacaatcattataataacttgaaatctaaaactaaaagaatatggcaaagcaattgaagaaatggaaaggatggatgctttttggtggttccatgctagttgtatttgtgttaggacttatctgtttctctctattagagcgcagagcagaggtcgcaagcatttttaataatcgccgagtagtgatgactgactctattgtttcacagaatgagaagttcaaagaggactttcctagagagtatgaaacatgggcaatgaccgaagatacaacgtttcaaagtaagtataacggctcacaagagagagatattctcaaagcttatcccgatattgtaattatttgggctggctattccttctcaagacaatacaatactccacgtggtcaccgtcatgctattgaagatatgcgtaagattttgcgtacaggtaaccccggagtagataatgataccgacatacaaccaggtacttgttggacttgtaagggtccagatgtgccacgtttgatgcgtgaaaagggtgtagcagcattctatggagctaaatggagcgagtggggagaagagaatatgaatacagttggatgctcagattgccacgatgcacgcacaatggaattgaaaccagctcgtccagccttatatgaagcatggcaaagagtaggtaaagacgttaaaaaagcaagtcatcaagaaatgagatcacttgtttgtgcacagtgtcataccgaatattacttcgaaaaagagaaccatcagtatcttaagttcccacaagataagggcttaacatgcgaagatgctgaggcttattacgatagtattggattctatgattatattcatccattgtcaaaggctaagatcttaaaggctcaacaccctggatatgaaatgtttaaacaaggtattcacggacaaagaggtttgagttgtgcagactgtcacatgccttatatgcagcaaggtggtattaaattcaccgatcaccaggtgcaaagtcctcttgcaaagattgatagaacatgccaaacatgccacagacaagatgcagaagtgcttcgtcagaacgtttatgatcgtcaaaagaaggtgtatgacttcgctgttaaggtgaataaagaacttgcaaccactcacttagaagcagaattcgcttggaagaagggtgcaactgaaaacgaaatggctactgctcttaacgatattcgcaagagtcaatggcgttgggactattctttagcaagtcatggtgctgcattccacgctccacaagaggtgatgcgactccttgcagaatcaatgtcgtatgctaagagcgctcgtatcgagatcgcaagagtgcttgctaagcatggattcacaggtcaagtgcctctcccagacatctcaactaaggagaaagcacaagcttatatcggtttagatatgaagagcttgaaccaaaagaagactaagttccttaacaccatcgtaccaaaatggattgagagagctaagcaaaagaaaagatttatcactcaacctctttaataacagcgcatctgttgcgacctaagagctcatccattgcccttcaacggcacacgttctaatcgcaatagaaacgaaagaggaaaagaaataataatattacagaattcaaacaaatagatagttaacaatgatagatgtcagattgcttttcaaaacccgtgtacagcaaccgctataaaggtgttgttcatttgaaagcagtttgacatctatttcatatcgtgttctcaagagctaataaaaagaaaagacgagccgcacaaagattatctttgtgaaaaacaaaagaggtgctattgctttgcaaaaccattgcttttagtctgcaaagtcaatgcaattaaagcataaaagcaatgccatttcaatcccacctcaaaaccctttgtagataaaggttgttcgccttgaaagcacctgagccgtaactactcttgacaagtttaataataacgaaaaaagaatgtggcaaaaaccttggaaattgcgtgaaggaatcgccattgggtgcggacttcttgtgataggagcaatacttcagttcatcacaggaggaatactttggcaactttttgccttcccagccaatgcacttgcattgcttatctaccttttattgataggaaccgcctattggatgcgtgagaaagtatactttattcgctatctcatgagcaccaagtcggcagctacctctatgcttttcgtggtaggtctcacctttatcatgggcttaacacgccaggttcccagtggaaataaagccgtagaccctatcggtttaaccaatatgttgtcgttctggcccttcgttctcatctatttatggatgacaaccaccgttggtttggcaacacttcaacgccttgtgcatttcaaaaagcaacgttttgccagtgttatttcacacttagggctctttattgttgtcgtttgtggaaccttaggctctgcagatatccaaaagttaaagatgtattgtcttccaggagaagccgaatggcgtgcaatggacgagcatggacatcttaaagaactacctattgccatcgaactaaatcgttttatccttgaaaaataccctgccgaactgcaaaaagtgcgtgcagataagggtaagacaacaatgatgaagattccaactccaaagcgatatgccagcgatgtggagatttataccgaagaaggaggctactataaaaccacaatcgaggtgaacaagcccttctcagtcaatggttggaagatctatcagtttagctatgacgagcgttttggaaagaataacaccgttagtatctttgagttaataaccgatccatggcttccttttgtttata

SEQ ID NO: 4156 - DNA, 24299 bp, synthetic construct
  misc_feature 1..24299: note = Synthetic
  source 1..24299: mol_type = other DNA
agtttcacaaggtagctttccaggctttctacataacgcaataccagcgtttagtttgatggcaatagcagaactcataacaaagccacggctttcgatgccaactaccttagtaatgcccttgtctttgtaaagatcatacatttcatcggcaattgtttttaagcactctgcgtttttaaatagggtggtaacatctctgaagttgacaccctttataggccaatctggaattgaacgcagattgtctaataatagtttgttgttcattatcaaataattgtattgttgttttttgttcttttgtttcacgtgaaacttgcgtttgtcttgcgatagttccacgcttgtttctttcttgtcttacgaaagcatcgaagaaagatctcgatgctttcgaatgttattgcagttatattatcttcccaataaaataaggagcacgttgatatcgcttggagatacgccaggaattctacttgcctctgctaacgtttcaggttgaatcttttcgagcttctgtctgccctcagtagatatctcatgaagttgcgcataattaaatcttcccttgatcttgatgtcttctaaacgtctcattttatcggcaatgattcgctctctttcgatatatcctctatatttaattctgatttctgctgcttcggtgatttcttcctctctgttaggaacgtcttttaaaatctcgttcaaatggggaataacttcagcaaggttgcttattgtaagttgagggcgagcaattaaatctgaaatcttgatagaagagtggataggagtggtgcccaaacgttctaaacttgcattgatttctttgggttttatgctggtttcatcgcagaattgtatgattttagaaatagagtcttctttttgtttccaccaatcgtagcgctctttagtagcaatacccaattcaaatgccttagaagttaatctgtagtcggcatcatcttggcgtaataaaattctgtattctgctcttgaagtaaacattcgataaggttcatcgacacctttagtggttaaatcgtcgatgagaacgccaatatagctctcgtctcgtttcataacaaactctttatcgttatagaaacattttagagcagcattgacacctgcaactaaaccttgacctgctgcctcttcatagccagtagttccgtttacttgtccagcgaagtaaagtccttttaccactttactttcaagagtattttttaattgtgtggggtcgaaataatcgtattcgatggcgtaacctgggcgataaatcttcgcatctcttagtgctgggatcttatgaagtgcatttaactgcacctcgaaaggcatacttgaagagaaaccattgagatacatctcgttggtgtcggtgccttcgggctctaagaataaaggatgtttgtctttatcggggaatgttacgagttttgtttcaatagaaggacagtatcttggacctgtactttgaatctgtccgttgaacaatggcgagtcggcaatacccttgttgagctccatgtgtgcttcgggggtagtgtaaaaagtccaacatggcaattgtttgagtggcttatgaagattcatatagctgaactgatggaagtcgaagtcgccatcttgtttctccatttcatcgaaatgcaccgaacgtttatcgattcttacgggtgttcctgttttcattcgatcagaacggatacccaattggttgatacattcagtgagatggggtacggcaggctctgcacatctacctccagggaaagttcttcgtccgatatgcattaagccattgaggaaggttcccgctgtgataatgacacattttgcagtgaattctactccccaaacggttcttacgccaacaatctcattgtttttgacgatcaactcgtctacctggtcttgccaaatgtcgagattctccgttctatctaaagtttctttccatttagttataaacttttctcggtcgcattgtgcacgtggactccacacagcggggccctttccacggttcaacattctgaattgaatagccgttgcatcggtaattagacccatttgtcctcctaatgcgtcgacttctctaactatttggccttttgcaatgccaccaatagcggggttacagctcatctgtccaatcttattcatgtcgatagtgattagacaagtcttagctcccatgttggaagcagcggttgctgcctcgttaccagcatgtcctccgcccacaacaatcacatcatatttgaagttcattcttgttattttggttttatccttaaatatgttctcgtataatatataaataggtgtgagtctttcaacgttcttttcaaatgtaaaagaaaccaacctctctttcagtttttaatctggtgttttagaagcaatatccttgtattgtgtaataaataaaacatcttcttatagaagcttaaaaacattcgaacacaaaagtacagaataaaattggatttttggtcaaaagctttgatttatcatcaaaatatagtatttttgcaagcggttttacgattcatatacctacaaatgggggtgctgtgaagcgtagaattgcaacttaaacatcagatttaagcttcaagaagaatatattctaacaattaaataattaattttcagtcaattatgtggttatttaaatcctctattggtagaaaagttataatgtctgtaacaggcattgcgcttattctatttttgacattccacatgtcgatgaatgttgttgctttgttttcagaggcaggttacaacatgatttgtcatttccttggtgctaactggtatgctgttgtggctacaatgggtcttgcaggtcttgcaatgttgcacattgtgtatgcttttatcttgacagcacaaaacagaagagcacgaggcagcgagcgttatgctgttgttgacaaaccaaagaaagtggagtgggcttctcaaaacatgttagttttaggtattattattcttcttggcctattactacacttatttaacttctggtataacatgatgtttgcagaaataattggtgttgaatttgctcattctccatcagatggtttcgcatacattagagacacattcgcaaatccagtttacgttgtgttgtatgttatttggattgtggcaatctggttgcacctttctcatggattctggagtgcaatgcacaccttaggtattaatggtaaggtttggtttaagcgttggcaagctatcggcttggtatattctaccatcttaatgttaggattcctcgttgtagttcttgcgtttgcgtttggctgtgcgcctagcttatgctgccattaattcagtgtgtaagaatttaattactttcttttaagatttaaagattatgactaatcagataaattcaaagattccagaaggaccaatagcagagaaatggaccaattataaagcacatcaacgtttggttaacccaaagaataaattaaagttagatgtgattgtcgtaggaacaggattggctggagctagtgcagctgcatctcttggagagatgggctttaatgttcttaacttttgtatacaagattcacctcgtcgtgcgcactctattgcagcgcaaggaggtatcaatgccgctaaaaactatcagaatgatggtgactcagtttatcgtcttttctacgatacagttaaaggtggcgattatagagcacgtgaagcaaacgtttatcgtttagcagaagtgtcaaatagtatcatcgatcagtgcgtagctcaaggtgttcctttcgctcgtgagtatggtggtatgttagcaaaccgttcttttggtggagctcaagtaagtagaacattctacgcaaaaggacaaactggacagcaattgttgcttggtgcttactcagcgcttagctgtcaggtgaatgcaggaaaggtaaagctttacactcgttatgagatggaagacgtagttcttgtagatggccgtgcaagaggtatcatcgcaaagaacttagttacaggtaaactagaacgtttctctgcaaatgccgttgtaatagcaacaggaggatatggtaatgcttatttcctttctaccaacgcgatgggttgtaactgtacagcagcaatacaatgctatcgtaagggagcttactttgcaaatccatcatacgttcaaattcacccaacatgtattccagtacacggcgataagcaatcaaagcttaccttgatgtctgagtctttgcgtaatgacggacgtatttgggttccaaagaagatcgaagacgctaaagctttgcaagcaggtacaaagaaaggctctgacattccagaagaagaccgtgactattatcttgaacgtcgctatccagcattcggaaacttggttcctcgtgacgtagcatctcgtgctgctaaagagcgttgcgataagggatttggtgtaaacaacacaggtcttgctgtattcctcgacttctctgagagtattgaacgcttgggagtagatgccattctacaacgttatggtaacctattcgatatgtacgaagaaattacagacgttaatccaggcgaattagcaaacgaaataaacggtgttaagtattataatccaatgatgatctatcctgcaatccactatacaatgggtggaatctgggttgattacgagctaatgacttcaatcgaaggcttgttcgcaattggagagtgtaacttctcagaccacggagcaaaccgcttaggtgcttcagcgttgatgcaaggtcttgcagacggttacttcgtgcttccatacaccattcaaaactatcttgcagatcaagcaatttggcctcgtttatctaccgatcttcctgaattcgaagaagctgagcgtggagttcaagcagaaatcgatcgcctaatgggcattcaaggaaagcgttcagtagactcaatccacaaagaacttggtcatatcatgtgggaacacgtaggaatgggccgtacagcagaaggacttcgtgaaggtattgcaaagatgaaagaactaagaaaagagttcgataccaacttattcatacctggaagcaaagaaggacttaacgtagagctagacaaagccattcaccttcgtgactttatcatcatgggagaacttgaagcatacgacgctctctctcgtaatgaaagctgtggtggacacttccgtgaagaatatcagaccgaagaaggagaagctaagcgtgatgacgagaactatttctatgtaggatgctggaaatataatggcagtgatacagcagaaccagagcttatcaaagagccattagaatatgaagcaattaaagttcaaacacgtaactataagtcgtaattaagttaacgagtgcatcttatgtcgacagctcacaaacattagagcacagcagtagcccacaaggcatctaaaagcccaaaagttctcaagtcgacataacaactctaaacgaataagctataaaacccatatggagaaaaatataagtttcacgctaaaagtatggcgtcagaatggtcctaaggcaaaaggacacttcgattcattcgaaatgaaggacatccctacagatacttcattcctcgaaatgctcgacatcttgaacgagcaactcatcgaagaaggtaaagaaccatttgtgttcgaccacgattgtagagaaggtatctgcggtatgtgttcactttacatcaatggacacccacacggaccagctacaggagcaacaacttgccaattatacatgcgccgtttcaatgatggagacgtaataaccgtagagccatggcgttctgctgcattcccagtaattaaggactgtatggtagatcgtggtgctttcgataagattatacaagcaggtggatacgtaacagtacgcacaggccaaccacaagatgctaacagcatcctcattccaaagcaagatgccgacgaagcaatggattgcgcaacatgtatcggttgtggtgcttgcgttgcagcatgtaaaaacggttctgcaatgttgtttgtaagttctaaggtaagtcaacttgcacttcttccacaaggtaaaccagaagcagcacgtcgtgcaaaggcaatgatgttgaagatggaagaactcggattcggtaactgtacaaacactcaagcatgtgaagcagagtgtccaaagaacgaatctattgccaatatcgctcgtctaaaccgtgagttcatcatggcaaagttaaacgactaatattgctttaattaaaatagacaaggatgcctgtctgagaaagataggtgtcctttttcattttacgccctctcgttctccaattcggtagaatattgagcctaaagacatcgccccgcccccttagtcatcattccgttacccgttgttgtagcagaaagatgaggaaaagaaccctcacaaagccctaatagctatatttcttcgatattttcgctgtgtttcattaaaacacctcgccccttacttcgctccatttaattcatttaagcgtcttagcaagagtttaataaactatattattgatgccttgtgatacatttttattgcattttatttggaacgtatgtaataaagtggtatcgtttgcaacgattaagtttaagaactattcttaactttagtcgtgcgtcgggggcttttcggaagtacccgacttattttttatatagaagtcctaaaaatccctctcttttttattacgcaatcagtcttttaaaagatactcttttcgtgaataccctttgctatttgcatatatcttaaaaagaaacggatatagccgttggcttattcaatggcaacaacatttatatccgcaccttattttattattcgtagatagaaaacaatgtttgggaaatataaaaatggggagttgatagataataaaaaagaaaacagaatgagctaacccgtgtttaaatcaatggggaatgctacctctgttttctttttcgcctttgtagtatttacaacactccattagttcttgtttctcatccatacttctgtctgaatgtaatgattatatcttgcatttcttttgggagatatttccacgctttgtcttgtatgtgttgaggtataccataataagcttctgcaatgcaacctgtaatagcagcaattgtatcactatcaccacctatcgaaactgcaaggcgaatagcactttcaaagtctgtgctttcaaggaaacacacgatagcttgtggcactgttatttggcatgtttcattaaagctgtttgtttgtcttatttcatcgcacgtttgactgatattgtaaccataaacgtctttcacaagttcgctgataagtttaatatttctttcttttcttgcgagataaatgcagtcggcaatacattcggctcccttgataccttcagggtggttatgtgtacattcagcagattttcttgcagatatcaacacgtcttgtcttgtagaaagatacccacatggagatacgcgcatagcggatccattgccaaagctgccgtaaggggtaggagttttagaatttatccactgcgaaaaagagcaaccataagcccctttagggttaggatatttcctacaccactcaagtaatgattgttcgaaacttacactacgcaagattgcgtctgcaatagcaatcgtacagatggtatcgtcagtaaaagcacattcggaagtaaataatttaaagtctgttttattcgtgttgttgaattcaaatctagaaccaacaatgtcgccaattatagctcccagcatatttattcctttcttttaaaattgaaaaactaaatttaatccgcaatatgacgaatacaattgcttaagttaataagtacattgcctttttataatgcgttaaaatcttcggtgatatgtctctgcaatgcttctattaataacggctatggtttccgatttattaccttctgtatatactgcaaggtgaataacacactcaaaattagtgttttcgagaaaatatacgatgggttgtggtgcggtaatagttgcttatgatattgcaaagatatacatttgtaagcaaatcacaacctacaggaaaaactgaaacctcgtagaagcgttgcttataataacacaaaggtatagattttttattaaataataccgctacaatgtgctttttattattctaactcgccaatattgtcgagataagatgtaaggggagtggggcgaaaggaaaggttgtatggagggatgtacgtgctctttcaatctaagataatcatcattctttttaaagacgatcgtgatactttcctaaaaccattgcaattgtgttccaaaagcattgcaattacacatcaatctcaccacttttacatactaattgcattgagtttattttttaagttctatattcctacgaaatctttgctgtgcttcctacaaaacgatgtatcccttcttctccctgttcacatcatttcaacgccttagaaagaatttaaggggctatgttattaatgtcttgcaataaaaaaactatacaaaaaagctctctaacgacctgaaatcatgagagagcaatatatttatatgatgtaattttctatgccactaagcgccaaataaaggcgatgagcatcgtaataacaatgctaaaaacaagctttgtattgttcttccttgtatgggttctctttttcgcctttgtagtatctacaaagctccattaatttttctctatcatccatgtttctttttacaatttatattgtcaacttcagtagtgtctattattatcttttctcctttagcattacattctttaatttgtttgttagtatcctttattccttctataatttcttcataaagatcctcatcaacaccgagcttttttgcctcctccttacttatgtttaggtgaaatacactgtctttataaaaggcataatttttcagcgcaagggcagcagctcgctttattcttatttctttaggcatttgtcttagttcttcaacactaagcaatagtgccttagcctcttcggcctcagaagcatatacacgacttcttacgctattgtttgtttgcgatggagagttgttttttgcgcacgaagatgcgatcaatatagccaaaagacttaaaggaataagttttagaaaatttttgtccatctgttttatgtttaataggttaataaaatggtatgataaagagcatgaataaaagaaaggaacattctcttttcagcttaataagtaatagtctttttgcaaatataggtaaaaaataaatacagatattgtttttaggcctatttaacgcaggcacttctcgctttgtttatgtcttcacagaacaaagcaaaccccattagagcgaaaaaataacgatatttggatttgttcttttttatttcttctccttgttctatttcataaaagctccgtaaaggtagttcaaagaagctttaatcccttgtttcctttctttgtgtcatctccttgtttttcaataaatagccccttgcttcctaaaaccattgcaattgtgctccaaaaacattgtaattgcacgccaatctcaccgctattacagtctgatagcattgctttttcaatagaccaatttcacagatgatttagattttctattactaaaagatagaaagaaccaattataggtgagttgatgatagaaaggtgcgttaaaaatattgtcttaatgtatttttatttaaaatattttcttacttttgtaaaagacaacacttaatgaaagatatagggaacaactataagctatatataaaaacagtgctcccacggttgtccgcaggagcaagaaatcttcggcttatagccttgttgtgaaaagtcttcacatgtatatctgtgtgcaaatataaaactattatttgaattaacaaataaaaaccttaaaaaatggtacaaaaaattcttggaatagaccttggaacgaactctattggtacttctgtacgaaatactgaccttggaaataacctagtagaccagttagaattcttttcttctgacattttcaatgcaagtgttagcaagaatactaatggaagagaatattctttagcaagcgatcgctcggcacatcgtagaggccgcagattaaatgatagtcgtagacgcaagttgtgggctacactcgacttgcttatcaaaaacaatttgtgtcctatggcgccagagtcgttagagcaatggcgtacttatgataagaaaaagaaacttttcagagaatatcctattgacgataaagcatttcattcgtggataattcttgattttaatggtgatggaaagccagattattctagtccataccagttgagaagagagttggtttcagttcaattagactttaatcaacctgtcgatcgatataaactaggacgagctttgtatcacattgcccaacatagaggttttaaaagtagtaaaggagaaaccattgcagagcaagaaaagcaagaagacgacagcaagaaaaataagaataacgctcttacagaagaacatgttgatgttgttaatgcaatgaaagcctctgaagaaaagctttcaaaggggcttttagcctatatgcaagagcataatttgaaaactgttggtgctgcttttgctcaactagaagacgaaggaatacgaattcgcaataatagtgaatataaagcaatacgttcgcaacatcaagacgagattaaagaaatatttaaatttcagaaaggattatctaaccaaacacaattattagatactcttataagcgaaaagcaaggtgttggaaccattttttataagcgtcctttgcgttctcagcgtggaaatgtgggcaaatgtacactcgaaccaaataaaccacgttgcccaataggtcatcctttatttgaaaaattccgtgcttggacgttcattaataatataaaagcaaagtcacccgattcagattctgcagaaccactgcctatggatatgaggataaatatctataataaactcttcttgtcaagagttaaggcagattttaagttcgaagaaattaggcatttcattgagaaacaatggggagtagccctttctaaggacgataaaacaattaattatagagacgatacgagtgtggcaggttgcccaataacagctcgtatgataaaagttttaggcgaagactgggagaatttccatgttttaggtacgaaagagcgacaaacacaaggtaagtctaataatgcattgcaccaggtttgctacacagcagaagatgtatggcatctttgttatgatgcagaagaccccgagcaggtgcgtacttttgctgaggaaacattgggttgggacgagaaaaaggctgcagaactagtgcgtctttggtcggcaattcctcaaggatatgcaatgttgagtcaaaaagccattcgaaatattaatcgaatgttgttgtttggcttgaaatattcagacgcagtgttgcttgcaaagctgccagatattgtagaattgtcggatgaagatattcaaactatcatcaaaaaagcacaacaattagaagaagttgtaaacgaagagaaaagaattggtaacattgtaaactcgcttatcgctaactataaggctgaaagcctagaggatcgctttgctgatcataattatgaatatcagttagatgagtcagacgaaagagagataattaaacacattgagagcaatataggaaaacaacgttgggagttgatggatgccgacgaacaaacctctatattagagggtgttagaagtggttatcaagcattctttgctaggcataaacgcacatttgttgagcttccacagctaggcgaacgattggtagagttgctctcaaaagaatattcttctgttgaaaagaagcaatgggagcgtttgtatcatccttctcaaatagctatttatcgtccaatattgctagataagtcagacgagaagaggcgtttgggcaacccagacataggcgcaataaagaatcctacagtgatgcgaacactcaataacttacgaaggagagtgaatcagctattagatgatggagtattagtgccaaatgaaacaagagttgtggtggaaactgctcgtgagttaaacgatgctaatgctaaatgggctttagaaaaatatcaaaagacaagaagagatgagaatgcacagataaaaaagattcttgaagaattctattcaaagcccaatggcataacagatacagatgtagataaggctcgttatgttatagaacaatgcgaagaagataattataagtctaaaaaagaaatcggaacttatagtaaagacattcaaaagtataagtattggttagaacaaggaggccaatgtctatatactggacgaattattagcttgtcaaatcttttcgattctaatgcattcgacctcgaacacaccattcctgcaagtgttagttttgacaattcagaccaaaatatgacactatgcgaggctcattataaccgttttattaagaaaaataacattccaacggcaatgccgaattacgaaaaggatgttacaatcgatggaaagctatacactgcgataaaacctagattggaaaaatggaagaaacgtatagaaagactctctagaaatgtcgaatattggaaagttcaagcacgacgtacgcaaatgaaagatcataaagatgaatgcacaaaagagaaacttctttggcaaatggagttgcaatattggcgagataagttgcaacgttttaccattcttgaggttaccgatggttttaaaaatagtcaattggtagacacacgcatcatcactcgacatgcaactctgtatctaaagagtgtttttaagaaagtagaggtacagagaggaagcacaactgcagagttccgaaagatacttggagtgcaaagtgtagacgaaaagaaagatcgtacattgcattcgcatcacgctatcgatgcaactatcttaacaacgatacctaccgctggaaaaagagaacgtattcttgaactcttttataaagtgcaagagaaggaaagaatacttaaaaactgttcgggagaggctcgtataggtttaaaacaagatttagaaggcttacagttaaagcttaaaaaagaggttgcagattgcaagcttggtggcgaaatctcacaacttggcaactttattaatgataaaatcatcattaatcattgtgtgaaagaccaaactttaaccccatctcacaagcgattgaggagaagaggacgtgttgttggaggtaaagaacatcctatttggcaaacaggagatactctaagaggtaaaattcataaagaaagttactatggtgctatcacacaatacgccaaagatgaatacggtaatgttctctttaatgatggtaaaccaaagatagaccctactatttggtatgtaatacgtcgagaactaaaatataaaaaatcagcacaagatacaggttttgcctcttgggacgaccttgaaaaggtgattgtagataagaatctctttaaattgatgaaagaacagttcccagaaggaacctcttttaaagatgcttgtgagcaaggtatctacatgattaagaagagaaaagaccaagaacataatataaagactcacagaataagacacattagatgccatacgtctgttagatcagcattgaaaataaaagaacagctcaataaatctaccaaggattacaagcaatatttctatgctgagtctggagatttatatacaatgtgctgttataccaatggcaaaaagaaagaatataggccctatcgtttatatgatattgcacaacatcgtaaagctggaatagaagatatccctgaattcattacagataaaaagggaaatcgactcgagctgtcttataagttgtgtagtggtgatatgatattactatatgaaaacactccagaagagttgtatgacatggatcctgtgaacctaaagcaaagattatacaaggttgatagatttgaaagcgaaagttctagaatatacctaactaatcatttgattgctaatggagaggttggacactctataaaagattataatcaaatgccaccaacggttagatgtggtgtgaataccttgaaattcttgataatgggtgagcataacgacttcgtaataaagagcaataatattatatttaatcatcgatgattaagaaaacattatactttggcaatccttcttatctctcacttcgtaatgaccagttggttattcaacaacaaaaagtgggagagaagggtgcgctaagtataataaagaaagatattgttagaactattcctatcgaagatattggtataatggtgcttgatcatgcagaaatcaccattacacaaggtgctttagctgcattactcgagaataccgttgccgttataacatgtgatgaaaaacaaactcttaagggaatgttgctccctttagtaggaaatacattgcatcaagaacgctttcgaagtcaattagaagttaatatccctgtaaacaaacagttatggcaacagacgatcaaagcaaaaatagaaaatcaagccttttgtttgcaacgaaatacatcaaaaacagcttctccacttcatgtgttagcacgtggtgtgaagagtgatgatgcagataataacgaagaacaagcagataaatattattggggaaatatctttcccgatagtttaaacttaattaggatcgataaacattcacccattaatgaactgcttaattatggatataccatcttgcgtgcagtaattgctcgtgcgttgataggaagtggattgctacctgtatgtggaatccatcgtcgtaatcacaataatgattattgcttagcagatgatattatggaaccttattgcccatttgtagacgactgggcaataaaaacaattcaaaagttaggaaatcctacagaattaactctagactataagcgagaaatgttgcaaatacccgttattgatgtttcaatagcaggcaaacgtagtcctttaatgattgcagcagcacaaacagcagcaagtcttgcaaagtgttatagtggcgaaagccgtaaaatatattatccttcttttccttaatgcaaagattaagcgagtatagaattatgtgggtaatggttctttttgatcttccaaccaccaatctaaaagagaaacgagactatattcttttccgaaagaatttagtaaaagatggttttatcatgtttcagtattctatttacgtccgacattgtgccagtagagagaatgctgcagtacatgtgaaacgtgtaaagtcctttattcctcgctcaggagaggtttgtattattgttataacagataaacagtttggtgaaatagagatatttagtagctctgagccgcagaaaccgaacacgcctggagtgcaacttgaattattttagaatataaaaaagagtcctaatatttatattgggactcttttttgttgcaatttttattttacataaacaggatatatgtcattgaagttcaattaaatatatcattcgtgttgtttatgatattgcaaagatatacatttggaagcaaatcacaacgtagtaaaaagtgttatgaatgcagtaagggttgtttatgatattgcaaagatatacatttggaagcaaatcacaacctaatcctgaaaaaggaataacagacagagttgtttatgatattgcaaagatatacatttggaagcaaatcacaacaactgtatcttgaagtgttgaaagcttacgttgtttatgatattgcaaagatatacatttggaagcaaatcacaactacccaataaatacccaattctacctacaagttgtttatgatattgcaaagatatacatttggaagcaaatcacaaccccctatacacaagcagcaaatggaaaaatgttgtttatgatattgcaaagatatacatttggaagcaaatcacaactcccagaagtttcactaagtattatttaagttgtttatgatattgcaaagatatacatttggaagcaaatcacaacgtgcttaggtgtttatagaaacctacacttgttgtttatgatattgcaaagatatacatttggaagcaaatcacaacgatagcaaacgccccgaaggtagtttgattgttgtttatgatattgcaaagatatacatttggaagcaaatcacaacagagctacccccgttctgaaatgagaaaagttgtttatgatattgcaaagatatacatttggaagcaaatcacaacaaccccttcaacttccaaaccttgcaaagggttgtttatgatattgcaaagatatacatttggaagcaaatcacaacggagaatggtgatctcagagttgttcaagagttgtttatgatattgcaaagatatacatttggaagcaaatcacaacttactctcaactgcaagccgttcaaccaaggttgtttatgatattgcaaagatatacatttggaagcaaatcacaaccttaattaggcgcaacttaaactctctttggttgtttatgatattgcaaagatatacatttggaagcaaatcacaacttgatagagttagtttgtctcagtatttagttgtttatgatattgcaaagatatacatttggaagcaaatcacaaccagttgcactaattacatcagtctgcgtttgttgtttatgatattgcaaagatatacatttggaagcaaatcacaaccgaggccgacggatatagctttgacaaggagttgtttatgatattgcaaagatatacatttggaagcaaatcacaacggggacatcgtctttcgctatgacttgcgagttgtttatgatattgcaaagatatacatttggaagcaaatcacaactaaacgtttaaggcattgactatttttgtgttgcttatgatattgcaaagataggcaactttagtcaaatagcaacaccataatgcatttttattactctaatgaaccattgcgagacatgagggtgcaggacgaatataaagcctttgtagagcagtgtttgtgttcatcccatttaaaaccataacaattacatactaaaaccattgcttttgaaccccaattccattgcttttgtgccccaatagcattgagtttacaaagtggaaagaatggcgatgaaaaaggatttaataggagagaaaagcgatcgggatatattgaagacgtgaaagggtaggattgtggagtgataaaggctgtaacgtgtgagataatagaatacaaaaaagctccctaacgacctgaaatcattagagagcaaatgtgttatatgatgtaactttctatgccactaagcgccaaataaaggcgatgagcatcgtaacaacgatacctaaggagagtggaagcaaggttgcaagagccgtccacttcacacttttcgtctctttatatatcgtatagatcgttgtactacatgggtgatgcaacaaacagaacaccatcacgcacacagcagtgagcaaattccaaccacctttcaacaaaatcatcttcgtttgctcgtccgttccctccattaacacacctgaagaggcgaaatctgcagggcctaaaaccatcatagtgagcattaatatcgttggcatcacaatctcattggcaggaatagctaagatataagccaaaagaataacgccatttaagcccattagccagccaggagcatctaagaacgatatcaagtgctgagcaatactaacgtcgcccactgtgatattacagcataaccaaatcaaagcacctgctggagcggcgaaaataagagcacgccaaagcacaatgagcgtgcgatctatgaccgaggtgtagagtgtttgccagaattgaggtggacgataaggaggtaattcgaggtggaaggtagacacttcgccacgcaataccgttctcgaaagtacccacgagctaccaaacataaagccaactcccgccaaaacaaccatcatcaccgccaaaagagccgccacattactatattgagagggcactgctgcacctataaagagcgttgcaaggaggatttgagtgggccaacgaccattgcaaagcgaaaagttattggtgataatcgcaatgagtcgctctctactactgtcgataatacgagtagaaaccacgcctgctgcattacaaccaaagcccatactcattgtaagagcctgctttccgtgcgctcccgaacgacgaaatagctcgtcaaggttaaacgcaacacgtggaagatagccgaaatcctcgagtaaagtgaatagaggaaagaagatagccatcggtggaagcatcacagacacaacccaagccgtagccaaatacacgccatctaccattaaacccgttagccattcaggcgaatgcatcgacacaaacaactctctaagatgtggatgtgcaaagccaaccaatatctcattgagccaagtagaaggatagttagaccctataatcgtgagccaaaacacacaacagagcagtgctaccatgataggaaagccccaaatgcggtgcgttagaatgcggtcgagcttgatatcgaatggaagtctaccccgttcgttaccttgttgcaccacttctcggcatatttcttcggcttgtgcatagatatcttccatccattggtcgtgaaagttattgccaatttgcaagtgaatacgttctgcaagggcgttcaattcagcgttactaaagcgttcttgcacgctcacatcgccttcaatcagtctaaaagcaatccattcggcattgtgaatgtcaggaaaatgctcctttaccttatccgatagttcttgaataagagcgcttgtttgagcaggaagattgatgcttcgatgaggcttacacacatattcgcccttcaccacagctcgtgtcatagccaaaagctggtctattccttgtccagagcgtgccgatgcgcccacaacaggaatgcccaaacgacgtgaaagcgcattgagattcacctcaatcttatttcttttcgcttcatctaacaagttaacgcacagaaccgctttgttggtgatttgcaacacctgcaaaatcatgttcatattgcgctctaatcgggtagcatctgccaccattaccgttacatcaggattgccaaagagaataaagtcacgtgcaatttcttcgtcttcgctggtagatgacaacgaataagtaccaggaaggtccacaattcgatatgcatcatcttgataaacaaagaacccttcggccttacctacagtctttccgggccagtttcccgtgtgttgtttcaagccagtaagactgttaaacaccgtacttttacccgtattggggttgcccgccagtgcaattacatatttagattgtattccttgcgctccttttcgttgcaaagtgtgcaggtttgcttgtgcgcaattggcgcaaggactattgtttgctattttgttcatagatgaaattctttagagttgtaattctttcgtaaggtgagaactgaattggtgcgatagaaaaacagagccgttgaggcctgttctattgcacatcgttggccacctttcttacgttttgaatcaaaatgtattgtgcttggtcgtgtcgaagggcaattgcagtgcctctaaccacgtaagctacagggttacccataggacttttcatgtcaatggcaattctactgcctttcacaaagcccaaatccatcagtctacggcgcaatgctccacggcaagaaggcgacaaacccacaatggtagcctgctcgtttgcctgaatagtggttagtcgttgcgcccttgtctcaggcatactctcggcttcttccttcgttacttccaccctgttcatcgcctctagtgcaacaagaggtaggcacatctgctcgccttcgtatttaaacgagaacgagttgttattgatttcggtgatataaataatcgagtccttggttaatcccaaatctgtaatctgcttaaacaacttcttgtcatcgtcttccacatgcgtaatgcgccaccaagtgtgttctttcaaaggcaattcgcaagtgtcgttaggcatcattgcgagcgattgagtgggaatggggtcgccatgagggtcgaaaagagggttacctaaaagagaggcaatgcgactttgttcctcatctgatataaggtgctccatacgatgcgccctttcgtgccattctgcgggtgcatatccagagtgttcagcaagatattgctcgtaaatgcggtgcgctctaatcaatttaagggcgtttcgcttacccttttcggtaagctctaactgcgcacctgcagtgatctcttttgttaagacaacagctcctatcaccttttccagttcttcttgagtaacgttcaaaatgcttttctgcttcaaagcatcttcaaacgaaagcgaaccgccaaggttataaagttgttttataaagtcttcttgtagttccttctgtcttttttgagtgcgttcgtttaacgaatagttcttgaaaggcagtaaagcaacaagtttttctatatatttattcatctgttttgtttactgttatgatgcaaaggtacaaataatatatatagtgcttttatctcacgaactctttttttattataaggtataaataaaagcacagcttttgccttgtaatggcagtgcttttgaggtgtaaaagcattgcaattggttggtaattagatagatattacaaataaaatgatagccgattgactttcaatgactttgaacgagcagtctcgaaaaaaggaaattgcaccttatcctcataaatgaggaaaaaaatcttcaatttttatacaacattaaaaataaagtattatatttgccccataaacatattaattagcctatggatatacgtaagctgataaaagtgaatactttgttcacctatcgtcaaaaggttgttggattgataatgtgtggtactattgtaggtctggttctggtgtttgcctattacttgcgtttgcatacttatttaataggagatgacccaggagcttgcgtcaattgtcacatcatgacaccttattattcaacatgggcacactcttctcacggaagaaatgcaacgtgtaacgattgtcatgtaccacatcaaaacatcgcaatgaaatactttttcaaaggaaaagacggtatgaaacacgtcgcttactttgttactaattctgaacgtcaagccattagagcagaagaagcatcttcggaagtgataatggacaattgtattagatgtcactctcagttaaaccaagcagcagttaaaacgggacgaatagattatatggctgccaaaagaggcgagggaatggcttgttgggattgtcatcgtgatgttccacatggcggaatgaactctcttacaaagacaccaaatgcagaatcgcaggtacctttgcctccaaaccctgttcccgagtggttacaaaaagctttaaagcgataaacttaaatcctaattaataactcaatagaaaagaatagaaattcatcttcttttgaattaaaaagaaaataaagcgaacaatcattataataacttgaaatctaaaactaaaagaatatggcaaagcaattgaagaaatggaaaggatggatgctttttggtggttccatgctagttgtatttgtgttaggacttatctgtttctctctattagagcgcagagcagaggttgcaagcatttttaataatcgccgagtagctatgactgactctattgtttcacagaatgagaagttcaaagaggactttccaagagagtttgaaacatgggcaatgaccgaagatacaacgtttcagagtaagtataacggctcacaagagagagatattctcgaggcttatcccgatattgtaattatttgggctggctatgccttctcaaaacaatacaatactccacgtggtcaccgtcatgctattgaagatatgcgtaagattttgcgtacaggtaaccccggagtagataatgataccgacatacaaccaggtacttgttggacttgtaagggtccagatgtgccacgtttgatgcgtgaaaagggtgtagcagcattctatggagctaaatggagcgagtggggagatgagaatatgaatacagttggttgctcagattgccacgatgcacgcacaatggaattgaaaccagctcgtccagccttatatgaagcatggcaaagatcaggtaaagacgttaaaaaagcaagtcatcaagaaatgagatcacttgtttgtgcgcagtgtcataccgaatattacttcgaaaaagagaaccatcagtatcttaagttcccacaagataagggcttaacatgcgaagatgctgaggcttattacgatagtattggattctacgattatgttcatccattgtcaaaggctaagatcttaaaggctcaacaccctggatatgaaatgtttaaacaaggtattcacggacaaagaggtctgagttgtgcagactgccacatgccttatatgcaacaaggtggcattaaattcaccgatcaccacgtgcaaagtcctcttgcaaagattgatagaacatgtcaaacatgccatagacaagatgcagaagtgcttcgtcagaacgtttatgatcgtcaaaagaaggtgtatgacttcgctgttaaggtgaataaagaacttgcaaccactcacttagaagcagaatttgcttggaagaagggtgcaacagaaagcgaaatggctactgctcttaacgatattcgcaagagtcaatggcgttgggactattctttagcaagtcatggtgctgcattccacgctccacaagaggtgatgcgactccttgcagaatcaatgtcgtatgctaagagcgcacgaattgaaatcgcaagagtacttgctaagcatggttacacaggtcaagtgcctctcccagacatctcaactaaggccaaagcacaagcttatatcggtttagatatgcaggctttgaaccaaaagaaagctaagttcctcaacaccatcgtaccaaaatggattgagagagctaagcaaaagaaaagatttatcactcaacctctttaataacagcgcatacgttgcgatctaagaattcatccattgcccctcaacggcacacgttctaatcgcaatagaaacgaaagaggaaaaaaataataagattgcagaactcaaacaaatagatagttaacaatgatagatgtcagattgcttttcaaaaaccgtgtacagcaaccgctataaaggtgttgttcatttgaaagcagtttgacatctatttcatatcgtgttctcaagagctaataaaaagaaaagacgagcctcgcaaagatcatctttgtgaaaaacaaaagaggtgctattgccttgcaaaaccattgcttttagtctgcaaactcaatgcaattaaagcataaaagcaatgtcctttcaacctcacctcaaaaccctttgtaaataaaggttgttcgccttgaaagcacctgagccgtaactactcttgacaagttaaataataacgaaaaaagaatgtggcaaaaaccttggaaattgcgtgaaggaatcgccattgggtgcggacttcttgtgataggagcaatccttcagctcatcacaggaggaatactttggcagcttttcgccttcccagccaatgcacttgcattgctcatctaccttttattgataggaaccgcctattggatgcgtgagaaagtctactttattcgctatctcatgagcaccaagtcggcagcaacctctatacttttcgtgttgatactcacctttattatgggcttaacacgtcaggtttccagtggaaaacaagccgtagatcctatcggtttaaccaatatgttgtcgttttggcccttcgttctcatctatttatggatgacaaccaccataggtttggcgacacttcaacgccttgtgcatttcaaaaagcaacgctttgccagcgttatatcacacttaggactctttattgtgatcgtttgtggaaccttaggctctgcagatattcaaaagctaaagatgtattgtatgtcaggagaagccgaatggcgtgcaatggacgagcatggacatcttaaagaactg

SEQ ID NO: 4157 - DNA, 24281 bp, synthetic construct
  misc_feature 1..24281: note = Synthetic
  source 1..24281: mol_type = other DNA
cgattttctccgccccatcgttgactctctcaagacgctcaatcgaatgtttggcacatccattctttttactactgccagccaacccgttttaacaggagagctcgaaggagaaaatgcgctcatcaaaatcaaagggttctctcatatcaaagaaatagtcccttcggatgctaaactttatgacaaactgcgcagagtagatctcaaaattgacgattccgcgaaagattacgaggagattgcaacgcaaatcacccaacacaaacgagtgctctgcatcgttaatacgcgcaaagatgcaaaagagatatttgaacgcctacctaaagaaggtattacgctgcacctttcacgcatgatgtgccctcagcacatccgagaaacaattgagcaaataaaagacgctctaaaaaatgaagaaaacgaaattattcgtgtcgttgcaactcagctgatagaagctggcgttgatatagacttccccatcgttttccgccaacaagcaggactcgactctatcctccaagcggctggccgctgcaatcgggaaggaaaactcaaacgtggaattacacatgtattcagtctacaaaaaatcagtaacttaccgcgaggttttatttctagaaccaatagtgcccgtatggctttagcgaaagactctgactggttttctcctgaaactatgcaacaatactttcgccagctctactcccgcacacaaacatttgatagtaaagacataaaaagcctgctctacaacttctattatatgcagtttgaaacagcagcaaaggcattccaactcattgaggacaataccattcccatcatcataaattggaaagacagtctcagccttattgacgatgctgagaggttcacgccaagctattcactcatgaaacaactggcacaatacaccgtcagcgttcgccaacaagatttcaataaactgaaagaagctggagctatagaagaacttttccaaaacatttttgttgttagagataaactgttctatgacgaaaaagtaggccttatcaccacaaaccactggattgaagaaatactaataaaataaacaatatggaatatcacgacaaagaattttgtctggaagtatggggaccacttgcctgcttcacgcgcccagaactgaaagtagagcgcgtgagctacgatgtaattacgccctctgctgccagagccattttcgaagctatcttttggaagcctgccatccgttggcaaatcactcgaatagaagtgctcaaccctatcaaatggatcaacattcgacgcaacgaagtgggggctgtcgcttctgcaaagaagaatgcctctcctatcttcattgaagagaaaagacaacaaaagaactcgctgatgctgagagatgttcgataccgactctatgctaaattagtttttattcccaagcagaatagaaaatatcttgacacacgcaatcccgaaatagatagagaagaagcagaacttctccacaaagatgagaaccctgggaaatacaatgctatgtttgaaagacgtgcaagtaagggacaatgttttaaccagccgtatctcggcactcgagagtgtgcagcttccttccgcctcgttctcccagagtcggaacaactcacaccccctattaatgaaacgagagacttaggactgatgctctatgatatggatttcgaaaacaatccagaacatcccgatgctatgttttatcgtgctcgcatggaaaatggcgtaataaatgttccactaaaagatagtgaggaggtactaaaatgattctaaaagctttatacgactattaccaacgaaaatcggaagaactacctgctttcggctgcgaactaaaagaaataggctttattcttgttattgacaaggatggcaattttctacgctttgaagacagacgcattgataaaaagaacgcatcgagttttttggtaaaaaaacatgttggaagaagtagtgccccaattgccaaccttttatatgacaattgctcctatatcctcggatattcaacagagggagatatcgactcaaatgcaaaatatataagtgtcttcaaagctaaagtagaagaactctacacaaagcttcctaataatagcgcagtttctgcaatatggaagttctatcaaaagaatcctgcagaaaatctattgaaagtgcaagctgatccattatggcctgaaatagagaaaaatctcaacaagaaatattcaaccttttcttttttgttagaaggagaaacaactattgtggctgctcaaaaagacgtgataaacgctgatgaagaaaaggagggaaatgaaaaagaacagctatgcctaattacaggaaatcaaggaaaggctgtagatgtaacaactgcaactatgattgcaggtagtcaagctacggctaaattagttgcctttcaagtaaactccggctatgactcttacgggaaacaaaaaggattcaatgctcctatttctcaaaaggctgaatttgcttatactacagcattaaaccacatactatcagctaattctcgcaataaattccttgttggtaatcgcacttacctgttttggggttcctcaaatagcaatggtaatcaagaaacagaaagcagcatttttgcaatgtttggttttaatgattcagaggaagaagatcccaatgcacgcatttaccaaattcgaaaagtattcgaaggaatctattcaggaagtattaagaccgatttagacgaccgtttttatattgctggacttgctcctaatgctgcacgtatagccgttgtctattgggctgaacttccgctaaaagaattcgctcataccattcttcgacattttgaagacatggacatcgttgatacacgaaaagagaaaaagccatacatgggattaaaatctatactggctacagtaaccttgggaggcaaatcgtctgaagcaactcctaacctcccagatgctgtaatcaaaagtatcttccaaggcctcccctatcctgatactctttaccatagctgtcttcgcagaattcgggcagaacagtctgtaagcatcacacgagctgcaattctcaaggcatacttaaaccgaaaatacacaaatcaaaaacctatacaaattatgttagacaaagaaaacaccaatcaaggctacttgtgcggccgcttgtttgcagtcattgacaaactacaaaatgatgcaaaccacatccactccatccgagagcgctacatgaatgctgcaagctccacccccgcaacggtttttgcaaccattcttaacctatcggctattcatgcaaacaacttaaacaatgaaggaagtcgtattttctatgacaaactcaagcaagaaatcatctctaagataaacgctgatggtttcccctcccatctcgacttacaagaccaaggacgcttctttgtgggctactaccagcaaatgcagtccttcttcttaacagaaacaaaacaaactgaagaataaacctaaaacaactatacaactatgtcagaattaaaaaacagaattgatttcgtttacatctttgatgtacaagacggcaaccctaatggtgaccctgatgcaggcaacttaccgcgagtagatgccgaaacaagtcgtggtatcgtaacggacgtttgtctgaaacgaaaggtgcgcaactatgttcaactatcaaagaactgcacgcaaggatatgatattttcattaaagagaaagcagttctcaacacactgattgatgcttcccatgaagatgaaacagttaaagcagctgatgcaaaaagcaagacagcagcagctcgggacgtgatgtgcagcaaatactacgacattcgcacttttggagccgtaatgtctacaggaaaaaatgccggacaagttcgtggccctatccaattcacttttgcacgttccgtagatcccattgttccagcagaacactccattacaagaatggccgttgctacagagaaagaagctgaaaagcaaaatggcgataaccgcaccatgggtcgcaaagctacaattccctatggtctctatgtttgtcatggtttcgtatcggccagtttggcaaaacaaacaggcttctcggaagaagacttcacactctttattgacgcgctcaagggaatgttcgattgcgaccgctctgccgcacgtggtttgatgagcgcgcagaaactcattctcttccgccacgattccatgttaggaaatgctcctgctaacaaactcttcgatttggtcaaagtggaaagaaccacggacaatgttccccgctccttctctgactaccaagtaacgatagataagactcaactccctgcaggagttagcgttgaagaagtcatctaaatatatgtacgcagaagacgatatgctcatgttgtcggggatacagcacttcaagttctgtccccgacaatgggctttaatccatttagaacaacaatgggaggacaatcgtctgacaacagaaggtagcctgatgcaccgaaatgtggacgatccgttctatcggcagaaatgcggagataacatttgcttacgctctgttcatatcgcctccaaagaactgggactatacggaatagcagatgtaatcgaacttcatcctacatccaatgaaactaacagcatacaacatcccaaatatcctggactatggacgccgtatcctatcgaatataaacacggtaaacctaaaagggacgaaacagatgaggtacagctaacagcacaagtgatgtgcctggaagaaatgtaccaaattcaactacataaagcgtacttcttctatggagctatcaaacatcgacaggaaatcgaaataacagaacatttacgaaccatcgtaagagagatagcagaaaagatgcatcacatattcaataaggaactactccccgctatcaaccttcaacaccattgccagaattgctcactcaaaaataattgtatgccaagttctgctaaagctacaaaagttgcaacctatctcaataaatatctctatgagaaaactccttaacacactctatatcactacgccagaggcctacctcagcaaagacagcgagaatgttgtagtatctgtcaagcaagaagaagttttcagaattcccattatcaatatagagagcatcgtcactttcggctatatgggagctagtcctggactcatgaatctctgtgctgaaaaaggagtctcactcacatttctttctccaataggtcgctttataggacattttcaaggtccaacacgcggcaatgtcctgctccgaaaagcacaatatcaaaatgcagaaaacaaagaatggtcgctacaaatctcccgattgctcatcgcggccaaaatacgaaactatcgtaacattgtgcaacgctgcatacgtgactatggctcatttccagagattgaacaaatttcaaagactctcaacttcaggaaaaatgaagctctacaagctgataacaaagacacactaagaggcatagaaggtattgcagcaaacgaatacttctccatcttccccaatctaatcacacaacaaaatacagatttcccttttaacggccgaaatagacgccctccaaaagatccagttaacaccttactttcttttgcatacactcttatcgccaacgacataaaagcagctttagaaagcgtaggtcttgacccttacgtcggtttcttccatgcgctacgccctggacgagcagccttagcattagacttaatggaagaactcagagcctatcttggtgatcgcttcgtcctatctctcatcaatcgcaaacaaatcactcgggccgacttccttcaacaaggtgagaatggaatcctacttaccgacaaaggacgcaaagtgtttcttgcagcatggcaaagtcggaaacgagaaaccattatacatccttatctaaatgaaaaaatagaaatcggtttaattccccatgcccaagctatgctccttgcacgatacatacgccacgacatcgataactaccccgttttcttaattccctaacaccatgaaacttctcataacctacgatgttgaaacaatcacaaaagaaggacagaaaagactccgccttgtagcaaaagcttgcaaagaccacgggcaacgcgttcaaaattcagttttcgaatgtgacgttgatgaatcccaatttgtacttctcaaacataaactcgaaaatataatagacaaggaatctgatagcatccgaatctatcatctaaaaaataattcacaacaaagcacaataattataggtaaaattacgtcttataacgtagaaagtctcttgatgatctaaaatgcgaaccttatgctccacataaatcatcgcagtttcgcagtctcagattatcaactacttaacttaaaggaaaagtcagaaagtttattcaaaggaaatctacaccaatacgttcgcaaaacgtaccacatattaccctgactttcagccctttcctttttatacagtcgcaccccgcccggggtgcgtggattgaaacagagaaatgcaaacgagaccaaactccaacaatcgtcgcaccccgcccggggtgcgtggattgaaacaagcgcaaaaacagggagcaaagcaccagaggggtcgcaccccgcccggggtgcgtggattgaaactaatgtcgacataagaagtaaaatctatatttaaggtcgcaccccgcccggggtgcgtggattgaaacatcaatgtcaacaatttttcaatagcgtaagcgttgtcgcaccccgcccggggtgcgtggattgaaactatgctttctggtttagagatgcaaaataataaagtcgcaccccgcccggggtgcgtggattgaaactcgctccaactttggctaaaggtgatagaagaatgtcgcaccccgcccggggtgcgtggattgaaactaatagagtatccgaaaggtcgggagaatctaaagtcgcaccccgcccggggtgcgtggattgaaacaagagcaaaaacagggagcaaagctccagagggagtcgcaccccgcccggggtgcgtggattgaaaccttaccggaagctatacagagtaagatctttgctgtcgcaccccgcccggggtgcgtggattgaaactggtaaagaacagtctgaagatttgattaaatcgtcgcaccccgcccggggtgcgtggattgaaaccgctttatagtttactccctgctcaagtacagcaggtcgcaccccgcccggggtgcgtggattgaaacgatttgtcgcgtaaagctttgtttaccgcacccgtcgcaccccgcccggggtgcgtggattgaaacgtctatgtctgtgcttggtgagcctatgattaagtcgcaccccgcccggggtgcgtggattgaaacagacacctcggtatagagcaagacgcacaggacgtcgcaccccgcccggggtgcgtggattgaaactcaaccttttaagaaacttttgcacatcagagcggtcgcaccccgcccggggtgcgtggattgaaacacagttgcaaataccaactaataaatatgagtatgtcgcaccccgcccggggtgcgtggattgaaacctttaatacttaacgtacctaatcgctccatggtcgcaccccgcccggggtgcgtggattgaaacaccaatagccgaatcaatattaaaggaggagacatcgtcgcaccccgcccggggtgcgtggattgaaactatttttagtcttggcagtcatcgccaacaacttgtcgcaccccgcccggggtgcgtggattgaaacagttggtagtatgatgccgtctcttcttaattttgtcgcaccccgcccggggtgcgtggattgaaacacttggtgaaatcgttggccgtggccttggtgctgtcgcaccccgcccggggtgcgtggattgaaacgcgtcgatagttgcgcccaccggtgaaacctccggcgtcgcaccccgcccggggtgcgtggattgaaactcattgatgctacaccttacaacccatatactgggtcgcaccccgcccggggtgcgtggattgaaactcgcgtagctaatatgatacctcgtattaaaggcgtcgcaccccgcccggggtgcgtggattgaaactatttctggaagttctcctaatcctaataaggagtcgcaccccgcccggggtgcgtggattgaaacctctctcctcgtcgaatagaaatagactttttccagtcgcaccccgcccggggtgcgtggattgaaactgcacaaactgagtactctaaggctcaaacaagtcgcaccccgcccggggtgcgtggattgaaacaaagatagattacttccaaatgaacccattagggtcgcaccccgcccggggtgcgtggattgaaaccgtttatttggtctacagtagcagtcaccgctatgtcgcaccccacccggggtgcgtggattgaaacgcttttgtctctcgctctgatgtgcaaaagttgtcgcaccccgcccggggtgcgtggattgaaacattacctctattatgctaaaaacattgtagacccgtcgcaccccacccggggtgcgtggattgaaacatcataccacaaagatacaaaataaaaactatttgtcgcaccccacccggggtgcgtggattgaaacgattatgtccctattgctcggccttaagtgtgtgtcgcaccccacccggggtgcgtggattgaaacaccacttttcccgctttgctcacagcttatcctctgtcgcaccccacccggggtgcgtggattgaaacacaaacaatgaagagccacaagtgacaagtggtgtcgcaccccgcccggggtgcgtggattgaaactttgtctcctacaaaaatactaataaaggcttagtcgcaccccgcctggggtgcgtggattgaaacaattgctcaatgacaactgcaaacagaatcaagggtcgcaccccacccggggtacgtggattgaaaccacgacgggtcgatgtagaggacaaattcggaggtcgcaccccacccggggtgcgtggattgaaaccgaggttgaacagacactacagagccaggaaaagggcgcatctcgcgacaaagatattctcctattcgatttaatggggcttttcattatcggtattaataagcacaatttcctctttttctctttattagcaattttttacacaacgttttagaaatagcgttaactgcttcacattctcaaattctcctttctcaaattccatgttaattgaaaggtcgtgttataaaaattatacaccacaatacctattaagacgtttacaataaagtttaagctaagttactttgacaacaacgctgatcaaaggagaaggaattttgtgtatgtgagcaataagttcaagtttatcattcttctcaactatgagatgaaactcaagaatgggaaaacaaagaacgtaaacttcatcacgacacaaaaattgaacaagaataagaggtttgaagggaacaggtttgacagaatataaaactcagcatggcggggctatcgacaccctcataaggctaagcctcctccgttccaagctatcacgtctctaccatgctgaactttactttgcaaatgtaaagagaatattcgataaaagtaaattataatcgttgaaccttatggcaaaagcaaactacatttacgataatgataccttctatcagatggtacaagatagtgcagacagacatttccatccttgcagttttttgttttatttcgtatgtttgcaatagttatctaaaagaaataaaaaaactcccacgttaaaccgcgggagcaagaaatcttcggcttatagccttgttgtgaaaagtctttcacatcgtatctgccgcaaagatacagaataatttaaaatacaaacataaaaacctaaaaaatggaacaaaaaacactcggacttgatcttggtaccaactctataggcatttctctacgcaatcccgctcttggagagaatctcaaagagcaactagaatatttctcttcagacatctttgaagcaggtgtaggaacggacaaaagcggagaattctcctacgcagcacagcgcacgacatttagaagtgctcgccgcctcaaactacatcgccgccgacgcctgcaggccacgttgcgcctattgatggaccacaagctgtgtccgctttcagaagattcctataaacaatggagcgtttatgataaaacacaaaatctgaaacgtgaatatcctattggagatgaaggcttcaatcgctggataaaacttgacttcaatgcagatggtaaacccgactacaccagtccgtaccaattgcgctgcgaattggctaccacgcaactcgacttctcctctcccgaaaacaaattcaaactcggacgcgcactctatcatattgctcaacggagaggtttcaagagcagcaagggggagacgattgctgaacaggagaaaaacgagaagttcagcgctaatagcgacgatctcgaacaagaaatgaagaaatcggagatgaagcgctcaaaaggtcttcgagaactgcttgaaacacaaggtttgaagactatcggccaagcatttgcctacttagaatcgcaaggtatgcgcatccgcaacaatgaagatatccaagcaacgcgcgatctctacgaaaaagagattacatacatttttaacttccagaaagaactcagcatagagagcgaactctacaaacgacttgtcagcacaaagaaggacgaaggtaccatattctataagaaccccttgcgttctcaaaagggactcgttggaaaatgtactctcgagccgaagaagggacgttgccccatcggccatcccgaatttgagaagttccgcgcgtgggcgtttatcaacaacatacgctatcgccgcactattgatagcgaatggcaagagcccacaatagaaatgaaagaaagactctatcgcgatgtcttcaccgcccgcgtcaaagcagatttcctcttctctgaaattcgtaagtggcttgaaaaagaacttgaagtccaactccattgggacaacaataagagcctccgcaccatcaactatgcagacaaacagaatgttgcaggatgccccgtcaccgctcgcctcgtcaaactcttaggtaccgattgggaaagattccaacaagaagggaggaaagaacacaagacacacagcaaacaacatcccacaaaacacacggtttgctacagtgccttagatatttggcacgtctgtttccaagcagatgagttggaagatgtgcaaagttttgccaaagattcgctccaatgggacgatgagaagtgcaaactattgctacgcgtatggacgagtattccgcaaggctatgccatgctaagtctcaaagccatccgcaacatcaatcgtatgctgtgccgcggactaaaatatagtgatgctgtaatgctcgcgaaagtgcctgagattgctggcatgaacgagagcgatattgacacactcatcgaaactttcagcaaagacctcaaaacagaagttgatcgcacgaaagacatttatatcatcacaaactcgctcatcgctgattataaatcactctcctttgaagatcgatttgcagaacacgatacaagctattgcttgcaggagagtgataaagaagacatcgttcaacatatcatcaaacattttggagaagtcacttggggactcatggacgctgaagagcaggaaacgttaatgaacgaagtggaacagctctatcaaaactttttcagcaaaacgaagcgtaatttctatgatatcccaacctatgctagtacgctccgcgcgttcctttgtgaaaagttccctcatgttgacgaacaggcatgggcaaagctctatcatccctcgcagattgcatcctatcatccagaacgcgataagaactgtcccgattcatggcgtttaggtacaccaaacattggggccattcgcaacccagttgctctacgcacactcaacatacttcgccgaaaaatcaacgcgttgttagatgccaatatgattgatcccctggagactcgcgttgtggtagagacaacacgaactctcaacgacgccaatatgcgctgggcaatcgatcgctttcagaaaaaacgcgaagaacaaaacaagaccattcgtagtattcttgaaaaagaatacacaacacgcgctatcagcgagacagacatcaacactgctcgctatattctcgaacaacgcgaagaacatatctatcagacagaaaaaacaggagaactccaacacgacttcagcttcaacatcgacacgaagcgctataaactctggctcgaacaaggaggtatttgtttctacacaggaaaagtcatcaacctcaccaatatcttcaacgataatgctttcgacatcgaacacaccctaccacgcagcaaatcgttcgataattcagatgccaatctcaccatttgcgatgcacattataataggtacatcaagaagaacacactccctgcacatctgcccaacttcgagcacgatcaaacaatcaacggcacactctacacagctattaaaccacgcttggaaatgtggagaaagcgtgttgagcgactcaaagcaaatgtagagttctggaagaatcgtacacgccgtgcacaaaacaaaggcacccgcgacaaatgcattcgtcagcgtcacctctggcaaatggaactaaactattggcaggaaaaactatcgcatttcgagatggaagaaatcaaagaaggtttccgcaatagccagttagtggataccggtatcatcacacgccatgcagctctcttcctcaaaagcctcttcaaaaatgtggaggtacagaaaggaagtgtcacagctgatttccgaaaaatactgggaatccagagcgttgatgaagcaaagaatcgcgacaaacactcccaccatgctattgatgccaccatcctaacaactatacctattgctgctaaacgcgatcgtatgttagaaatctttcttagaattaaagaactcaagaagattctttgtttctctaaggacacaaataagcagcaagagattataagtctcaaccaaaaattacaatatgaaataaatagttgtcatttaggtaacgacatcgcatctcttccatcgtacattgaaaacaatattatcattcgacatcttcgcaaagaacagacacaacaaaacagccgtcgcactattcgtatcagaggaaagaaaatttatgtaaccgatcatcatggaaacaaacataaaaagtggagttctggtgactctataagaggagaactttcaggtcaatcattctatggtgctattactcaatggaaaaaaaagacaaatcgtaacgaaacaactaatcacaaggaacagaacataattgatccaaccatctattatgtcatccgaaaaccattagttttcaaaaacaataccagtgctccaggcttctctagttgggaagatcttgaaaaacagattgtgaataaagcactcataccaatgatgaaaagtcagttttgcgaaggaacttcctttaaagaagcatgtggacagcctatatatatgcttaacagaaagggagaaaaaataaatgtattacgccatatcagatgctacgttcgtattaaaaatcctattgcagtaaagaagcacacctttctatcaagtaagccatataaacaaaatgtttatgctggtgttggaggtttatatgcagcagcagaatacacaaatgggaataaaagacaattcgtcatatattctttgaaagatattgcgcaaaacaagaaaaagaacaatgaaataattcctagcaaaattcttaatgggacgaaaacactaacacttcagcggctcttacacgctaaagactcaattttaatatatgaggaatctcctgaagaattaaagaaactttcaatgacagaactttcaaaacggctgtatgtaattaaaggttttgaagctgcaaaaatacgtattaaagcagttaatcatctttacaatatagacgaaataggagaaactataactgactatcaaaatttgcctatcacaatcagattaagtcttaataaactcaagttccttcttcatggttatgattttaaatttacaacaagtggtttagaattcttagataaatgatcaagaaaacgctctactttggaaatcctgcttacctcaacctccgcgacagacagcttgttctccgcctgcccgaggttgagcaggcttccaatctctctgccaccttcaagcaaaaagcggaaaggaccatcccgattgaagacatcggcatcgtcgtattagatcatcagcgcatcaccatcacacaaggcctattggcaaaacttctcgacaatgaatgcgccgtcatcacctgcgacgaacggcgtatgcctacaggactgcttcttcctctcactggcaacacactacaaagcgaacgcttccgccagcaaattgaatcatctctcccgctccgcaaacaattatggcaacaaaccatccagcagaaaatcctaaaccaagccgctgtcctgcaacgctgtagccactacgaaacacgatgtatgagagtttggagcgaagaagtaaagagcggcgacacgtccaacttagaagcccgtgctgctgtctactattggcaacacttcttccccactcatcctcttttcgttcgcgacagagaagcaacagatcctaaccaacttttcaattacggctacgccatcctgcgcgcagtcatagcccgcgctctcgtagtaagtggacttctccccactctcggccttcaccaccacaaccggtataatgcctactgcttggccgatgatatcatggaaccttaccgcccctttgtcgatgaattggtatttcagttagtagctcaatacgatttctgggcagaaaacgcaatactaacaacagaactcaaacgagagttgctctctatcccaacgctggatgtcatcatcggaggtaaacgcagcccactgatggtggcagctggcatcacgacagcctcactcgccaaatgctttgcaggagagcaacgcaaactgatctttccacaattcgcatgaaacgctttagtgaatatcgcattatgtgggtattagtattcttcgatctccctacgctgacaaaagaagaaaagaaagcatacaccgaattccgcaaaaatctccagcgggatggcttcataatgttccaattatccatctatgcccgccactgctccagcattgagaatgcaaaagttcacatcaaacgtgtcaaatctttcctccccgaatctggaaatgttggcattatgagtatcacagacaaacagtttggagctatcgaaattttccaaggagcacgctacaaagctccaaacgctccaggacagcaactcgaattattctaacaaaaaaggtctcacccaagtggtgagaccttttttgcatcatttttctttttctgcaactaacacttatttgattataaatcaaactcttgcaagcatccagttgtgaacgataatgcaaagatacgattctgaaagcaattcacaacatcaaggtcgtataaaaaaaatggatttatgttgtgaacgataatgcaaagatacgattctgaaagcaattcacaacgtagtagcgtatgcgtcttctgatttcttagttgtgaacgataatgcaaagatacgattctgaaagcaattcacaacagtattcgtcataatactctacgagggtctgttgtgaacgataatgcaaagatacgattctgaaagcaattcacaacatctctctgcctactatttgataatacatagttgtgaacgataatgcaaagatacgattctgaaagcaattcacaacagacagtgccgaccttccctatatcgtgtagttgtgaacgataatgcaaagatacgattctgaaagcaattcacaacttaacccaggacggtatgctccagctcttggttgtgaacgataatgcaaagatacgattctgaaagcaattcacaacgcataaaaattagattcttctttttcatcagttgtgaacgataatgcaaagatacgattctgaaagcaattcacaaccgtttatgaagtgtaaagtagcttacgaaagttgtgaacgataatgcaaagatacgattctgaaagcaattcacaacagcctggcgcgatactattgaaaattttatgttgtgaacgataatgcaaagatacgattctgaaagcaattcacaacctgagcaacagaatgaacatgattatgaaggttgtgaacgataatgcaaagatacgattctgaaagcaattcacaacagtggtcaaccagctaacccgacttttagggttgtgaacgataatgcaaagatacgattctgaaagcaattcacaacctccgttggtaatatgcttccctccctcctgttgtgaacgataatgcaaagatacgattctgaaagcaattcacaactttcggtgtgggtggtgcggaatctttgttgttgtgaacgataatgcaaagatacgattctgaaagcaattcacaactagggtgtcgtacgagcatcctgtgtgtgggttgtgaacgataatgcaaagatacgattctgaaagcaattcacaacagtaccttttttgaaagattatctaaagagttgtgaacgataatgcaaagatacgattctgaaagcaattcacaacaattccttttctcaaagattacctaaagaggttgtgaacgataatgcaaagatacgattctgaaagcaattcacaacgtaggcggttgtccgcgccccaattgatggttgtgaacgataatgcaaagatacgattctgaaagcaattcacaacgtacgagtaaaagaagccatatctaacttgttgtgaacgataatgcaaagatacgattctgaaagcaattcacaacaaagcaggacatttgtatgttaattctgtgttgtgaacgataatgcaaagatacgattctgaaagcaattcacaactgtgtgttgcgttgctgatattaattttgcgttgtaaaagataatgcaaagatacgattctgaaagcaattcacaacctgcccactctaagaacttcggcttttctgttgtaaaagataatgcaaagatgcgattctgaaagcaattcacaacctcgaggatgttatcgacaagatgcaggacgttgtaaaagataatgcaaagatacgattctgaaagcaattcacaacggcgaccgaaacgactgcttaaactcctaagttgtaaacgataatgcaaagatacgattctgaaagcaattcacaacagtatctcacgacaaaagacgagaccgatggttgtaaacgataatgcaaagatacgattctgaaagcaattcacaacgcgtatacaagagatacaagcagacaatcaagaaaagtttggtcatcggaatgctgaatggagttttaaaattttagattaacaataccaaaagattcaagaagagattgtaaatttgcgaaaacaagaaaaaaacattgatgctgatactctttttaataaagtaggcaaaaagaaactcatataaatgaaacaaacgctcgtacttcagatgttcgtcgactctctgggaatatacttctttttagtgatgatcaagttcactctcttgcagcctttcttgttaattatgtttatttacaaaatgcgcgcacgagagcgcaaatatcgaatttagatagtattacggattagcaaaatttcgaggttgcgaacgataacacaaagatacgattctgaaggcaattcacaaccaaatcttttatgatcgtcatcgaaggaaagacaaaacctacacttacgatgagatttccacaaatggcttaaaaataagacaggcagacttgatataatcacgactgcctgaatgtagggtccaaacctcttacgaggaatgatccagtgcaaagataataacacttcttcaaaatcaagtaattatgaagaaatttatcgaaattttcaaagaatcaaatcactacaagcatcttttaggtggtttcgggatcggtctgtgctaaagttgtcctaattatggtctttctccatacgcccgataatgctagaaagttggtgtcgcatgagttctctcagtttcctttgctcctactctatgagttttacgaaatcttttgcgcccacttatttttcaaaataaatagtatatttgcatcggtaagagtcaataattcggttcttacatctaaggaaggtgtcgggggcttttcgggagtacccgacttttttattctttgtgatagatgagactcatccatgatgaatagtactatgccccattctaaacaactgcatctggtattcattttcaaggtgatcgatgtaagccctcagaagaagcgttcggcattcggtccatcatgggatcacttttctttagaaatgagagtattttgttcgtaacttgttatgttgcaaaatattgttatctttgcagcgtgtgaatgtcgaagattcggcgcgataacttcaagctttcctttcacactttcaaaggtggcttcggtcacctttttattttttctaattcagcctttattatttcattcgtttgcctcgcctctccagaaaagaaatcatagccttgtctttgtatattacatagcactactcacttatgtatgatgcagcgtgcaagctcatacgccagcagcagacaggaagaagaggaagcaagggaggaagaataaaacaccgacatgtaaaaatccgcatcgttctctctgcaaagagagcaataacttttcaaaacacaaaaagttataaagtaaaacagaaacttcatgtacatccctacgaggatataaaaaaaagaaaagcaatgatccgtcgccttcctcgtgtgtctcgcgataaacgcggacgaaggataacttgatacattgctttagggcaaaagtagcaataacttttcaaaacacaaaaagttacgaataaaattctctcttttctaaagcgctaaacaataatgcacacaaagatacgattctgaaaacaattcacaactgaaggttaaccgcaccctcgtactgcaaatatacggaaaaatctgtgtaatcttcttttttttgcaattttaattgtcttcaccagaaaaaaagtgaaaaaaacatatcattaatttcatcgtccatagccttattgcgtttgagaacagaataaggctgtcagctgatagccttattctgtcagccgacacccttattgtagcggagctgatgataaggaaagctgaagcgaagaggattcattctcctcctctgctttgttttcgtgccgtcacgttgtcacgttgtcacacttccattataacaaactggaaacatgcatgttgcgcgggtgacaacagcgtgacaacaaaatcaaaacacaaatcgttgccacacgtctaaactcctgtttatcaacccatcagcacctctgtgacaacgtgacaacaaaaagagaacagtttcgctcgtggaggaaaaagcgacaatatcccatgcagcattctgtgtcctctccacgctacacacatacagctctaatgtaaatatatggggtgcaaaagagaagaaagatggaacggaaaggagaaggataaagttttttacgattttattgcagattttgttaactttacttggcataataaaatatagtatatatatttgcctatcccaactaaagttaacatctatacaactacttaaatcatgcaaacaacaccgatgctttcggctccgaaagcaataaaaaaggcattccgcgactacgccgtcttcagtggacgctcgcgccggtcggaattctggtggttcgcactattcaacacggttgtgaccatgggtttgcagtttgcatttttcacgatttctgttatcacgggacttgtttgggtaaaattccttgtttatctctattctttggcaacactcattccgtccttcgccgtcgcggtgcgccgcctacatgacacgggacggagcggtggttggactgtcgggcttttcttctcggcacttccaatgatacctactctccctttggccgtatggaatggctatatctgggcagtagtgattctctctctttgcgctctgatctgcttagctctcagcatcaccatcttggtgttctgcgccagcgattcgagtacatacagcaacaagtatgggccttcgcccaaatatatagactaatatctacaaaagtcaatcaacatttaattatttcggaggagcgctacattgcgaaatgtggcctcctctttttttctaagaaatggtacatattaggaaggaactgaaagagagaaaaaactgacaaaagagtatgagatactactttcgtctgtgtcaaaatagttggagacatacgcttctgtaggaatccatgtgctccgtatctaaaattctttaattcctcaaagctaccgtttttttggtgtatttttgcgtaagacttaacgcacaaaaaatgtttcacagactttttctatatctccccgcccttctgctgctgctcgccagttgcagcagtggcaaaaatcagcacaatcattctgatcagcaaaaccctgccgataccgtggtggacgatgcgctccgtcagcagctggtggactacatcaagcagaagccacaagccgaccatttggggctttatgtctacgacctcacggccgataagcccgtttttggctatcgcgaacaaaccccgatgccaccggcttcgtgcatgaaactcatcagtggcgtggcggctatgcacctgctcacagacaaatacttctaccgcaccacgctctacacgaaaggacgcatcctcaacggcgtattgcaaggcgatgtagtgctacaaggcagtctcgacccgcaactctacgctcccgacctcgctatgttcaccaacgccctgaagcgtcgcggcatccaggaggtggagggcaatgtcttcttcgcgcccgtccacgatgaagtacccacgcctgagcaacattggggccctggcgatgtagtgctccctcagtacggactcttctaccaaccgcgccccaccatcttgcgcgccctccgcaacgcactgcagcgcgccggcatcaaagtggacgccgcacgagtgggcataggcacagtgccccatggagcgcgccgaatcttccgcttcagccgccaaatggggctcgtcctcgggcgggcatggcacaacagtagtaacactcagagcaacggcattctctacaccatcggcttagagtcggcgcccagtgcatccgcaaatcccgaccgccacgacctgcgccagcgtggcgtggactatatacaccgctttgtgcgtgagcagctcgacagcactggaacaaataccatccacgacgcctgcggcctctgttccgaaaaccgcgtcacagccgagctcctcgttaagaccctgcgctacgcttaccaccatcccgacatcttccgcatgatgcgcgcccacctccctatctcgggcaccaacggctctttccgccacatgatggaacgaagcacagcgcgcggtaagattcaggccaaaactggcacactcactcgcccctacggcatctccacactgtcgggattttgccgcggtcgcaacggccatctcttggctttcgccatcctcaacagtcagatgtctatcctcgatgcccgccccattcagcaacgactctgtgaaatcatgattcagtagggagaagggaaacaatggaagaagcagaaggaaaagcccaaaggctttgcctaaaaatccgcccgctctgccgataggcttatttggcgtttttatcacaatatcgtatttttgcagtcaaaccaatcattatgttcgaaatagaaaaaatagagaaccgcgtggaaaaggcggtgctcgttgcgctcatcaccaaaacgcaggacgaacgccaagctaacgaatacctcgacgagctggcttttctggccgaaacggctggcgcggaatgcgtcaaacgcttcacgcagaagctcgatgggcccaattccgtcacttatgtgggcaaaggaaagctcgaagagatgcgcagctggatcgagtccgaactcgaagcggagcgggatgtagatatggtggtcttcgacgacgaactcagcgcgaagcagatccgcaacattgagaacgagctgaaagtgcgcgtcatcgaccgaacgcaactcatcctcgacatcttcgccatgcgcgcccagacggccaacgccaaaacgcaggtagagctggctcaatacaaatatatgctgccgcgcttgcaacgcatgtggacccacctcgaacgtcagggtggcggttctggctcgggcggtggaaaagggtcggtaggacttcgcggtccgggtgagacgcagctcgagatggaccgccgaatcatcctcaaccgtatggcactgctcaaaagtcgcttggcggaaatcgacaaacaaaagcgcacgcagcgttccaaccgcggccgcatgattcgcgtggctttagtgggctatacgaacgtgggaaaatccacgctcctcaacctcatggccaagacggaggtgttcgccgagaacaaactcttcgccacgctcgacacgacggttcgaaaggtggttatcgacaatctgccgttcctcctctccgacaccgtgggcttcatccgcaagattcccaccgacctcgttgattcattcaaatccacccttgatgaggtgcgcgaggccgacctcctgctccacgttgtcgatatttcgcaccccgatttcgaggagcaaatcgaggtggtcaatcgcacgctggccgacttgggttgtgcggagaaacccgtcattatcgtgttcaacaaagtagacgcttacacctggacggagaaggaggctgacgacctcacaccggcaggtaacgagaacgtaagcttggtggagcttcaacaaacttggatgaataagatgggcgagaattgtattttcatctccgctcgagagcgcctcaacatcgacgaactccgcgatttgctctacaatcgtgtgcgtcagctccacgttcagaaatatccctacaacgattttcttttcaatcagtacgacagcgacggccgtccgctctgatttattctctcatatccctaaaagccgagccagtttgcagcaccttctctcgtttccgtgctgccgcggctcggccttttcccacccattatgcaagaacaacattctcgaacccaactcctcttaggtcgtccggccatcgatacgctcgaaggtagcagcgtggcggttttcggcgtaggcggcgtaggcggctacgttgtggaagtactcgcccgcagcggcgtgggtgaactcgctcttttcgacaacgaccgcgtgtgtctctccaatctgaaccgacaaatcgtggcccttcattccactgtggggcaatataaagtggatgcggccgaggcgcgtatccacgacatcaacccgcattgcattgtccataaatatcccactttttatcttccctcaaatgccgacgactacgatttgagccaatacgactatgtggtggattgcatcgacacggtcacggcaaaaatcgaactcatcaagcgttgccaccagctccacgtgcctatcatttcaagcatgggagctgccaacaaaatggatgcaacggcctttcgcgtgacggatattaccaagacaacaatggaccctctggcgaaagttatacgcaagaaacttcgcactctgcgcatacctcatctcaaagtggtatatagcgaggagcagccgctccgtccgctcaccgaggagatgcctgccgaagcaatccaaagcgtttccgccgctgctcaggcttctgccacctcctcccccaacctccccgccggtgctgatgtgtccaacggagcggggcggcgttccgttcccgccagcaacgctttcgtacctgctgctgcgggtctcatcgcaggcggcgaagtggtgaaggacctcctccgcttggccgacacctatcgcatcgcgcctgccaacgctgccaacagtcctgccgcccaagctgcggccgaacgggccaaag

SEQ ID NO: 4158 - DNA, 24278 bp, synthetic construct
  misc_feature 1..24278: note = Synthetic
  source 1..24278: mol_type = other DNA
cgttcgcagttgctcgacagcgtgattgtacgcgcaacaactcctcccgcattggtaataggttcggaagggcagactcctttcgaccgcatcggcgacgaagccgttctgtgggtgccgcaagtagcactggaagcctatcgcgccaacgaaacttggagcaacgctttcaccgatattcgtcctttggagaatcttccatcatcggttaatcgccccaccgacggaaaggaaaacataacgctagccaaccacgtgcttaacgtccgggccaccggaaaaataagcgtcttcaacagtgccggcgtcaggttgggcagcggagtaaacaacctaagcgttgctcttccacaatcgggcggaatctatttactaaacatcgacggtcgtgtcatcaagattctcaacaaataaatcgcctgaccaggagctaacataacataattgaatcccgaaagttcaacaatgttctttcggggtttattctctctattacgtacctttgcggcattatcgttatcttaaactttaaacttaacagaagaaaaatgagactgaaacatgtatttctagttgcctttctttttgttgccggaatcgcatccgcacaaatcggaccgattcccgttaacaaaaacgtaagacaaggtaagctcagcaatggtctgacttactacatcctccacaacgagtggcccgaaaatgttgctaacttctacatcgcacagcgcgtgggctcaattcaggagaacgacgaccaacgcggactggcccacttcctggagcacatggccttcaacggttcggagcatttcccggattcaacgctccttgaatttacccgctcgctcggagtggaattcggaagcaatctgaatgctttcaccggcgttgaacaaacggtttatcgcgtgtgcgacgttccgacgaagagacaatcggccctcgattcgtgcttactcatcatgaaagactggtcgaatggtctgacgctcgccgataaggaaatcgacaaggagcgcggtgtgattcaccaggaatggcagttgcatcagggtccggttatgcgcatctatgaacgtatattgccgaaaatctatcccaactcgaaatatggctatcgtttgcctattggcttgatgagcatcgtggataacttcaaatatcaggttctacgcgactattacaagaaatggtatcgtcccgacaaccagtgtatcatcgttgttggagatgtggacgttgaccatatcgaagaccaaatcaagaaactttggagtggcgtaacagttccggctaatgcagctcaggttgtcgaggaacaggttcccgacacgaaggaagctatctatgtttccgataaagacaaagagatgcagtacagctcggttgacatctacatgaaacacgacgccatgccaaaggaggctaaggccgaccagagctactacatcgaccagtatgccaaaagagttatttctatgatgctcaatctgcgtctccgtgaaatgtcgcagaaacctgattgtccgttcaccatggcttatggctatgacggaaacttcatgctctcgagcacaaaggacgctttccaaatcagtggacaagctaaggaaggaaaagaccttgaaactctggcagctctctatcgcgaggctctacgggtttatcaatacggattcactcctgccgaattcgaccgtacaaaagccgagattctttcgcaactggagtctgaatacaccaaccgcaacaagattaagaacgaccaatatggcgacgaactccgtgaccatttcctcgaaaacgagcctatcccaagcaaggaagatgaatacaaaatcttgaaacagttcatcgaaatgccggctctcaacgttgaggttataaacacattcgccaaagagcagctcatctccgacaaagacagcaaccttgttgctctcatcttcgctcaggagaaacccgacaaggtttatgtaaccgaagagcaaatggccgaaacaattgctaaagtgcggtcagaaaagcttgaaccttatgttgacaacacaaagaacgaaccgctactcgacgaaactaaactgccgaaagccggccgcatcgttcgtgaaaaggagagcccaattctaggcttcaaagaactcacattgagcaatggcgctcgcgtgattctgaagaaaaccgatttcaaagagaacgaaatcctgttccaggccatggccaaaggcggctcgggttcgtacggcaaagacgattacagcaacctgcaacttttcaatcccatcatcggcacaagcggactgggcaacttctcgcatcaagaactcaccaaagctctctatggcaaacaggtttctgtagacctcggccttggcagttactatcaattcttaagcggtagctctgttccgaaagacatcgaaacgatgctgcagctcgtttacctacacttcacagccgttagcaaggacatggaggcctacaacgcaatgatggcacagttcgagcttgctctcaagaacaaagacctgtcgcccgaaagcgtttacagcgactcgctcaccgtagctctctacaacaacgacccgcgccacgcaccggttaccgtaaacacactgaaggaaatagattacgaccgcatcttgcagatatggaaagaacgtttcgccaaccccggacaattcgtatactatttcgttggaaacttcgacgaagcaaccctgcgcccgctaatcgagaaatacataggttgcctgccgcgtgggaaagccgaaaactgggttgaaactccaggctatgccaaaggaaacgttatgaagaagttcaaacgcgtgatggaaacaccgaaatcgatagccttcgacttccgtcatcagatgctgccctacactctcgagaattctgtactggccgacgctgccggacaagtactatcgatggtttatctcaaaaccatccgcgaagatgccagcgcagcctactctgttaacgcttccggcggattaactcgccgcggcggcaagagcatcgcaactcttcaggtttattgcccgatggaccccacaaaggctgatctcgctctgcaactgctcagcaaaggtatgaaagacaacaccatcaaggtagacgccgacaaggtgcagaaggtgaaagatttcatgctcaaacaagccgaccaggatgcaaagagcaacaatcactggatagacatcatcgatgaatatatttggactggcgttgatttccaaaccaaatataaagacaccgttaagggcgtcactcctaaaaagattgccaacttcctcaaggcgctctccgcaactggaaaccgcattcaggttgtgatgttacccacaaaatagagtttgattttcatcgactatattgaattttttatagtcgtccccgagagcttgagagagttctcggggattttatttttattcctactgccccggaaataaattatgagggggaagaaccactagcgtaacccaaaataaattattacagagtagtgaaacataaggaaggttacgtgtaagttttatataaattacgcgagtccggtttgatagagagtcccgctcgggcggaacgaccgtatgtagggacagacctcgcgtctgtccgcacccggacgacaggacgaaatatgttatacggttggcagaggggcggacgcgaccggatgaaatattgttatgcggtcggtagaccgagttggcatggaggcggaacagacacagggtctgtccctacatacgggccttccgcccgaattggcatccgttgttctacacccagtgatagaaaaacaaaaatgattttcggccacagacactctgtgatagaaaaacaaaaatgattttcgaccgcagacactctgcgatggaaaaacaaaaatgatttctggccgctggcactctgtgatgaaaaaacaaaaatgattttcgaccgcagacactctgtgatgaaaaaacaaaaatgatttctggccgcagacactctgtgacggaaaaacaaaaatgattttcggccgctggcactctgtgatgaaaaaacaaaaatgattttcgaccgcagacactctgtgatagaaaaacaaaaatgatttctggccgcagacactctgtgatagaccgtcctgttgtccggacggggtgtttgttccgtaatgacggatggacaatgcgacactgacaagcgacatcgccctattcgttatagaataaaaaaacaagggtgcgtctttcgacacaccctcatcctaaataatctttttaaatatttcaataaccctgtgttccctagtttcctttgggcatagagagacagccgtatttcttcggcgtgtcgtgctgaataataatcttctgcgaattgaagtaaacgctataggcattgtcattagtattatccgggtcgcaatcccatagccagtagcgaccttcctttccaacgttactcaatgcgccgtctacccaccagcctagcgccggaagtgcaaaatagcctgaaacattatgtacgcctgtttttacagtcttttcatggcctgacgatggagaagcaccactccaatcattaccatcgtaggcagtagcatgacctttgattatcttcggaatccaaagcaaacccttgaaaagatgtccatctattgtataagtcgtttcattatcccaatagcaatcttgagtaaggatatatgaagcatcattgggtttaggcacatcagaggtatagtctaccgtaccagactgcacttcataataatccttctcgtaccaacgcgtgtcggtatctagttttggccacacatcattaggagctgccggagctgcgatagaaccaacaccgcccgtgattacccaattatgcggagtgggcaacggagatgacggcatccaatagtagtctttagcgccccacatatgataggtttcgaagttctgaccgaagtcaggaatatcaagcgagaagtataaaggcagattcttcccttcctcgagtttcatcttcgcatagtttcttttaataccaaagacagtgcccgatacagggtctaagatttttatctcaacctgaacattggtgtattcaccagggaaggcaaccatcacagctgctttcttacgagcatctgctctattggcggctatcgatagaccattggagatttccaaacggatatatttattcagagagttactcggacgagttgttaggtcgattcctgcttcgctaaacggacgagttccatttataccctggtcggcagtaatcttcacctgacttatataagtgttcttcatctcgcctttcaggttatacaccataaacgaaatataggacgctttgtggccggcttgataactctgtcctctataagtatagccaccattaggattgaaataataatttatatatggataaaaccatgaaccatccggcttctttaagctaatagtgtgccatccactagcataacctataaaacaatcgccattttcacccaactgatcagcaaagccggcatctccggtttgcttttgaatattctttatccttacctggttaggattattactgccacccacataacgtaaagcatacgtataattctgattggtcaacggaatatcctcataatagaaagaagctttctttattatcttatcatttcctgcatccttttctattggggtcatatacttggccgccttccaattcaccggagcattttggggagagccaaggtcaacgaagaaatacttatagtcgttagcagtccaaacgaagtcgagttttgttgcatcttcgacacctcctgtacgactttttgtctcttcatttccaagaccaccggtaaacaacaccttgggaagttcttgctcctgtccttctttatctttaccgttgtccacgatattatcgctaccgcagccatacagtccaaagactgctatggcgcacaaagcgaatgctgaaaccgttttatttcttatttgaaacatattactcaaagtttatattgctattaattataagtaaactgctctcctggccaagtttgatatcctttcgtacgatagttctcactatcataatcattttctatatgtattccggcacttgagttatttgtataaggatttgataactgtatccttaaatatgcggcatagattttactgtttgcgtgaccaacaccatacccagcatatcccgtactagaccaaaaatagctatatccataactagtagattgaagcatttttaattgtccattttcataataacctaacggaactacatagaaataattacctcgttgagcttctggtacatcactccaatctgaaggagttctactctcagaagtataaccagcacttacatcattgcctccttgtatcttttgagacatatccggaacagatacaccatagttatcagcaataacactagcctttaagaaccatatacgtcctgtaaacaaatgtccatcataggtaaacggttccggatcccagcgcgggtctcctttggtcacataccaatgtaacagattaattgttggagcatctgcatctttactaccagcaggagcatccttaggccctgctaaagcagcagcatctacattactaaaatagcgcaattgacccgttgagggatagtttatttgggcgggaactcctaatggcccccaattgtgagaagcggggaaagtactattccaataattgtcctgtgcaccccacatatgataaagaccaaattgtgagctatagtccttacaagttagcgctgaatatataggaagattctttcctggatttaatgttagggtaggaatacttttggtgaatatggcactcgattgaactaccggatcatataccgtatattctatctttacattggtgtaggttcccggggctagtaccatgatagcaccattggtttttgccgcattcttactactaggaattccataattagcagtgattgtaccactattatctttggcacactgtacctggatatatttctgtccaccagtaggccactgagattggtctataccattatcattaaatttaaaatattgactagtatttcccataaattggtcagatgagatacggattctccatagcttacaatttacaagaaccttatggctttcgtcagtaacagctccaccggcatagggcataaaagttataaaagatgcactgtgttttagagtaaagtcataataaagaccattatcttcggctatagctgtaccacagtcaccataagcacgcagtttatttgcctgtcccggaactaattgttcttggtcagaatagaaataagcttgattaccactgacataattaccgtatctaatcttataagtctcttgatctaaggctaaccctcctaaagaccatgaagctgaagttatacgattttgcgcatctctagtcaacacatcgcgtgtataaaatgaacgccagttatttgttttagtatcccaaagatataatgtaggagaatccttatcttcttcctcatcccaatagaaccggataccggttttatgagtcagcgggtctaactctccataaactccaagagtacgtgagccattgctttcgcgcattgcagtggaatcgataaaacctctaaactgtttgcctttcgcttcgggtttctctgtgccgccattgtcgggattcacaggatctaccggcgagttttcaccggagcagccgtataagcctagcgccaagacaaatgacgcaaggacggttaagtatttactttttcccattgaattaatttttttaatcgtttaaattcctaacaggaaagcatcctagagatcatcctcccagacgctcccccattgcttaccgttgtttacttcgttatcgtcttcggccacaccggcgcctccgccaccttgattataggcgcctccgccactgttttgagcggagccgggagtgttttcgcctcgaatagaggcgtcaagaagataactttcatagtcaacccgacaaactgtgatggcgggcttgacatattcagccaattgttctgtttctttcatcgtttatataatcactattttaattatagactttatcgtcacagaaatatttacccgagtaaaaggggcgctaggcgggtaaatcgtacaaagaaatctattcggcgcttccgaatagatttaaggttcaaactaaataatgcctcttaggaaactcgtatttaagttatcgtgacattaatttttactttcttgattttgatacacttgttctattgtacggctgcaaaattaaacatattttcaaaaacgacacaaataaggatagtatttttgattcaaagcatttcagtggagaggaaattattcgacgatgaacccagcggttctcagatcggcccaaaaattaggatatgatttcgaaacaacttcgggattctttatcgtgatttcgcccaaacaaattgaaagtggagcgaaagacatggccatacggtggtcatcgtaagtatcgattatcggggcaacgtcgggagtacatcgttcaccattccaaaggatgtcgtcgcctataatatgaagcacgtagcctaacttagccatctcacgtcgcatggcctcgatacgatcggtttcctttattcggagactcgaaagaccagtaaataagaaatgcgtgttcattacggggcacagagcaatgagagtttgaacaagatcgggctgattgatgaaatcatattcgaaacgcggcaaaggacgttgatgtttcgtgaggatcaaatttgttaggacacccgactgtttgctttcaaaagcggttttcacgccgagtagtgaaaagatgtatttcgaagccgaatctccttgtcgtgaggcattcataagtccaggcaacactattctgctattggggtcagcaatcagagatagaatggcataccaataaccggccgatgtccaatcattttctatcgtgtagtcacgtttacaatatggttgagcttcaacagcgatggtattgacatccgtccattcggcaatggctccaaactcatgcatcacgtgcaaagtcaggtcaatgtagggccgcgaaatgatttcgccaagtagtcgaagttccaatccatcgtcaagcataggcgcaatgagcagcaatgccgaaatgaattgtgagctcacattgccaggcacatccaattggcctccatgcaatcggcgtcctttgattcgcagtggtgggaacccttcttcgacctcatattcaatatcagcaccaagacttctaagggcctccacaagctcttttatgggcctatgtttcatgcggtcgctgcccgtgagtaaatgctcctcaccctcactaatacttagataggcagtcataaatcgcatggctgttccggacgccataatgttgataatatcgggtctaagagtgagtgcgcgtacaatcacgtctgtatcgtcgcaatccgaaagattctgagggaatataccactacccgtaagcgcattaatgattaaagcacgattacttatgctttttgaggcaggaagattaataatcgtgtcgatattttggggagcttttatggtgtatttcattcctgaatttattgtttttcttactcacgcaaaagtaagtagatactcacaattaattatccctgaatttatctctattctcggccacagagtgccagcgactaaaaaagatattagtcggagttttacagagatttctattttattatcaaaactcacgtatgaatataagatttcctaaatttgcgattgcaaccgtatataaaaagtgctcctacggttgtccgcaggagcaagaaatcttcggcttatagccttgttgtgaaaagtcttcactgtgtatttgattgcaaatgtactattcagacttgaataaacaaataaaaaataaatatgatacaaaaaatttttggactggaccttggaacaaattcaataggttcttctgttagaaacctagaactgggagaaaatcttacggaacagctggaattcttttcctcagatatcttcggaagtagcgtaagcaaaaacagtaatggacgagaatattcattagccggtaatcgatcggcacatcgcagaagtcgtggactgaatgaggcaagaaggcgtaagctgtgggctacactcgacttacttattgagcatggtttatgcccaatgtcgcctgattctctaatgcaatggcgtacttatgacaagcaaaaaggattgtacaggcagtatcccattgaagataaagacttcaatgcgtggatcatgctcgactttaatggtgacggaaagcctgattattccagtccttatcaactccgaagagaattggtagtacgccaatttgattttgaccagcctatagagcgatataaacttggacgagccttatatcatattgctcaacacaggggattcaaaagtagcaaaggagaaaccatagcggaccaggaaaagaacgagaagaagcctattgctgaggagggtgctgacattgccaacgagatgaaggcttcggaaacgaaactctccaaaggattggttgcttatatgcaagagaatcatctaaagactgttggcgaggcttttgctaaacttgaggatgaaagagtaaggatcaggaataatgaaagttatagggcaatacggtcgcaataccaggatgagattaaagaaatttttacttatcaaaaaaaattgtcggtagaaagcgaactatacgaacgtctgacaagtgaaaagaaaggtgtgggcacaattttctataagcgtccattacggtcacagcggggaaacgtgggaaaatgtacgcttgagcgcaacaaaccacgctgcccgataggacgtcctgaatttgaggaattccgcgcatggacactcataaacaacataaaaataagagaaacggcaggagaaccttataaacaactcccaataaaactacggcaggaacttttgaaagactgtttcctctccaaggtaaaagctgatttcaagtttgaggatatcagaaagtatatagaaaaacgattgggacttagtttctcaaacgacgacaagaccattaactataaagacagtgtaagcattgccgcttgtcctgtcactgtccgtatgaaaaagctcttgggagaaaactgggcaaactgccggattgacggagaaaaacggagacaggcacatggaaagaataataataatgagcacattgtaagttatacggaagaagatatttggcatgtatgctataatgcggaagatccggaagaagtctccaattttgcaagaaaagccctgcattgggacgagaataaaatcaaggaattagtacgtctttggacttctataccgcaaggctatgctatgcttagtttgaaagccatccgaaatatcaaccgtatgctgcttttagggcttaaatattcggatgcggtattacttgctaagttacccgatattgtacctgtgtctgacgaagatatcttagctattaccaaagagtttctacagttggaggacaaactgaatcaagagaagcaaatcaataatattgtcaactctctgattgctaactataagtcgaaacttgaagagaaccgctttgccgaccacaattatcaataccagttgggtgaaggagatgacgaggatataaatacacagataaagagtcatattggtgctaaactctgggtacagataggtgccgatgagcagacgaaaatttttcaggcggttaggagtaaatatcaagacttcttcaagagttataagcggaagtttgtggagtctccaaagttaggagagctgctggtagcgtttcttaccgaaaagttccctaatgtaaagagtaagcagtgggaacggttgtatcatccttctcaaatagcaatctatcgcccgattcctgtggacaacgaccgttctaaattacgcttgggtaatcctaatatcggtgccattaaaaatcctaccgttatgagagtccttaacactttgcgtaggagggttaatcaacttttggatgatggagtcatatcgcctgatgaaacacgagttgttgttgaaaccgcacgtgagctgaatgatgcaaatacaaaatgggcattagatagatataacaggattcgacgagatgaaaatgaaaagataagaaaaatcctaaaagaacttaatcctaccacaaatagtataagtgagcaagacattgataaagcccgctatatttttgagcagtgcgagacagatttttataccgatgggaaagtaccttactataacaaggatataaaaaagtataagctctggctggaacaaggaggacaatgtctgtacacagggcaaaccataaatctgacaaacctcttcaatcctaatgctttcgatatggaacacacgattcctaaaagtatcagcttcgataattccgaccagaaccttacgctctgtgaatcctattataaccgttttatcaagaagaacaatatcccgacagatatgcctaattacgacaaggatgtaacgataaacggaaaagaatacacagctatcaagccaagactccagagatggaaagaacgtgtggataggcttagccgaaatgttgatttctggaaaggacaggcaagacgagcacaagataaagacagaaaagacgagtgtatccgcgaaaaacatctgtgggatatggaactggcatattggaagggaaaactggaacgcttcacaatgactgatgttaccgatggctttaagaatagtcagcttgtagatacccgtgttataacccgtcatgcagttttatatttgaaaagtatcttcaaccatgtcgaagtacagagaggtgaaacgactgccgagttccgcaaaattcttggtcttcaaagtatagatgagaagaaagatcgtagtcttcactcccaccacgctattgatgcaactatgctaactgttataccatcggcggcaaagagagaccgtatgcttgaactgttttataagattgaggagactaaaaaagcactcaagaattataacgataacaataagacaggcttaaatctcgaactcaaagggctggaagaaaaattggataaagaaaagaaagactgccgggttggaagacgtgtcaatgatcttgacaggtttatcaatgagaatatcattgttagtcatcacacaaaggatcaagctttgactccggctcatcgtaggttaaggaaacgaggcaaaattgtaggaggaaaagaacatccacgttggcagacgggagattctctaagaggagaaatccataaggcaagttattatggagctatcacacagtttgcaaaagacgcaaatggtaaagtattgatgaaagacggacaagcacaaatagaccctactatctattatgtgatacggagagaacttaagtacaagcggtcgacacaagactcaggttttaccaattgggaagacttggagaaagttattgtcgatacagatcttttcggcctgatgaaagggcagttccccgaaggaacatcctttaaagatgcctgcgaacaaggtttttatatgataaagaaaggaaaaaatggtgagggagatgtcaagacgcataggataaggcatgtgcgatgcaaggctgtcaaaacggcattgagaattaaggagcagacttataagtcttccaaggattataagcaattcttctatgcagctgtaggagacttgtacgtgatgtgttactatacggatggcaagaaacgcgatttcaagatatacagtttgtatgacatatcgaatcatcggaaatcgggcacagaagatattccgaagtttattaccgataagaaaggaaatcatttgccccttgactacaagttacgcacaggcgacatggtgttgctctataaagataatcctgaggagctgaaagatttagatcaagttaatttgaaacgacgtctatacaaggtcaaccgtttcgaatctgagggcctaattatcttattgactcatcacttatcaacaacaaccgaaagaggttgttccataggtaaaatagagaattatcaaaacctcccgacagctatccgctgtggaatcaagacaattaaattcctgataatgggcaagcaccgtgactttgtgattaggaatggtaacatagaattcaaacactgatgataaagaaaaccctatactttgggaatccggcttatctttcacttcgtaatgagcaattggttatacgattgcccgaagttgagaaagcaaatcttccggaggcgataaaacaggaaagcaccagaacgattccaatagaagatattggcgtcatggtgctcgacaataaacaaataaccataacgcagggagttctggcagcattgctcaacaatacggtcaccgtgataacatgcgataacaaacgaatgccaacaggaatgctgcttccactttcaggaaacacattgcaccaagaacgtttccgcaatcagatagaagcagccgttcctttacgaaaacagttatggcaacaaactgtcaaggcgaaaattgagaatcaagccttctgtttgcagaagaacacgtcaaaatcattcgctcctctacatgttcttgcccgtagtgtgagaagcgatgatgctgataacaatgaggcccaggcggcagcctattactggaaaaacattttccccaacctacctgattttacgagagataaagaaggaacaccgcccaacaacctattgaactacggatacgccattctgcgtgcagtgattgcgcgagcattagttggaagtggattgcttcccgtctatggtatccaccatcataaccgctacaatgcctattgtttggccgacgatattatggagccttatcgcccgttcgtcgacgacttggttatcaaaaccactaacaaaaaagaaatccccgcagaattgactaccgaacttaaacaagagatgctcatgatacctgttcttgatgtacttattggaggcaaacgcagtccattgatgattgcagcaggacaaaccacggcaagccttgcgaaatgttataatggcgagagtcgcaatattgcttatccatctttcgtctgatgcaaagacttagcgaatatagagtcatgtgggtgatgattttcttcgaccttccaaccaatacggtcaaagaaaaacgcgcctacaccgttttccgaaaagatttaatgaaagacggcttcaccatgtttcaattctccatctatgttcgccattgtgccagcagagaaaatgcagatgtccatgtgaagcgtgtaaaatcctttatgccccgttcggggaaagtctgtataatggttataaccgacaaacagttcggtgatattgaggttttcagtggtacaaagccgctcgcacctaatgcccccggtcaacagctcgaattattctaaaaatcgggcaaggaacatactcaaaaccttattagcagatattgagagaagctaatctcttagggatttggttcgtcctttcgtcaggagaacgaaacccatggagtttgacttgtctgctcccctaaagaatcatattttgttcgtcgctcttcgctccctgtcaacttgggcgtcagcccgcatgtagggacagactgcgtgtctgtcctaccgttcgacagggctgataaacatattatcctatcaaaccaccaggcgattgtacattcattcgggttaaggggctggccggacaaacacgcggtctgtccctacatgcgggctaccttccgaatccacgtcgattcggactgcatccggctatttcttgaccgcatgagagccaaatacaattgtatttgccctcctttcaccaggagaacagaaaccccatgtggttttgccatcatttcatgttaagaactgagtttgataccggatttcaacgctccaacttcaagaagaagttggagcgttgaaatccgggtgctcctttttcgagccggagagaattagtttgactcctgatagaatttcaccccgtcgaatatatctcccgcgcttatacctacgtctactcggcgtgctttaccactattattaggatatatttcggcagtaagcacattaccttttattttgagtttgaaccagcttcccgacagttcatctagtttcttttgtgaaatattattgccattctcaagaacactttccatccaaaatgtttgataattggtgcacattacttggattgttgcacctgtacttggaaccttaatgtttctgctggcatccatctccgtactggcccgaagttccatgggatcccaaacgccatcgtcgtcagccaggttgcaggaggtgaggacacagagcattgaaacgaaaacaaaaataatcttcttcattgttgttgttattgttattagaaaaaattgacttgtgaggttgtttgcaaagctaacatttatgccgctctagttcttgagttgcggatattgtattcgcgtgtgatacatcgacatcaaacgctcgatgagaaccttctttgccgtggcgatgtcgtggaatgtgatggggcagtcggtaaaaaatccgtcggccatttgagcgtctatgaggcgattcacaagggcactgatagtttcttcagtatattcagttagcgaacgcgaggctgcctctacggtatcactcatcatcaatatggcctgctcgcgtgtcgatgggtttggaccgggataacggaacggggcttcgtcgacttcctcgccaggatgagtgttgcgataatttatgtagaaatatttcacgagtccattgccgtgatgggtcgtgatgaattcttttataacttttgggagattatacttctcggccagtctcaacccttcgttcacgtgattgattatgatgtgcgcactttctagatcggaaatcttgtcgtgcggattcaccccggcctggttttcggtaaaaaatactgggttttccatctttccgatgtcgtgataaagagctcctgttctaactagctgtcctttcgctccgattttatttgcaatttcggctgccaggttcccaacagttatggaatgctggaatgttccgggtgccacctcacttagtcggcgtagaatttcgttatttgtgttcgaaagttcaaaaagagtgacagtggagatgaacccgaatgttttttcgattactagcatgagcggataagtgaaaagcagcaggaatccgtttacaaagaagtgatagtaaaccgtttgatcgagctttgagaagtcgtcggcttgaataagttggattgcaaaatatatcgctgccgaaccgagggttacaagtagagccgtgaggaatatctgacttcgtttcgaaagttcgcgaagggagaatatggccacaagcccggccacaagctgcacaattatgaattcatattgatatttcaccgccactgcacacaccagcaccatcgttgcatgagcaataaatgccgttcgcgaatccatgaacacacgaacaaatatcggagccatggcaaaaggcagaatatagacacttaggatgttgtgctccatcataaatgaagtgagaatcgggaatatcacaagcatcgcatagagtagcgatatggctcgcggtttgtcgaaataatccttccggaacagagccaaatagagcgtgaaaagtccaatgagaatgagcacatagagtgcctgtccgaataacgtagaagactcctcgtctttcgattcgttcatcttctccattgctttttcgaacgagttgagtacccggaaagtatgagcatctacgatatcgcctcggtcgatgattcgttgtcctttaagcaccattcccgaagcctggggtacaagactgagcatatcggccatctcgctctgactgcgtttcttatcgtagatgaggttcggttcaatgtattcgttaaggttgcactgttgcaattcggttcgtttcagctctagcaacgggtccatgaaaatgtgctcgtaggctcccatagttgaataaattttactaatgggtttgctcacagcctgcttcccggttatcacatggatcatgttatttgtatcgcgtatctgctcggaaaactgctgcgcactcattattccattggaatacagttcatgcaaacgcttgacgatagcatcgttataagcagatgagaggccaggtatacctttctcatatttctccctgaactgtgaaatcttcttcccctctacttctgtattgagattgaaatagggctggaaatgctgcattattgagtcgcgttcgcgtttcaatgcttcctcggacttaaaaatcgggaagtcgaactttgcgatgagctgaccatacatccacggcttaccctcatcgtagtggaagagctttccttttgtcctcgggaggaagaaaacaatgagcaccatggttaagatgacgagtatgctacgggtgattagattacgccagtgataatctccgttattcttgtatatctgcatgtttacttatgttgcgtgagccgcaaaaatactaaaaaacgtagagttattcagcttgtacatcggatgctggatataataatatacgtttaatgaagaacggctacttatagaattacagtaactttgcgcgacatgaaaacaaccgatattcgaccgaaaggcaacccaattgattacacgataaacattcgaggacgactgctcgacttgagtcggcctattgttatgggcattctgaacgccacgcccgactcattcttcgccgatagcagagttcaaaccgagaaagaaatattcaatcgcgcgaacagtataattaccgaaggagctaaaataatcgacgtgggtgcctgttccacacgtccaggtggcgaagtagctagcgaggaagaagagatgcgtcgactggaaatagcgttgcccatcattcgcaaggcacaacccgatgcaattatatcaatagacactttccgcgcttcagtagctagaagatgcgtcgaagatttcggggccgacataataaatgatgttgaggaaggcaaagaccccgatatgttcgccacagttgccgaactgggcgtaccgtatatccttatgtcgactgcaccgaatttgcatgacatgctgatacggttcgccgacaaattgcaaaggttacgcgaattgcggcagaaagatataattatcgatccggggttcggattcggcaagacaatggatgaaaactatacccttctaaacgagatggagcgcctacaggtgctcgaactgcctatgctcgtcggcataagtcgcaaacgaatgattcacaaactcctcggcataactcccactgaaagcctgaacggcacaacagtcctaaacaccatagccctgagcaaaggcgcatccatattgcgggtacacgatatcagagctgccatcgaagccgtgattatctacaacgagatgatttccaaaacaaaataacaaaaactatgttcttcgaattcagtataaaggacgccatcgacataatcctagtagcgctgatgctctactacctgtatcggctgatgaaagaatcacgctcgctaaacgtatttgtgggtataatgctgttcgtcattttatggctcattgtgagtcaggttctagaaatgcgcctactgggcagcataatggataagctcgtttctgtcggcgtaatcggcttaatagtgctctttcaggaagaaatccgccacttcctttatagtcttggcgctcatcggaaggttcggaatctgatgcaactcttcaccaacagcaacaaagaagatgtcgacaaagaggctataattccaatcgtcatggcctgcatgagcatgagccgtggaaaaataggcgcactgattgtcgttgaacgaggaatattgctgggcgacataatcgaaacgggcgatataatcgacgccagaataaatcaacgtctcattgaaaacatatttttcaagaactcacctctacacgacggtgcaatgataatttcgaaaaaacgtatcaaggctgcaggctgtatcctgcccgtgagtcacaaacaagacattcccaaacaactcggtttgcgccatagagccgctatgggtatctcgcaagattccgacgccatcgctattgtggtttctgaagaaactggcaatataagcgtggccatacacggtgaatttcagctccacctatcagccgagcagctggaaagtattctcacaaaagaaatgatccagtaaaataaaaggatagcttatcatttagcctataaggaaacatttatatataaaagaaacgccgggactctcaacgagctccggcgttttggttatgtttaactcaaaattcttcaattagaagggaacctcacggtcacctttgtaatcctgaatgatccgttaaactttaccttaaatagataactaaaaacctaaatctattactactaacctaaacaatctattaaccttttgacgatgcaaaggtagagcagcgattagtttctcgcaatagtaatgctaagataactgtattttaattcatctttcttgacttacatcaaatcgactagcatattctgtcctttggcatagtgtggttcaacctagctaatctataagaagagaatatctataccaatattccaaaaagggttgtatacagcgactagtagtaatcagtggctgtactaattttgaagagagctagcattaactttaaacagtgtcgccattactcgcgattagagccagaactaaataataatagctctgctattggctgactacttaattaattcttacttcagaaagagtctataaaatcgttcgcgcttactcttgaaaatgcatacgtgagcgcataaatttcttcacgtgtccccgtgaaaagcaacacgtgagaaaatttacggggacacgtgtcggccgacaacgcaacacgtaaagaaatttatgcgctcacgtatgcgatttcaagagcacgtttacaccaccgaaaagcattgcgaatcggagagcaaaatgatgtgtgaagatatttcatcgcagagcctttcataccggttatgcactggttttcaaaagagaagaaagtttcacagttacaatctatttatccctatctttgcgcgtattatggcaataagacaaacatcccttaaagaacggaaacgaattgacattcgcgagccacgaagatataaagtgattattcacaacgatgaggtcacaacaatggatttcgttgtaagagtgctacgcgaagtattcttcatgtcgcccgaagatgcagaaacaatgatgatgaaagtacacaatgaaggcgaatcggttgtgggaatttattcctacgacattgcacgctcaaaagtaagcaaggctatgtctatggcccgcgaagaaaagtttccgctacgtttaacttacgaacccgaattatgattaagtctggagaagtgcccgtaacaccatggctcggacgagctatcggcacaacaatggcaatggccgcattgatgcattatgaattcgctattcccgaactgtttcttaccaatgcgatgaatcagaaaccgttccagatagcaatgaccgacgatgtgatagacaaaaataaactcaaccaaaaactcaataactatctcgtcgcacaggaacgggtgacgggagatgacgagaaaaccgaaacccgattctccgaacaactccaagaactcttcaccaacggactcaacattgccctgaaaagcggcgaaaaactgctcgacgtgcctcacatggtgcgtgcgatgttcgacctgaaagaatcgatggcagcattctgtctcaaaacgaccgtgaacgacgaagacaaattcatcaacaaactatccgaagcttatagccgattttcagctagcgaggaagccccgaacgacccacaaatgactctaatgcgcgaggaagaaaccgaagaaggagaaacaaccaacgaagatacaccctggaaacaactcgtgacaaacataaacgacatactcgacagtcataacccactcatcgggcgcgaagcagaactcgacagaacaatacagattctctgccgaaaggaaaagaacaatccgctacacataggcgaccccggagtgggaaagacatcgctcgtttacggcctggccaaaagaatcaaagccggcaatgttccgccccgcctccaaagatgcaaaatctatcagatggacatgagcacactcctggccggagcacaattcaggggcgactttgagaaacgactcaaagcggttatggatggggcaaccgaagaaggaaacgtaataatctacctcgacgaaatacataacatcatcggagccggaacaacatccgacggtgggcccgatgcttcgaatatgctcaagccctacctcgaagccggtaacatacgcttcatcggttcgacaacctacgacgagtacaaccgacacatgtcgcgctcgaaaggaatcgttcgccgctttcaacaaatcgacatccaagagccatccatcgagacaacaatcgaaatcgtacgcggactcaaaaagcaatacgaaacctatcacaacgtacgctatcgtccagtaaccctggaatacgccgtccgagcaagtgcgaaatacatacacgaccgccatctgcccgacaaagccatcgacctcatcgacgaagccggagcctttcttgaactacatcccaatcaggctacgaaccaattcgtaaccaaaggcataatcgaccagattctccagaaagtctgcaaaatcgacgcaaaggcaatgaaagaagaaagcaacgaaagccttcaaacactcaacaaacgaatcagcgccaagatattcggacaagacccggcagttcgtcaaatcgtcgaagcagtgcaaatggccaaagccggtttgctcgacgagcagaaaccccttgcaaatcttctcttcgttggccccaccggagtaggaaaaaccgaagtggctaaagtgctcgcacaagaactcggaatagaactagtacgattcgatatgagcgaatacaccgaaaagcataccgttgccaagctcattggctcgccggccggatatgttggctacgaagacggcggactactcaccgacgcaatccgcaagacacctaactgtgtactattgctcgacgaaatcgaaaaagcacatgccgacatatacaatattcttctacaggtgatggactacgccaaactaaccgacaaccgcgggcagaaggccgacttcagaaacaccatactcatcatgacatcaaacgccggagcacaattcgcctcacaagccaatatcggattcgccggtcgaacaacacgaggcgaagcaatgctcaaacaaataaaacgaaccttcaaacccgaattcatcaaccgcctctcatcaattgtcgtattcaacgaaatgagccgacaaatggcccaactcatcctccaaaagaagctcgacatacttcaacaaatgctctcagcaaagaaaatcaccatggaaatcacccccgaagccaacgagcatctactcgcccaaggattcacgcccgaatacggagcacgcgaaatggaacgcatcatcaacaacgaactcaaaccgctcttcgtacacgaaattctctttggcaaactcagaaaaggcggagtggcaacagttgaagcagtcaacaataagctaaggctcaaaatcggataactacatggtgttccaactctacaaagacatcatcgaattccccgacccgcacatgggcgacgaagacgggctcctagcagtgggaggcgacctgagcacggcccgcctcctgatagcttatgaaaatggaatattcccatggtacgatttccgacgctgcccccaaatagaatggtggtgcccgatgcaaagattcgtaatctttccagccaacatccacatctcacacagtatgcgaaccctcctaaacaaacaagcctacaaaacaactatcagtcaagccacagagaaagtgattgaccactgctctcaactacgcctcaaccaacaaggagcctggctcggtaaagaaatggttgcggcattcaaggagctcaatcgagctggctatattaagagcatagaagtatgggacgctcaacatcagcttgtcgg

SEQ ID NO: 4159 - DNA, 24278 bp, synthetic construct
  misc_feature 1..24278: note = Synthetic
  source 1..24278: mol_type = other DNA
cacacccttgatgagtgagttaagtttagagataatccaatggtcaatctctggtgcatctgtcttcacagcctcacatgttgtagcatcatagccatcaacattagcatacagtgcaaagaagctatatgtattatataaggtaccgaagaacttacggcgacactcgtcaacaccttctgggtcgaacttcaagttatcccatggttcgctgttcgtcatcatatagaaacgtacagggtcagcaccatacttattcatcatctcaaatgggttggtaacgttacctacgtgcttactcatcttgttaccctttgcatcgagtacaagacctgttgagataacgttcttgaaggcaacagagtcaaacaccattgttgctattgcatggagtgtgaagaaccaaccacgcgtctggtcaacaccctcgttaatgaagtctgcagggaagaatgctggtggaacagctataccctcatagcatgagtgtaccaactggtcacgatattcagcctcagtcttacctgtagccttcaaaccttctgcattaatctcaccctcaaatggatagtgaagctgagcgtaaggcatagaaccactatcgaaccaaacgtcaataaggtctgactcacgatacattggctttccttcatcatttacaaggacgatatcatcaacgtatggacggtgaagatcaatcttatcatagttctcttggctgaaatcaccaacaacgaagcccgcctctttcagtggattcttctccatgatacccgcagcaacagacttttcaatctcgttgtaaagttcctctacagaaccaatacacttctcgccacggttttcatcacgccagataggaagtggtgttccccagaaacgtgaacggctgaggttccagtcattcaagttctcaagccagttaccgaagcggccagtaccagttgattctggctgccaacggatagtcttgttcaactcaaccatacgctccttcttagcagtgtccttgatgaaccaactatcgagagggtagtagaggataggtttgtctgtgcgccagcagtgaggatagttatgtacatgcttctgaatattgaaagctgtaccttcctgcttcatctccatgcagagaatgatgttcaagtcttcttccttctctgaagccttcttatcccatacgccattaggattgaagcgtggatcgtaagaactctttacatagtcgccagcgtggtgaccgtatgccttttcgtttacacaagccttaacaaagttctggtctaactcgtcgatagtatagtacttaccttgaagatcaaccattggacgagtctgtcccttctttgaaatcagatagagagcagggatattagcatcctttgccaccttagcatcgtccgcaccgaaggtaggagcaatgtgtacaatacctgtaccatcatctgtggtgacgtaatcgccaaggatgatacggaaagcctcactctccatctccacaaacttatcacgaccatcttcgcttgcaaacaccttctctgggtgagctgcagcatagtcgttcacaaattttggtgcaaagtcacctgtctgctcaacaggctttacccaaggcatcaactgctgatagtgcagaccttcaagctctgtacccatcacacgacctacaatacgataaggaacatacttatcaccgcgatcgtaggctggtaattcgccaccatcggtaatctcaccttctgacttcagataggcagctacacgacttgcagccataacgagtgtcaacttctcggcatcgtatgggttataggtctcaacaacaacgtattcaatctttggaccaacacaaagcgcaacgtttgatggcaatgtccaaggtgtggttgtccatgcaacaaagcaaggtttaccccatgtttgctttggtaagtttgccttttcagccaatgctttccaatcctctgtagggatagtaaactgtgctgtgacagtagtatcctttacatcacgatagcaacccggctgattcagctcatggcttgatagaccagtacctgcagctggtgagtaaggctggatggtgtaacccttatagagcaagcccttgttgtagagctgcttaagaagccaccacaatgtttcaatgtatttattatcgtatgtaatgtaagggttctccatatcaacgaagtaacccatctcctcagtcaactgctgccattcagcagtaaacttcattacattctcacgacacttatggttgtattcctctgttgagatatatttgtcagatgcgtggttgtcgatatctttcttcgtgattcccaactctttttctacgcccaactctacaggcaatccatgagtatcccaacccgccttgcgatgcacttggaaaccttgcattgtcttgtagcggttgaaagtatccttaatggcacgtgccaatacatggtgaataccaggatgaccattagctgatggaggtccctcgaagaagatgaactgtggttcgccctcacgctcatcaatactcttgtggaagatatctttcttcttccacgctttcaatatttcctgatttgtgctaacaaggtcaagtcccttgtgctcggcgaatttctttgccatattatctaattgttttgcttattttctaaatacctgcaaagatacaaataacaactgaaactaccaaactttttattatatgaaagacaatgcactttctttcatgcaaagtatcagttcgaaatctaattcgtgtatcatattgtgtctgtttttactgatagtgctttgaatgctatgtgaattgataaaggataattagttttagtgatttaataacaagtttggcttaatgtaagatggttaagttgggtagctttgtgtttgtagaattcttgagttgtaaagaaaaatcatatctttgatttttattgatgcttaattggagttgaattaacgctctttaggcttctaaaagatgcccttttgaagtcttattaacgcccttttaaacgctaattaggcacctcttacagtgctgttatggaactatttgatttagtgatagttataactgcaagcgaatagctttttttgagtaaaaggtgcgctttagagatgaattttgtatagttttttcagcgtctttcgttgttagttgagacctcttgaaacaaataacggatgcacaatagtgcatccgcattaaccttactgagaacctataataaagtcacagtttatttttctttatttatctccgttgagcttgtggtgaaactttgctaataatgccttgttttaggctatcttttctttatagctatagtcacaagtaacgttgataaatctttatgattaatttctttttataatgtttttgtattataaatgggtatggatagccctgtcatttcttctataactctgctccacttcccaaccttattcatggttttaccattggttacaccacgcttagtgtattttgaaacggggactttagttcagttcctctttctcgttcattgcctcaaggcagtgaggacagatacctttatagtaaagctgtgtgtcatcaattctaaaacccttgccaatttcgccagtatagcgtggcatttccattgcctcaaagtcataaaccttctcacaacgcttgcagaagaagtgtgcatgtggctcggtaataccgtcgtagcatacgcgatggtcatcaatagtaatcattgatgctgctccgtgctctgacaacattctcaatgtgttataaacagttgtacggctcaccgttggaagttgtttcttcaatgcaaggaaaacctcctccactgtagggtgggtgtgatgagtagcgagatacttcatgattgctacacgctgtatagatgggcgaatacctaatgctattaatttgttatatactgaatccactgttgtctaccttttatcaatttgtactaaataataattccacttaatcataacatttcatcccattaaatgtggatgattgatataatacctctgcaaaggtaagaaatttgtgaaaaactgacaaatatttatgttgtaaaaactacagatattttagaagatgacgcatgaatagttgataagttaacaagtcgcttgcgagaaagacatagcaacaaaagaacagaggtatgttaataacataacaagtaactcattcacttgtcgacttgtttacttgttattttttttacttgtgtgctttgttggaacggatagaagtcttacttttgtatttgataaatgtattattcgtgtattaaataattatttacgatgaaagaagtaagttataaagatttgaaattcaatccgttcaaccttttaggaaaggaatggatgttgttatctgctggtaatgagcaggatgggtgtaacacgatgacaattagttggggacatattggctgtatgtggggccataacgacccaacagttgttgcctatatacgtgccagtcgctatacaaagacctttgtagataaggaagattactttacgctttgcgtgatggatgcctcttttaagaagcaaatggcttatcttggttctgtttcaggacgtgatgagaataagatagagaaggctggattgacaaaggtttttgctgataatagtgtttattttaaggaggctaagttagttcttgtttgtaagaaagagtatgctgcagacctaaaggaaagtggttttattgataaggagatttttgaacaggcttatcctaatggcgaccttcatacgatgtatgttggtaagattgaaaaaatactcgttcgtgatgatgagtatcttggttagtaaacaagtgaacaagtagacaagtttaccagttgcttgtaataaaagatgaattgtaagaggcaaaaggtttataagggaatgaaaatagagtatatccttgcgtttctattgcttcttgtggcttgcaaaccttatgatgattataaggaaagaggacattggaagcaactgaaagagaatgaacgtataggtttttattggcggcacaatgataaaatctatgctgccttaggcgattctgccgtccttatcaagtatgttaagcctatggaagatgtcgatatagcgaccttctatgtgaataaaaaaactaccaatgggatggagaattatgctaaggataagaagaatgtttattatcctttgcatgcaatatgcgttgatgctgacagctatggttatgagtatgctacagagcttattgtcaagggtgcctttccctcttcttttagatatgtcggggatgggaaaggaattgatgggtatacgatgtatagatatggtaggcgagaagacaagtgaaggagtagacaagttaaccagttgcttgtaataaaagatggtgtatcatggtaatagacatagtaacaaaggtagcgtgataatttaataagtaacttgttcacgtcctttgttattatgtcttttttttatcttttacacaagcaactggttcacctatctacttgtttactttgttattttgtcttttttatacagtaaacttgttcacttcttcattattctgtccttaataggataggtgttgaggctccgcacatgtggtgctaacgcttcgcacgagtggtgctaaccaacagcacaaggcgtgcggagcaacaataccgctgtagaagatgagctataagctgattgatagacgagtttaagagtagaaaagttgcttgttaaaatctcatttccttttttctatctttctcacaagcacctcgtaaacttgtttactcgtccactcgttcacttacttaatatcatcgtatgcacgaatagcctgaaggaaacgtgcattgacatcctcgaaagtataaagaccgtcagtattctgattgagacccttcaactttaaggagaatacttgtggagcatgctgcaggtcgagtagggacatctgcttaagttggtctgtactctgataaacaagatttacggctatataagctttaccagcagcgtcgacccacttctctaaaacaagttttgaaccgataggtgtcttcttttcgatagagttagggagtgagtactcctcaacaccgagggcagcatcaacacttgcaatgttagaatcgtgaccacagagaaatgtaaacttacggtctttatcgttcaactcatcgtacatatactgcaaaagtgggtgagccacgttgacagcaacgataggagcggtgaaaagcacatcgccatatacgtcttttaccttagcaatcttagtccaatcctcagttgttagtttatgaccaaaggcagctttcatgccatctggctcctcataatactggaggataaacgcgtcagaagctgagttagcgttcttcaacgaacctttcattcctggttcctgattgagttcaagcgtaatctgtgtatcgttattaacgaagtcttttatatgtagtaggcttactttatcactccaaattcctgaagacccataaatcctgcctgagcattgaagtggatgtctgcaaagaaactaccactatcaattagtcttccctctttaatcttatacttatgtatacctgtttctggtattgtatagataatgctgtcattgatgcaaaacattctacaacttccatcagctcggatagagtcagcaccttgaatttgtagatggtgattggtaaggaggagtaattggggattctgctgaccgtatgttagcagactgctgataaatactttatcctgtgttcctgcaacttgttttatctgttcccccttttctacaaatacaccattattgagcgtggcaatatatatgtcgtcgctatttggtgcctgatgaaaagcggttatatatctgttgttcatcgccttaatggtatctgtcttaccattttgggtatcaatggataatagatagtcttgcacaccaaggagtattttgctttggtgggacagaagtgccatagaggtgatacgtgtctttggtttcgccagtagctgtggacgcttaaagagttgattgacaaggtaatgattaccaaggcttagcctgaatagctggttattagcattatagtaataaatgtcctcgccattggcatacatctcctttggcaactcatcgttctcaaagtcataaatctttgtagctacttgttctcctgctttttgacggaataactcatgttggttattaacatagaggaggtctttgtcggatgcacaagcagcaatgattggagggttagcgttaaagaaaccaagatggtgtggaatacgccatatagcattctttgtcagcaggatagagaagccattgccatcgtcggcaatagctatttgatgcggattgtctggaatattatttcgcaatggaatactaacaaaacgctctaagttgtcggataatagtattgtagatgatgtgatgaaatagtaggttgaactggctttatagaaggaaagtaccgattggggcagtgagaacgtcttactctctgtaccatcaaatccttcgatagtcaactgcttatcagataagatgtagagttttccatcatagatagcaacattgcgtatgttctctcctttgtgtcgcagttctattttctttgtagggagatctatgcttattacgccagcttgcgttgaagcaaaaagccatttattcccaacatgacagaggttatttaccaaaaaaggttcataatatcgatttgtatcgtttatatggatagggtagaggggctttaatccttgctgttgctgattaagcggcatggagaaaagtccttgagaagtagcaacaaagagattgccgtctattatttcaatactatatggagagtatcggctgcctttgcttggaatctcaaaggttgtcttatgaatgagcgtgtcgccagctatgttccataattgtaaaccagcattacgtgttgccacccatatctgattgctttggttggaatcacgctcaatgtcatagatgcggtctaaccccgtgtagaaacgcttcctattctgtccgtcaatatgccatataacacctgtctcaccgcctatccagtatccattcttatctatagacagcgttgacaatcggtcatcatagtggaattcccgctctgataatgaccgtgaagtagttgtttccttgcagcctgtgatgataaataatagtatcaaacaaagccaattaacaagtaaacgcttctttgtccttatgttatattttgtagtcattagattctactttgtctacaaagataacgaattactccggaaatgtgatatgatattttatattgtttgcagaaaaatgatgcttcggatgtgttttcttattaaatgaatatctattctatcttgctacagagtggtatatatttctaacataagtctttctttagtgcttttccgtatcttatagtactcataatgagcctcatttatgattttctatcgttgtgttgatgctgcgcacatgttgtgctgatgcttcgcacataatgtgctaagggtaaacaccaatggtgttgatgctaaattgttttgcaatatgtagtcaaagtaaatgcaagtcttagttatataagccaaagtaagtaatcttaaactattaagattgttcttctgtttattgcataagaaaaggggatgtaacgctacatcccctttactataatcgtctatctcttattatttttcaagattcgctgtgcacaatctgctaaaactaccactgcgcctgctaaaatacatacatccttgatgacaagtcgacctgcacccgtaagtaacgggaatccgtgctcgccactacctaagtctggtacccatgtttcaggagtcgtgacaaggaaggatagcgttccgaatgtcatgataataaccagtccggagcctacaaaaccaatcttagggaaccaaatacccaataatgtcaagataccgaatgacatgatagcaatacctaagccatgtgagaaggtgtaagtattatttgccttgtgccactcatgcttaacttgatcaaactcaccttctttgagtttgtagtccttatattcaggtgcatcctttgaatagaagaaactcataaatggactgttagcaacgaaaggtacaataccctctgcctcatagttccagaatttcaaaccaccaatccatacgaagatgataaagatggcaatacgtatcaaatgaatacctgtacccttcagcgatgctgcagtgttaagaacgaaatctaataataattttactttgttcataatctgttttttattgactttatgtcttgaatttatatttgtgtttgtgggttttacccagcaatttatagattaagtttagtcttatcctattcctttaacctatttttatccttatgtttggatttgtcggcaaagatatatatttatcttcaaactgcaaagaattattttgtatttattccaaataaatcttcacaatccttacttttcatgcctttttaagaactaattacctgaaaataccatgtttgtggtataaaagaaaaccgttaaaagaattaattatgtagaacttatgacttaatttaattatatgttttgtattaattgtgtatatgtgcttacatgatatagaattattttttgatctatggaatattttggttatttcttttaatttaataaaaatattcattaatttggaaatgtgagaaaaattatataagtttgcatttatagaataatctaagtaatgtaatgatgtaattaagaacctaaaagaagcctaagtagtaaacttatagtaaatatataaaaaagcccctacggttgtccgcagggcgcaagaaaattcttcggcttatagccttgttgtgaaaagtcttcactgtgtatctgattgcaaatttacaactattttttgaatatacaagtaaaaccataaaaatatgacacaaaaagttttaggcttagaccttggcactaattctattggctcttcagtaagaaatctggacctctcagatgacttgaaagggcagttagagtttttttcttcagatattttcagaagtagcgttaataaggaaagtaacggacgtgaatactctttggctgcacagcgttctgtacatagcagaagtcgaaggttgaatgaagcaaggcgacgtaagttgtgggtaaccttggacttactaattaaatatggtttttgcccaatgaatcctgagtctttaatacgttggcgtacttatgataaacagaaaggattttttagagaataccctgtagatgataagaatttcaatgcatggatacttttggattttgatggtgacggtaaacctgattattccagcccatatcagctacgtcgagaacttgttacacgtcagtttgatttcaatcagcctattgaacgttacaaattgggtcgtgctttgtatcatattgctcagcatcgcgggtttaagagtagtaaggatgaaactatattacagcaggaagctaacagcaagcaatcacttacagatgaaaccacagatgtagctggagaaatgaaagcttcggaggagaaactgtcaaaggggctgtctacctatatgaaggagaataatcttttgacagttggtgctgcttttgctcagttagaagatgaaagggtgagagtacggaacaataatgattatcgagcaatacgttcacaatttcagcgagaaatagaaaccatttttaagtttcagcaaggtttgtctgtggaaaacgagttgtatgaacgccttgttagcgagaagaaaaatattggtacaatcttttataaacgtccattacgctcacaacgtggaaatgtgggtaagtgtacactcgaacgtacaaagccacgttgcgctattgggcacccattgtttgagaaattccgtgcttggacattgattaataatatcaaggtcagaatgtctgaagaggaacaagcagaacaacttcctatgaagttacggctcgaactttataatgactactttttagcatttgtaagagcagaatttaagtttgaggatattcggaaatatcttgagaagcgtctgggtgttcatttctcttataatgacaagactattaactataaagacagtacaagtgttgctggctgtccaatagcagctcgattcagaaaacttttgggagaggattgggagtctttccgtgttgatgggcataaacagagacaggcgcatggtaagaataacgcttcgttccatactgtttcttatactgttgaagatatatggcacttctgttatgatgcggaggaaccagaagaggtgttgtcttttgcgcaagatagtttaaaatgggaaaagaagaaagcagatgaactcgtccgtatctggtcagcaatacctcaaggctatgcaatgttgagccaaaaggctatccgtaacattaataagatgttgatattgggattgaaatactctgatgcagtgttacttgctaaggttccagagattgtagagataactgatgaggaaattctttctgttactgaagattatcatcgtgtggaagcacaggttgggtatgagaaacagattaataatattgttaatgctctcatagccaagtataaatctgcgtcagaagaataccgttttgccgatcataattatgattatcaattagatgagtctgatgaaaaagatattatcaaacagattgagagtaatataggtacaaggaagtggagtttgttggatgccgatgatcagactgatattttacagaaagtccgagataagtatcagaacttctttagaagtcacgagcgtaagtttgtagaatctcctaaattaagggagtgctttgaagaatatcttatgaagaaattcccgatgattgagggagaacaatggaaaaagttatatcatccgtcacaaatcgctatttatcgtcctgtttctgcaggtaaggatcgctctgctttaagactgggtaatccagatattggtgcaataaagaatcctacagtgttgagagtgcttaatactttgagaaagagagtaaatcaactcttggatgatggggtaatatctccagatgaaacaagggtggttgtagaaacagcacgtgaattgaatgatgctaacagaaagtgggcattggatacttacaacagaatccgtcacgatgaaaacgagaagataaggaagattcttgaagagtattacccgaaacgtgatactataagtacagatgatatagataaggcacggtatgtgatagatcaacgtgaaatagactatttcacagaatcaaagacctataataaggatataaagaagtacaaactttggttggagcagggagggcagtgtatgtatactgggcgtaccattaatctatcaaatctttttgatccaaatgcttttgatattgagcataccatcccagagagtctcagttttgatagttcggatatgaatcttaccttatgtgatgctcattataatcgtttcataaagaagaatcatattcctgcagatatgccaaactatgataaggctgttatgatagatagtaaagaatatcctgcgataacatctcaactacagcgttgggttgatagggttgaacgtcttaatcgtagtgtagaatattggaaaggacaggcaagacgggctcagaacaaagatcgcaaagatcaatgtatgcgtgagatgcacctgtggagtatggaattggaatactggaagaagaaactggagcgcttcacagttactgaggttacagacggatttaagaacagtcagctcgtggatacacgaattataactcgtcatgcagttttatatctgaagagtatattctcacatgtagatgtgcaacgaggagatgtaactgctaaattcagaaagatacttggtatacaaagtgtagatgaaaagaaggatcgtagtttacattcccatcatgctatagatgctacaactctgacagtaatcccaagttctgcaaagagagagcacatgctggagttgtttgctaagatagaagagattaataagatattatctttctcaggaaacgaagataggataggattgaaacaagaacttgatggcttgaaaaatcagcttaataaagaagttaaggcttgtaggataggacataatgtttcggaaattggtacgtttataaatgataatatttttattaatcaccatattaagaaccaagctcttacaccagttcgtcgccggttgagaaagaagggacatatagttggaggagtggataatcctcgatggcagactggtgatgccttgcgaggtgaaattcatgaagcaagttattatggtgcgataacattgtatgaaaaagataaggatgggaaggtcataataaaaggaggacgccctcatgttgaccctacaattaaatttgtaatacgtagagaattaaagtacaaaaagtcttctacagatagtggttttgcttcatgggatgatcttcagaaagctattgttgataaggatctttttactttgatgaagggacaatttccagaagaaatgtcttttaaggatgcttgtgagcagggtatttatatgataaagaggggaaagaatggtacgcctgataaaaagctgtacagaataaggcatataagatgtcatactgtgcagaaaaatgctttgaagataaaagagcaaacttataaatccgagaaagaatataagcgttatttctatgctgcagttggagatttgtttgcaatgtgttgttatacaaatggaaagactcgtgagtttagaacatacagtttgtatgatgtttcttgtcatcgtaaatctgatatagaagatatttcagagttcatcaccgataagaaaggtaatcgacttatgcttgattataagttgcatagtggcaatatgattttactttataaggatagtcctgatgaattatatgatttagataatgtgaacttgagtcgtcgtctttataagattaatcgatttgaatcaaagggtaatatagtcttaatgactaatcatttgtctacatctaaagaacgtggacgttctcttggtaagacagttgactatcaaaaccttccagagtcaattcgcagtagtgtaaaatctcttaattttcttattatgggagagaatcgtgactttgttattaagaatggtaagataatcttcaatcaccgatgataaagaaaactttatattttgggaatcctgcttatctctcacttcgtaatgggcagttggttattcgacttcctgaagtggagaaagcagagcttcctgatatcgtaaaacaagaagctgttagaacgattccaatagaagatattggtgtagtggtattggataataagcagataactattacacaaggtgctttagcagagctaatagccaattctgcagcagtaataacctgtgataacaaatgtatgcccacgggaatgttacttcctctttctggtaatacattgcatcaggagcgttttcgtaatcagatagaagctgcaattccattgcgtaaacagctgtggcaacaaacggtaaaagctaagatagagaatcaagcatattgcttacagaagaatacttctaaatcatttgttccgctccatgtccttgctcgtaaagttaggagtgatgatgctgataaccacgaagcgcaagctgcagcctattactggaagaatatcttttctgatggtttcacaagggataaggatggtattccacctaataatctgttgaattatggatatgcaatacttcgtgctgtgattgctcgtgctttggtggggagtggactattacctgtttatggtattcatcatcataatcgttataatgcttattgtttagcagatgatattatggaaccttatcgtccgtttgtggatgaccttgtcatttcaacaatgaaaaagatggaggtttcagatgatttgacagtagaattaaagcgggagatgttgtcaataccagttcttgatgttagtataggtggtaagcgtagcccattgatgattgctgcaggcttaacagctgcaagtcttgcaaagtgctataatggggaagctcgtgaaatttcttatccttcttttatttgatgcagcgtcttagtgagtatagggttatgtgggtgatggtttttttcgatcttccaacgaatacaaacaaggaaaagcgtgcttatactattttccgaaaagatttgatgaaagatggttttactatgtttcaattgtcaatctatgttcgtcattgtgcaagcagagaaaatgcagatgttcatgtgaagcgtgtaaaatcgtttatgcctaattctggtaatgtctgtattatggtcatcactgataaacaatttggtgagatagaactttttcgtggaactcagcctcaagaacctaatgtcccaggacagcaactagaattattctaaaaaagagtcccatcattgtgataggactcttttgttttgcattttttatttgtacaaaagccttgttacttactgtaatataggtagatatggcttttcagttgtacgtgataatgcaaagatacacattttgaagcaattcacaacttcataatttttatttcctcctcctgaatagttgtacgtgataatgcaaagatacacattttgaagcaattcacaactgcttgcgtgcctgctccgggtgctgccttgttgtacgtgataatgcaaagatacacattttgaagcaattcacaacatcgtggtaatgttattatgttaacatttgttgtacgtgataatgcaaagatacacattttgaagcaattcacaactctacagacgcctataaaatcattgatgcgttgtacgtgataatgcaaagatacacattttgaagcaattcacaacgcctattgtaaaaagtattattggctctctgttgtacgtgataatgcaaagatacacattttgaagcaattcacaacatactttagacttatccgctggcactggtgttgtacgtgataatgcaaagatacacattttgaagcaattcacaacgctacagactgctataaaattattgattagttgtacgtgataatgcaaagatacacattttgaagcaattcacaacattctctcgaccctcttaattcaaatcgtggttgtacgtgataatgcaaagatacacattttgaagcaattcacaactggttctggattctctaacttctcatttagttgtacgtgataatgcaaagatacacattttgaagcaattcacaactatgttcccctctccgtatggtaacccctagttgtacgtgataatgcaaagatacacattttgaagcaattcacaaccccaacctatgatttacatcttcgtaaaggttgtacgtgataatgcaaagatacacattttgaagcaattcacaaccgtccctacttactccaaactcaagtacagttgtacgtgataatgcaaagatacacattttgaagcaattcacaacaattagcacccttactgatattcaaggtagttgtacgtgataatgcaaagatacacattttgaagcaattcacaactagaagggggtgtagggggcagcattgcccgttgtacgtgataatgcaaagatacacattttgaagcaattcacaactcggtccaatgttagctgctctggtttgtagttgtacgtgataatgcaaagatacacattttgaagcaattcacaacagcctgcgggggttgtggtcggggctgttagttgtacgtgataatgcaaagatacacattttgaagcaattcacaacatgttagcaaatgctccagctatggcttctgttgtacgtgataatgcaaagatacacattttgaagcaattcacaacgtgtagctgctgaaaatgactcattctacgttgtacgtgataatgcaaagatacacattttgaagcaattcacaacagagtggggaactactcgccttaccttacagttgtacgtgataatgcaaagatacacattttgaagcaattcacaacggaaggcatcggggctgtctgtggaaacaagttgtacgtgataatgcaaagatacacattttgaagcaattcacaaccattcagacactataaagcaaatcttctcagttgtacgtgataatgcaaagatacacattttgaagcaattcacaacaacactaaacgtcaacacatgcacgctttagttgtacgtgctaatgcaaagatacacattttgaagcaattcacaactgcgtcctatgtctgtcactggtttaccttgttgtacgtgctaatgcaaagatacttcaaatgtatttctaatggtgtttcatttttacgctttcttacctgacaccagtacgaagatgatgaggatgccgatgacgaaaatgaagaggaaggagcctaatgcacctgcatagatcctacccgtgtgtacctctaaagcaagactccaaagtgacatgggtttatctttcaattcttctggttgtgtggcgaaggatgaaccttgaaaataggttgctatacactccttgtttgtgaagtcagaactatagccagagattgtctgttcatctggagctgtgcctggtatattaggggtagacatcattgaatcgttgtagtaaagcactacgttgttctttcggtcccaatagaatagtccatcgaaagagcctactatccatgatttgttacttgcatgttgccaaacattttgacccataacactcactgggggtgctgtcgttactggtgttggctttgccgagagattcttaagagagtagaaaccttccgaagtcgagatgagccagtcgtgggcttgctcatcataccgaatcattcttagtttatcattccaaggattatcattatctaaggttgtaccaggcaatggtttcgtattgtttgtggcgaggagaatcatcagtggaggacgtaatgcccatcccgttattgcgataaatagcgttaaggcgaatgtgtaatgcccaatctttgtatgccaaacgagcattgatactgttttgcgacgaacccaataccatatacccgtcacacaaaggataattaagacgattccaattccgtctacaatgagctttcctacggttccaaacagtgcaccactatgcaataaccacatttgacggaacagtgataccttcccctcattcccctcaccagcttgtagtgtgagacaagtaaacttcttataaggggctgtagcatagtagaggtgagaacgagaaagaacgatgagcgtgtcaccatgggtggtgatatctgtcaatagttcgtcatcctcttgcttgggtaagtctactttttgccatgatgtattcttacccagtttatataattccatgacgctaaccgcaaagagatcattttgtggtgtctttgccatccctcgcatctgtcgatagtcagcaccagcaggtagaccttggttgtattctgtgaagtgagaagcagttgtatcagtttgaatgatacctgctgcaccatatatgaataccttgtctacgtttttattatctttgtagcgtagtgttccacgtagtagtccattgttccattggttgaattcatattgtccaggcaatacgccacggcttacattaatgttagcaaagagttgacgatgattgagaacaataccagaaaggcagaacattactaagaagaatgttatgatgataccaatccatttatggtttttacgccatgttttacgtttcatattctattgtttgtgttatgttgttttttactcagttctaaattagagtacaaacttacacaaaaaagctgtatttcggaactttttttgctgttttttgcttcttccgtaaaatgaaataataaagtaaagttctgttatataataagtcacacagagatgtagggcggctggagattattgcaatatcatggaggtgagaatagtacaaagatcgacagagacgaaacatacggctttctgataactttaggggtaaatgctttgtgcataaaacgcgcaaacaagcttcgttgctccacacatcgttgttgtcttcatggacttctccaagtcaacagcaccttagaattatgttatattctggtgattaaggattctattggacttcaaatgcagggataacagacaagaagggtgcaatggcgtttactttccaacgcaacgacgtttctccatttatagacgaccatcattcaagatacgatactgacatggacacaccaagtttcactctctctcttatcaatttctataagttcacaggtgctccataccttgtatattttagttaaacaggtaaattctgtttgagataagcgtacttcatttctctataaaacaacgaatgtgacacctcatgatgtcgctttttgttttgatatgccctcgacgatatcgcttaaccacagtgcttttacctaccaactgcaatgctgttggacgtcaataaaaatgttattaacagataagaagaatactttttgtttttcatttatacaacttttattatattttaaatagatttatttcaatatataggattatttatgttttcttattaaaaaatgtgtatctttgtcgcaataacctacaagaaatatttatttatgaaaagaatcttactatttttatcaatgcttcttttagtaggaggcacaacaatggcatccctcaatggagcttgtcccaattattcagcacatctttcgaataacgaaagcagtacaccaacccatcacatgcgtggcgcagagcaacgaaacggcaacaatgcaggctcgtctgccctcgatgtcgttgcgcttaaaaaagacaatgtcaatgctcaaactctcgaacaagaaggcaacaaagatcaaataacattcagaactaataaaagtgttggcgaagaaatctacttagaaatatcatatccagacggttcaaatatagaaagcattacagttgaaggtgccactttaacaaaaagtgaagatgtaccagatcaattaaaatcgaatagaacctataaactcacctcacaagaggttcgtgttataggaaaagtgattgactttatttgcgccaacaacaaaattacatcattagacctctcaaaatgtccaaatttaaggtatttagtatgttctaataacttacttgaaagtttgcatgtagataactgtactaatcttagcacgcttgagtgcaacgataataaaatcgactatttagatttatctaatgctaaaaatttgttagcattatactgtcgcaataatttaattgaaaatttgatttttggtaacgatactcatatcatgactcttgactgttacaagaataaaatcaaggaattagacttgtctcatgctacagaattgtattcattagactgctcagataataaaataacaacattaaaaacatcgttagagtgtatcactcaaatagtttgtcattctaatgagattaaagaacttaacatttcagcagcatatcacttgaatcgtctcgattgcggtatgaataaactaaacaaacttagtatagataactgtccacttctaagcgttttatctttttaccataacaacatatcagagctaagcgtccaatataatccaaagcttatttatgtagatgctgttaggtcaaccactaacatgtctctaattgagcaactggtagcctctttacctactgttggagatgcgtcaaacagacaaggaggctttagattagttccaacaatagagtttataagtaagtttatagaacagtatggtataaactttttaaatgctctaacgaaaaaattaaataataaaggttggaaggttacagatgcagcaggaattgaagtacctaattattcttattctggaacaccttacatctctttcactacaaataagagtgttggtgaaactattaatgtgcaactcaaggtgttgcctggtacaaatgttgaagatatacaacttgaaggcgcaacattagtgagttcaactttaaaaagagactctgaaagatttagtgaatattacttccaaacctataaacttacctcgaatacagtgaaaattttgggtcacatatcagacttactctgccccaataacgaactcacctcaatagatatctcaaatcctgaacttttatttttagaatttccagataaccatatcaccacagttgacaccaagaaagcaaagacattaatacgacttgattgcagtagaaacaactttacaactttagacgtgtctacaaacaaggcactaagagtattaatatgtacagaaaacaacatttctactctcaatttaccccaggatggtaaactaaattacttgttctgcgctaacaataaattgaatgagctaaatatttccaatacggtgggtgttctcagagcagtatattgtaacgacaaccaaataaccaaattaactctaacagaccatggtgcccttgggagaattgattgttatagaaacaatataacagaaataaatattgcaaacaatccaaatctaatgaatttagatatccacaaaaataagattactcttgagcaaatggagcaattagctaacgatttgccagtagagagcgatccttcgaactacgaaagaatattaactctcaaagacatagtgggtgaagagaacaaatactcaaccgaaataattaataaaatattaagcaaaggctggaaagtagaggacacaaacaatgtttctttaggcatctctgctgtcgagaacgacgaaaaccaaccccgaaaggtatttgaccttaacggacgtgaggtgaacgaaaaccaagtgaagggcgttgttatcattaaacaaggaaacaaaacttacaaaaaggtggtgaaataagccacacaaccctatttataaaggagtgagttctctatcgttgagaattcactcctttctttttgccctgctaacaaggtgactataaaactcgcaaacagccttcgatgctccatacattgtcgttgtcttcatggacttctattgctttgtctttattctctttttctctgtatgaagtttcttaaagcattcaacgcaaagggtaaaccttatcactttaaacttttgaaaacgtctgttttgtccgaatttttcacatactgattttgtaaagaccaccaaacggcttacaaataacgcccaattggcttgcaaaagatgctcttttgaggtctaactaacgcccttttgaagccttattaagcatcttttgaattccctctctgcaactacttgataacaaagagtttacaaaggtgctaaaagagcttgcttttaacctttttccctacctttttcttgaacattttgtcaatatatttctttgtcttttagctttaaagatgcatagcccatagaggtgttttcgtgtgttattttttagttctgcactctctatatctctgtgtgacttattatgtaacagagctttactttaccatttcatattttgaagaggctaaaaagaaaccccaattaacagagctttacgtaatctatagctactgttaattggggtaaatattatctgtttgggtttgttatgtcttactttcttgtaacacgaacatatctcataaccttcttaacgactactcttctcaagtcgctgtcattgaatttggtctgggtcaactcaaactcattgttgtttatgaatctaatttggagattcttgtgcatcttaccatctatcttcataaagaaaccatcacgacggaaaccataaacaccaatatcgtcatcacgcttccatctgccgttgtcttctctttctataacgctcatggttccatcatggtagaaatcgaaacggtgcaactcatcatcgaggtcgttatcgtcgtgaccaacaagcgtacgaagattaacaggctcgcctgtagcgaagtcaacagggaggaacttgtagtcatcgtatctgtcaattgtgaatcctaccttgtattccttatgtgtttttgggttgcgtacaatggcatagctatccttattagtaagctcccatgtccctacaatcttagagttgtttgtaggtgcagcagctactacgttgttattatcctttacttcattatttgtagcgtatgaactggaaaatgtaaacagtccacttaatactaaacctgcgcataaagcacggttagaaaataagtttttcttcattgttatatattcatttttggattaatatgttgcaaatatacgtaaagaaattataatagcagggaagtatttatatcggtttaaatgattttatagaattcattaacagactgcctcttaattaacagatttgttcaaatagaaacaaaatctgttaattgagtgcaaaggggatgtgatagtttcctatttcgcaggtttattgcccattgtgaagtcgattataggacctgatatcagctgttcatgctcaagataataatgtggataaggctgcccattcattgtaatatgctgaatgaagcgattgtctttgttattcttttcagtccgaattgtgacagtcttgccattctccaactgtatcttgactttacggaagtagggagtaccaatcatatattgtgtactgccaggacaaacagggtagaaaccgagtgcagagaagacataccaagctgatgtctgaccattatcttcgtcgccacaatagccgtcgggctgagcggtatagagtcggtccatcacctcacgcacccaatattgcgctttccaaggctgtccgctgtagttatagaggtaaatcatgtgttggataggttggttaccatgtgcgtaattccccatgttcatgatttgcatctcacgtatttcgtgaattgtaaagccataatagctattatcaaagataggaggaagttggaatacactgtctaacattgcattaaacttatcgtatcctcccatcaactttgccagcccagcaggatcatggaatacactccacgtgtaatgccagctgtttccttccgtgaaggcatcaccccatttgaaaggattaaatggcgattggaaactaccatcctcattacgtccacgcatcagacccgtttccttatcgaaaactttctgatagttcatt

SEQ ID NO: 4160 - DNA, 24278 bp, synthetic construct
  source 1..24278: mol_type = other DNA
  misc_feature 1..24278: note = Synthetic
ttgggcatactcacttcgtgctcaatactatcatttaggatggctttctgcacaaaactacatacttggtagaggcggtaaaggcaatgtaaactccttaaacatgtataaactcatcgcagattcagatactcctgtctccttgttaagtttgttggcagataaattaagacccttatcagatggtaatctcagtaagaatgtcgtgaaagggattgcagaaaggactgttgatcatatagaaggagggatttatactgactattttcatttctttaaagcaaatactttttattcaaaataaccttatgagcaatacattaccacttgaagagtgttctatcaatcagatttatttagatagttcagacgtaaaaacctacatgattcccatctatcagcgtaattatgcatgggaagaagatgagataagagcgctgattaaggacatccatgattcttttaggaaagatccaaaggcaccttattatataggaaccttggtgacttataagcggggagatacagaatatgaggtgattgatggtcagcaacgtctgactaccatctatatcatcttgaaagtattgggcgttaataacctgacaaacaaacttacctatagtgccaggcaagtatctgcatcaacaataacgaacttagacaactatcctaacttgggagagaatgttgatgatggtattaagaatggctataagtatgctgaaaacgcttataaagactatgttgaggattccgagcaggatgcttttagacagtatttcctcaataatgtacatttgatacgttatgaagtacctaaagatgtagacttgaatcattactttgaagtgatgaattctcgtggcgaacagttagaaaagcatgagattgttaagtctcttctcagtaactgtttgaaaaataagacggaaagagcaacgtttagtcgtgtatgggaagcctgcagtgagatggatatgtacatacaacagtgcttctctgataagtcggtgtttggtaattctatggattctttcaagatagaggactttgaaggtatccccaaacaagagggttcagagggtaaaaagtcaatttcgaaatttttaaaaggcacaatagatgaggctgaagacgatacttatatagaaagaaatgataagtttcagccaataattgacttccctaacttcttgctgatagtcttaaaacttacgcgaatgggctatgatggctttgatccaactgatttcacacttgatgataaagagttacttaatgagtttacagaggctattaaagatgtagaaggcaagactgagtttgccaaattgttctcttttaacttgttaaaggctaaatacttccttgataattacgttgttcaccatactcttagtgctacagaaacggtaggagataacccttggaagctgcaatactattataaagagtcggcagataggcagtatcctaagaacttatcaactgatgataatgatgctcagaaggagcttgttcatctgctatccatgtttgaagtgtcatttactcctaagcaacgcaagaactatctcttctattgtatgttgttcctctttgagaattgcgaagtaaaagactatttagcgttcctccaacgtcttgcagataaatatttcgttgatgtctatatgaatcctgataaccttactgataggaatcaacctaagccaaatgcgtttgattatgctgtgttgagagatggtgaattgaatgtatatgactttgatggaacaggttatagagaacggtttgagaagatttatcaacaaggtagggctgatatacctttgtttgtgttcaactttactgattatttgatatggaggaaatatgcagatgagattcgtggagaaaagacaaggaaagattctttgagtcgtaaggagttctttaatgcattgggatgtagtgatttcgaactcaatcctttcaataatttctatttttcacgtactcgtaagtctttagagcacttctatccgcaagcgaaagttggagatgataagcctcttacggccgatgatatcaactgctttggcaactttgccatgataggagctgatgtaaacagctctggttcgtgctgggatccaagggcaaagctcgatcattatagtgacagtagggctaatcagatcagtgttgcatcgttgaagtttaagataatgatgcagatgtgcaaagataattgcaacaaaatacttagcaaaaagttagaaagacctgatgggatggagtggaataaagaagatatgcagacccatcaagagagaatgcttgatataatctttgctggaatagaataaagcacctcgttatttaccaatacagaagtgctggaagatgttgccgagaacctcatgggtggtgatttgaccacccgtgatgtcggcaagttggtcgagacagatacggagatcctcactgataaggtcgccactgagttgcatgttcatgccatcaatgacacgaaggatggactcatcggcacgggtgagggcttcataatggcgggcagaagtgatgatcacactgttttcgttgatctctgggatgtcagctgcctcataaatagccgtctccaaagcatcaatgttctgcttcagtttggctgatatatatatataaggtgtaacctcgcctgatggttgaggcttttctgtcttgttatcaatcttattgaatatcgcaatcagcttctttcctttcgtgagatgttgcatctctgccagctcttctgccgttggttgctggtcaacgacccacagaacgatggctgcttcatccattttctgataagcacgttcgatacctaactgttcaacctggtcggttgtgcgtcgtattccggctgtgtcaatgaagcggaaggtgataccatggatctcggttgtgtcttcaatgacgtcacgagtggtaccgtggatatcggagacgatggctttctcttcatgaagcaggcagttgagcagggttgatttccccacatttgtcttgccaacgatagctactggtactcctttcttcaatgcattgcccgtttcgaacgactttctgagctctgcgatacgctcatgaatggtctcggcaagcgctttcagttccgaacggtcggcaaactccagctcctcatggtctgaaaagtcgagctcaagttcgagtaatgaggttattttcagcagttgttcgcgcaataaggacaactctgagctgaaatgtcctttgagttgactcatcgctacttggtgtgatgcacggttagaagcgctgatgaggtcggcaacagcctctgcctgactgaggtccatcttcccattcagataggcacgttgcgtatattcgcctgggagagcctgtcggcaaccagcgtcgatgagtgctttcacaacctgattgaggatatatgccgagccatgacatgctatctccgtactgttttcgcccgtataactatgtggagagaggaacacactcaccaggacatcgtctattgtattgcccgttttgtcatgtatctccccgtaatgcagcgtgttgcccttggcactggtcagttttttcccacttctactatggaagatcctgtccgtaatctctattgcctgctgaccacttacccgcacaatgcctattgctccacccggttgtgtagcaagtgcacagatggtttcgcccacagtctggcgtgttgttgaaatgatttgttgtgcctgttgtggggtaagtgtctctttttccattctttttctttatgatgattgatgtgacggagcgtttatattctgtcaagcaccgtcttaacgagtccgtcaatcgtgttcttatatcctgcatttgccttctttgccagtcggtttgcgatgaccatgcagcatgttacagccctatgtcccatgagcgtagccaatccggcgagtgcagaagactccatttcgaagttcgttatctgtagcccattgtaggagaacttctctattttctcgttcagatgtgggtcttgcaatggcaaccgaagctcccttccctgtggaccgaagaatcctccgcaggctatggtgacacctctcaccatgtcgtcctgtgcaatctgctcggtaagttgctcatcagcgcatgccacgtatgggtttccgagttgtgcatcccacttcacttgccgcttgaattccgcttcaaagtcaaggtcggaagccttgtcacgtccggcatagaagttcaacagtccgtcgaaaccaatgctttttaccgatgcaatgtatgttcctgtcggcgtataaggctgcaatccgccacaagtaccgatgcgcacgagggtgagctgccgcagttggtccttctcagtgcgtgtttcgaagtcgatatttgccaacgcatccaactcattgagtacgatatcgatgttatcacaaccaatgcccgtgctcacaaccgtgacgcgtttgcggtgataggttcctgtaattgttcggaactcacggctttccacttcacattctatgtcctcaaagtgggaagctacgagtgctacgcgccccggatcgcccacgagaatcaccttgtctgcaaggttttctggtttcagatgcagatgaaagatacttccgtcctcattgataatcagttctgacggtgcaaaatacttcttctccataggtcttgagatatttgggtaaatgtgttcttgtataatgtttaggagacaaagataagaagaaatatgcagatgaccaaatgaagaagaaagaatgattgtaagataaattcactattgattttcaaacggtgctcttttgccttctaaaaggtgccctttcacattgcaaaagggcatcttttgatgttcaaaagggcatcttttacaacgcaaaagggcgtcttttgcaagcctgtttgtaacctcttgatatactatgggttacaaaggcagttttacatggttattgtttgcttttcggtctgcgcctcttatgtttctgtaaagttatttcgttacgcctgattgtctgtgatcaggttccttcacagggctcttcccctctatgcttcttctgcttctgtatcacggaaagcctgaagcggaaagggcagtgggcgagagtcggttggcagttagcgcttggttatttgtctaaatatgtaataacatattttcttataccataatacacatcgttctccatcaactcaatagggcgtcctttatcatcaaatttataagaatcggtattcgttttccccaatttattatcataaaagacgtgccttttggcgacaagatgagcagaacggatgcccgtttgcgttgtccatataccttcattgcggttgaaaatggaaggatacacgcggaagatgtttaagtctgggaaggttctgttgggcacattggtatattcgaaacgaacgaatgtatttccatatgttatcttcccttttcctccaacggtggctttgacgaggtcattgttattccactcaaaggtattctttaagtttatttcatgaatataggatgaagtcaggtgtccgtcagcatcatatataagactatcctttgtgtgaggcgccgttacaggctcatctgtcagagggtctttataaggagcttcgttgataaacttcgttgctctgccttgtttatctaagtacatagcacctctatggtcctcaagaacgatcctaccggtgatgtatccctttgttgtatacgagtagatggagtccgtataggtcacgttagccactcgaggagggccatatgtgttgtggaacaggtcgtcacaaaaagttagaaggcgcttctgattgtcataagtgaagacatattccccttgcttatagcccgctggatagacgtaaacctcaatctttgagatgtaatcgtagccttttttcgcaagagtatcagaagaagtatccacctgatcatcgcttgaacaggagaaaaacgcgaaagaaatcgctaagagtagaaagaaatgtttcattaaaacctaattttttatctattgaggtgcaaaggtaaaaaagatgaaagaaaatacatgatggtgaaagttatagtctgtaattaaaaacaaacacatcgaaagttatatatataaatcctaaaatcaaggtgaaaaacaggagtagatgcctaaaaagtgtaaactgtgaagggaaaaggacttgctgaaagcgctaatcatacacctattagcaacttacgaagcatgggaaaagtagaactgaaaggtgtttttgaggaagaaaagcatggtgaaaggtgtgagagaaggggagaaatcgcatgaagaagatagccttttagcactgattcagccctgtatcggtggatattctgtacgtaagaaacacaaaaacggcgcagtgcagagtcgcactacgccgttttttctgttctaaaagagacgctttactttcgccaaaagcgtgatgttatgtcttcaaacgtaccgtctgcgcatcgccgaagcatccgttgattggtccgaggagagttaagtgcaccgagatgcttgaggtatggacctatttttatgtagtcgaaacgctcctgatggatatgaggtgatacggcagtacgccctgtgtaccatccaatcttcagtctgggatgctgcttgcggatatgttctgctaactcatcaaccctctccggggctatatcacctcccataaaacccacgcaagtgatgggatttcctgcttcagagatgagcttgtcgagtgtctcagtggtcagatcgttgccttcatccttccaaagaaaactgctatggcagcccggacagcgacaaggacagccggaaatgttgatggcaagcgtcacttcgtcagggaattcctgaaagactatgtctgtgttgatatagtgtagcatcttaattgatggcgggtgacgttgttcgggagccttgtttcttcctctcttgtcacccgcttgctaatcattatgcctcctgtttgcactctttcgtctgtttcccagcttcggaaggagcagtagtctttatcgtatacttgttctgtccggcatagaaacggcggtgtgcctcatcctgacgtggtgctgagaagttgctaacacgcttcatgtagccaatgacacgtgtgagataatccacgtttgtagagtgacaatgaggacattcgtgcagataacgcttatcgatatgtccacaatcgttacatacagtgttaggaatattgaacgtaaagtagttacatccctcttgtgctgccgtacgtaagagctgtcgatactgtgcttctgacaggtgttcctcaaggttcatgtgcagtgcagagcctccagtgaggtgctcgatatagggtgcaccatgcaatttgaacttgtcgagaatggtcagagagttgtcttctacacgatagaagtagctgttgtaacagtcacgtggtacgaaatagccgtcctcacggtcccattttgcgtgcttcacaccgacgttttcggcaggaatcatctcacaattaaacattgcttccttagttcggaaggccttgttgtgcttctctatcagtccgagaacaccctgaacgaacttcttgtaatcctcgtttggtgtgatatcgagtcccatgaactctgcagactcaaccagtccgttgattccaatggtgagatattgacggtcaatgttgatgtatcctgcatcaaagagtggcaacatgtgattgcgcagcagttctttgaggttctcattgtatgccatctgcaccttatgacacagtacgataacgtgctcaagatattccttatagtctaagtcatggttaacagcgtactggatacagcggttgaggttgatagtcagcacactctttgaaccagttgacacacctccggcacctaaagtataggagaatccgttgtcttgtatctcattacggagtcggcaacatgaactcagagagtcggcattgtcgctcatgtaagtgaagaaactgtgtccttcagcatacatcttagctgcataatcgccccattccttgtccttgcactctccgttctcagccaacagcgccatcgtttcgactgggaaagtgagcacagtcttgagtctttcctggttaaaccacttcataaaacgcttctgaagccatgagagactctcccagtctggctgtgatccatcagggaaatagaagtttccgaagagtgattcgaagtaaggacggtcgtaataagagatgttccagaacacagcctggtagttacgagcacctgttggttggttaagtgaatagacaatctgctcgaaatcgtccgtgataaccttatctattgtacgctttctgaggctgaggtcgaccacttcatcagctcgtttccagtagtctttaccgtattctttctgtatgaagtagttcatgtacatcaggaactctggtgttgcacaggctccggcaagcatggatgataccatgaagaccatgttgataaacccaccacagaagctcttgaggttggttggggctgtagagttaccgccaatggatgttgttccaccaatgagccatgggtacatggtgatggaagcacagtagttggcaaggtttgtctcgtcattcttatatataaaatggtgggtgaggaggttgatatattcgtcagccagctccttaccatacatctttttgatacgatctaccagcattcgacgattcaaacggatgaaaccttgcttgggaagttcgccgataagcgtcgcgatattcttgttttcaacgttcgcattggcgtcaaacttagaaccagttgcagcattctgcgctacacaatagtctgtgaggaattttattttctcaactgtttcgcggtcttctgtgtgctgttggcgatatacaatgaagctctttgccaccttatagaagccctctttcatcaaagcttcctcaacttgattctgtatatcctcaactttgatgtcgttatgtatgttaaggtcagataagatcttcgataccataccgaggtcggtaggctcattgacactctcgaatgcttttaagatagcattcataatcttgtcgagggagaacttttccttcgaaccgtcacgcttagtgattgtaaagtttttgatttccattgctatattttctatgtctttattgttgttttaaattaaatagctcatagctcatagtcttgatggtcttctgatgccctgatttcaatgctcaaaccacaaggttagtcacgttttagcttgtgtgaagttatccgttttgggaaacttttttctgtttttaatcttcaaagttgtccgttttggaaaactttagtggtgcaaagatagataaaaggattcacttccccaaagataatctggttaaaaaagaactaaattttctgctgtttttcatcgtatattcttataatctcctatcccattgtcatttataaatgtctggttttagtgccactttatttcctggtttcatccccatttcttttaaaattatcgccgtttttttcgttttggtacgtttctttttattagttgagattctgttcatgtttctaatatttataaaataacattctattaatctatgtttcctttaatacctgtttattataaaaggggattataatcaacttggcaaattgctcatatcattttgttgtaatattgttcaaatcatgataatttcaaatgatatgttttgctaaatagaaaattttctataagtttgtaagcgataattatatattgatgactaaaacctttggatatgacttatacaaacaggagtattacattatttaataaggctataataaacaaaaagctcctacgttgggacgcgggagcaagaaaaatcttcggcttatagccttgttgtgaaaagtcttcactgtgtatctggttgcaaatatactattatttttcgaataatcaaataaaactatagaaatatgacacaaaaaatctttggcttagatcttggaactaattccattggatcatcagttagaaacccagatttgggaagtaatctcacagaacaattggagttcttctcatctgatgtgtttgataatggtgttagtaaaggggaaagtggacgagaatattctttagcaggagtgcgatcagcacatcgtagaagtcgtaggttaaatgaagtcagaaggcgtaaactatgggctacacttgctttattgatagagaaagatctctgtcctatgtcaccagagtccctagaggcctggaaaacatacgataaaaaaagaggattgtaccggaggtatccaataggtgatgaggcttttaactcatggatcctccttgattttaatggagatggtaagcctgattattcaagtccttatcaattgcgtagagaacttgtcactcaacagtttgattttacccaaaagacagagagatacaaattgggcagagctttgtatcatattgctcaacatcgtggctttaagagtagtaaaggtgaaaccatagcagcacaggaggaaaatgacaaaatacaaataactgcagaatcacttgatattgcaagcgagatgaaggcttcggaggaaaagatatcaggcggactgcaaacttatatagaagaaaatggtttgcggacagttggggaagcctttgcaaaactggaagatgaaggaattcgtattagaaataacagcgattattgtgctgttcgatcacaatttaaagaagaaataaagcagatttttaaatttcagaaaggcttatctttagaaagcgaattgtacgaacgcttagtgagtgagaagaaagggataggaacgattttctataaaaggtcattacgctcacagcgttgtaatgtgggaaaatgtacacttgagcgtaataaaccacgttgtccagtaggtcaccctgagtttgagaagttccgtgcttggagctttataaataatattaagataagatcttctgtggaagatatcttcgtgtatttgccaataacattgcgaaaggaactttattacgagcgtttcctttcatatgtgaagacagattttaaatttgaagaaattaggaagtatcttgaaaaacgattaggtctgcatttttcttatgaagataaaacgataaattacagtgatgatacaagtgtagcgggctgccccataaccgtccgtttaaagaaagtcttaggagacgattgggagaacttctataagaaagggaataaaaagaagcaagggcagggaagaataaatcatgaggaacatcaggtaagctatacttggagtgatatttggcatatctgttataatgcggatgagttagacagcattgaagcttttgccagaaatgtccttcagtttgatgagaataaaatcaaagatttgaaacgactatgggcggcaataccacagggttatgctatgcttagcttgaaggctatacgaaatatcaatcgtttattgttacttgggttgaagtattcggatgcagtgttacttgctaaactcccagagatagttccaatgtctgatgatgaaattttgtttatatcaactgagttcttaaaattagaaaaacagttaaatgaagaaaagcgtataaaggccataatcaatagtcttattgctaagtataaatctgaattagaagagaatcgctttgcagatcataattatgaatatcaattggatgatgaggatgagaagattatagtaaagcagattgaggaaagtatcggcaaaaaatgttgggctttaatgggtgttgaagagcaaatggagattttacagggtgtgagggctggatatcaaaagttttttagaagccatgaacggaaatttgtagaacttcctaagcttggagaacggttagttaacttccttgttaatagatacccaaatgtagggtttgagaagtggaagcagctatatcatccttcgcagatagcaatataccgtcctgttcaagccaaaggagatcattccctattacgtttggggaatcctaatattggtgcaataaagaaccctgttgtaatgaaagttttgaacatcttacgtaaaagggtcaatcaacttttagatgatggacttatttcacccgatgagactcgagtcgttgttgagacagcccgtgaattgaatgatgctaacacgaaatgggcaatagataactatgatagaaatagatccgatgaaagaaaaaggatagagaagattctccaggagttttatccaaatcgtaaaactataagtgaacaggatatcgataatgccttgtatgtattggagcagagagagggtgactgctatacaaaggataagggattctattataagaaggatataacaagatacaaattatggctagaacaaggcggattgtgtatgtatacggggaagacaatcaatctttctaatctttttaaccccaacacctttgatatagagcatacaatcccagagagtattagttttgatagttcagatcaaaacctaacactttgtgatgcttattataatcgttttataaaacaaaatcgtatccctactgatatgcctaattacaataaggatatgattatcgagggaaaagaatactcagctataaagcctcgacttcagatatgggaagaacgtattaaacgacttagaagaaaggttgagtattggaaggcacaagcatgccgagctcaagataaagacagaaaagataagtgtatccaacaaaagcatctttgggagatggagttgtcttattggagtgctaagttgaagaggtttaccgtaactgaagttactgatggctttaagaatagtcagttagttgatacacgtattataactaggcatgctacgttgtatttgaagagtatttttagtcacgtagaagtacaaagaggaagtacggcggcaaagttccgtaagattcttggtattcaagcatcaaacgaaaagaaagaccgtagtctacactctcatcacgctatagatgcgacaatgttaacagttataccagtgtcggcaaaaagagatagaatgttagagctattttataaaatagaagaggcagaaaaggcatttagatattatgggaatgaaggtagaaatggcttaaagcaatatcttgagggcttacatcttaaacttacaaaagagatcaaaggttgttacattggtagaaatgtctgtaatttagaagattttataaatgataatatcattgttaatcatcattataagaatcaggcaatgactcctgcacatcgtaaattgagaaagagggggaaaatagtaggaagtatggctcatccccagtggcagactggggactcactgagaggaaagatacatgaagatagttattatggtgctattactcagtttgcaaaagacatagaaggtaatgttttggtgaaggatggacaagtgcagatagatcctactgttatttatgtcataagacgaaccttgaagtataaacaatcagctcaagattctgggtttgcttcgtgggaggaccttgaaaatgtaattattgataagaatctatttgctttgatgaaggcacagtttcctgaaggaacttcttttaaggaagcttgtgaagaaggtatatatatgataaagaaagggaagtctgggagtgaagatgttaaaatgcataggattaagcatgtaaggtgtaaggctcccaaagctggattgaagttaaaagaacaaacttataaatcttctaaagagtacaagcaatatttctatgcgggcgtcggtgacttgtatgcaatgtgttcttatacaaatggaacaatacatatatttaaggtatacagtttatatgatatttcatgcaacagaaaagctggtatagaagatgtcccacagtttattattgataataaaggtaatcgtttatctttggagtataaattacaaaaaggagatatggttcttctatacaaggatagtcctgaagaacttagggatttagaccaaattaatctaaagcaacgattatataaagttaatcgttttgaatcaaaaggtaaccttatcttattaacaaaccatttgtctgcaacaaaagaaagaggaagctctcttggtaagatcacatcctaccagagtcttcctgctgcaatccgttgtgggataagtaccattaaattcctaattatgggtgaccatcatgattttgttattagaaaagggaatattgaatttaatcgctaatgataaagaagacactatactttggtaatcctacttatctatctcttcgaaatagacagttggtcattcgtcttccagaagtggagaaggcggatctccccgaacgagtaaagcaagactccgttcggacaatccctattgaggatattggagtggttgtgcttgataataagcagattactataacacaggggaccttaggtgcattattagataatactgttgttgttataacatgtgatgaaaaacgtatgcccgtaggcatgttgttacctctttctggtaatacgttacatcaagagcgcttccgtaatcaaatagaatcttctgttccgttacgtaagcagttatggcaacagacggtgaaagctaaaatagaaaatcaagcgttttgtttacaaaagcatacgactaagtcatttgctccgctccatgttcttgctcgtaacgttaagagtgatgatgcagacaacaatgaggctcaggcagcagcatattattggaaatatatctttccagaaattcctgggtttacaagagataaagaaggtataccccccaataacctcttaaattatggttatgccattttacgtgctgtaattgctcgtgctttagtctccagcggtttactccctgtatatggtatacaccatcataatcggtacaacgcctactgtctcgcagacgacatcatggaaccgtatcgcccattcgtagatgatttagttattaatacaaagaataagatggaagttcctgaaattcttacagtagaactaaaacgagaaatgttgatgattcctgttcttgacgttgttattgcgggaaaacgtagccctttgatgattgcagcagggatgactgctgcaagcttagctaaatgttataatggagaaagtcgtactattatctatccatctttcccctaatgcaacgactaagtgaatatagagttatgtgggtaatggtcttttttgatcttccaactagtactatcaaagagaaacaggcttatactgttttccgtaaagaccttatgcgggatggttttactatgttccaattttcaatctatgttcgtcattgcgccagtagagagaatgctgatgttcatgttaagcgtgtgaaatcttttatgcctcgctcaggaaatgtttgtgttatggtaattacagacaaacagtttggagagatagagatctttagtggtactaagcctttacatcctaatgctccaggacaacagcttgagttattctgaaaaagagagccctatcgtgttcggtagggctctcttattgcagtttttattccttgaaatactatataatgatctgattaacagatggatatataattcaagttgtttgtattactgcaaagatacactttttgaagcaattcacaactcaggacgcaggattatctgttgccgccctgttgtttgtattactgcaaagatacactttttgaagcaattcacaacggcaacgttccactcttttaactctgatttgttgtttgtattactgcaaagatacactttttgaagcaattcacaacgtatggaaaaagagtacaaccttatcgagtgttgtttgtattactgcaaagatacactttttgaagcaattcacaactatctgttgcccgatgtcttcctttaaacagttgtttgtattactgcaaagatacactttttgaagcaattcacaacaggtagttaaagataaattaactgaagctgttgtttgtattactgcaaagatacactttttgaagcaattcacaacaattggcatactattatcctctcgttattagttgtttgtattactgcaaagatacactttttgaagcaattcacaaccctcctccaccgccgtcaccagtactcgcagttgtttgtattactgcaaagatacactttttgaagcaattcacaacggtttgacgcttacttccctacacgtgagggttgtttgtattactgcaaagatacactttttgaagcaattcacaaccattgtttggactttatattgctcctcatagttgtttgtattactgcaaagatacactttttgaagcaattcacaacggtgtccgaaacgtcaacgttcccctttctgttgtttgtattactgcaaagatacactttttgaagcaattcacaaccattaagtgtattaatgacttcacattcggttgtttgtattactgcaaagatacactttttgaagcaattcacaacacctaccctaccgacttcgtaagcgctaatgttgtttgtattactgcaaagatacactttttgaagcaattcacaaccgctgatgatagcttcacatacaaagcttcgttgtttgtattactgcaaagatacactttttgaagcaattcacaacctctcttcatcaacaaggaattgtactttggttgtttgtattactgcaaagatacactttttgaagcaattcacaacctctggtgactatgcaaagattggtagctcgttgtttgtattactgcaaagatacactttttgaagcaattcacaacaatactgtatgataggtgcttacgtgtcgagttgtttgtattactgcaaagatacactttttgaagcaattcacaacagacgtaatcttacttctgatatatatacgttgtttgtattactgcaaagatacactttttgaagcaattcacaacagtgttgtatgataggtgcttacgtgttggttgtttgtattactgcaaagatacactttttgaagcaattcacaaccgccgctcgacgctcgtcgtcgacccctagttgtttgtattactgcaaagatacactttttgaagcaattcacaacattgtacttaatagtatcaacatagcgcagttgtttgtattactgcaaagatacactttttgaagcaattcacaactgtgtgagtggttctgtctcttctgtattcgttgtttgtattactgcaaagatacactttttgaagcaattcacaacttaatgtttcttctgataagtttagcgcttgttgtttgtattactgcaaagatacactttttgaagcaattcacaaccggagacactgataaaaaaattgctcctgagttgtttgtattactgcaaagatacactttttgaagcaattcacaacacctatccaactgatttcgtaagtgctaatgttgtttgtattactgcaaagatacactttttgaagcaattcacaacttgtcaacaacaagggtggagtagggaagagttgtttgtattactgcaaagatacactttttgaagcaattcacaactaaggtagctaaacgcttatgggggccttgttgtttgtattactgcaaagatacactttttgaagcaattcacaactttgccgattgagccaatgattagtctgcagttgtttgtattactgcaaagatacactttttgaagcaattcacaactcatacttgccattaaatattaattggtacgttgtttgtattactgcaaagatacactttttgaagcaattcacaacccatattcttcggcaactgcattcggaaacgttgtttgtattactgcaaagatacactttttgaagcaattcacaacgtgaggacttgatgattagagtagagacaggttgtttgtattactgcaaagatacactttttgaagcaattcacaacaggaagaagaagataaagaaaaaactaatagttgtttgtattactgcaaagatacactttttgaagcaattcacaactcggagaaggttgtataagtaaaggtagagttgtttgtattactgcaaagatacactttttgaagcaattcacaacaagatttagtaaccaacatacggcttgacggttgtttgtattactgcaaagatacactttttgaagcaattcacaaccggtgaggatgagtatatttatcacgcaatgttgtttgtattactgcaaagatacactttttgaagcaattcacaacaatcaaggtacatagtaatctaagtgaggagttgtttgtattactgcaaagatacactttttgaagcaattcacaacctctctcgaccctttgaataataacaaagtgttgtttgtattactgcaaagatacactttttgaagcaattcacaactatttcctccgtattccctgaatatcaggagttgtttgtattactgcaaagatacactttttgaagcaattcacaacagcttggaagcaactgcttcgctatccacagttgtttgtattactgcaaagatacactttttgaagcaattcacaactcttacttcggattatgcggattattcttgttgtttgtattactgcaaagatacactttttgaagcaattcacaacgcggtaggcgaagtggtctatacactcacggttgtttgtattactgcaaagatacactttttaagcgaatcacaacggtctttttaatattagttaactctaaaaagaagtttagattttggagtttaatattaattatatacctttgcatcagatcatgataatatggtttagggacagggtcgaaagatcgtgtaccaccaaggggcgctctaagcgtcccacttttttatgtttttcttatccccttttcttttttacgtagtggtagatttgttctactatatataattattgttattgctaccacaagagtacgtgattttacaggctcaatctcctaaagcattattgcagataagaaaaataaatgagatcaagtaatgtatcttatctttggaggtaatgatatagaatttcttaataaataaaaaaggaactccgttatagaagttccttttatatagtgattttatttcatcaatgcttttaactcgtctactgcagaaggtatgtattctacacttgatgatgtttctaaatcttctgctatgagtctttctaattcctgttttgttaccttctttctaataaaccatcgttgaattatattgtaatgatcatcatgcatccataattcccatccttgattagttatccagtttatagcgttagaaggaaggtcaaaacagactatttgtccatttgaatctttacatagttccattttagctgtcgtattattacttatggaaggtacaaatacatctttatttttagctgtatctttcatccttacaacattaaagttactgtaataatagaccatctctgaagaacttctatttactgcagtcctattttgtgcttttaaacaacttgccatagctataaacaacatggctaaaaaaacctttttcataattattatcgtttagttattttatttgtttcaggacatttagtttaaaagggaatccttttaatctatatattctatctacgaaaatgttgttgtggttgtattacttcatcatttcccatagaaagtttatagttttcgatttctttctggaggttccttgcatgttcctcaaacataaactccaggaaagggacctcatcttcttcctcttgtgaagcttttaatgtttttatataatcattcctattttcttttagcactttactttggagcagtccaaattcatgttgaagatgattcatgattaatctcgccattcttccatttccatctacccatggatgtatcgtaacgagtttcagatgagcaatgaaactcaacttatactgttcgtatatatcaggactttctaacagttcttttcttctttcattgacttctctacagaattcttccatcttatgtggaaccttctggaaattcatatatgtttttcctccagccccagcagtcacattcacaagacgtaaatctccttttgaagaatcaaatgaaccattcaacccatgaatctccccacctgttcttctcataacaagcgcagccaactgtttaagtattccaatagagaatggtgtatgtccttctgccagttccatactcctctcgtaagctgcttttaagtcaaggttcatattgtgttctatgatgttttttcctttagcagtaagaccttcatcgaagagcagttgattgtctacttctgtcattgttgattcttcaatggcagttgaatgcgttatgatggaatatagataatacttattatagtctatttgtttctgaaagtccaatcggttatgttcttccagtatattcaggaagtctttctgattaatattcataagcatattccttttgtaacaggaaatagaccttacaagtattttgtatattactgttctattgggatgtaagaatcagtaatatcagaggtcttttccatgatcgtggaaccaagaaggagcatcgtggtaatccggtttcttacgttttttaccttttttcttctttccacctgtgaggattgtgtcaacggttttgtagccgatgtaggctgcgaataatgtttctaacatagttttgtctttttgtttagttatattttatgatacaaaggtattcatttatccatcaaataacaaattttaaaggataaataattatagaaaataagattgcaaaggtatcttgttgggtgataatagcgattgattcatgacttaaggagatattctaatcaatgtttggtgaaaataaaagatattggccgctttggcatcagacaatatacattaatagtttaggataggattggaaagctatgtatttgcaaagaagtactccttagccatcttatttctttaaataataagcttcgctttacaccttagggtacagataaaatctttgttgggtaatgcttaaccccctaatatagttttgttttaatttgctgtcacttttaacacttcgtgtaataagcttatttttaggagtttgtatgcccaaaagctgtgacggaagtgacagcaaatttgttttttgtcccttatattcattttattttttcatttttggcatgctattttccgcatgtaattaacatttttatggtaaaaaaaatgtgttgatagttgtttgctaaaagataaaatactatatttgcggcataaatttctatttaccgagtttgaaaattactatttgagcggtttaatactgcctatctattactaatatctaaatgatgttgatgatgagtccattagactatgtaaaaacttttaatgagtttctgtggaacagttttctcatgtatgcgcttttaggagttggtattttctataccgtctaccttggtttcccacaaattcgccatttgaatttggcgttcaagtatgcttttggtcccgtttttaagaagagaaagccaggtgaaaagaaggtaaactctttccaggcattggctactgccgtagcagctcaggtcggtacgggtaatattggtggtgttgctactgccgttgccactggtggtttgggtgctattttctggatgtgggtatcagctttgttgggtatgagtactatcttctccgaggctgtgcttgcccagaagtacaagaaagagtttcatggtgagacggttggcggttcagcttactatctttactatggtcttggcagtaagtggctggcagttttcttctctgttgccattgtcatagcccttggtttcgtgggtaatatggtgcaagccaactctatttctattgctttgacgaatgctttccacatcccatcttatataataggtattattcttgcagctgttgtggcagtggttgtcattggtggacagcgtcgaatcactgctattgcagagcttttagtacctttcatggctattgtttacattgtcggttcactgattatcatctatatgtttgctgatcagttgccttcagtcatccgtaccatcttccacgatgccttctctctccagtcagcagccggtggtgcagctggtacagtgatgaagtatgccatccgttatggtgttgcccgtggtttgttctctaatgaggcaggtatgggttccaccccacatgcgcatgctttggctgatgttaaggatccttcagaacagggtttcgttgccatggcaggtgtatttgttgacacagtactcatctgtacctcaacagctttcgtcatcatgcttaccggttcttatcataatacagcattgaagtcagttgctattacgcagcaaggcttcgagatagcttttggtgaaggtggaattgtcttccttgccatcagtcttatcttctttgctttcaccacgattatcggctggtatatgtttgctgagatgaacattaagttcatgtttggtaagaaaggaatccttgcttatcgtgcattggtagtaggattcgttttcttgggctgtcttttcgcagctgatttggtatgggagttagccgacaccttcaatggtttgatggttattcctaaccttataggtatcatcttccttgctccacaggtgaagaagatatacactaacttcttagcaaaccgtaaaaagaaaagttcttaaggtttttagccattatttttgttattccttgttcattgcaaagcttatagcgatgagtctgaacaatggacttatttaggggggaataatccatggtgagttgcgatagtattgcaactcaccgcttttttgttgttatttcttatgctttataagattattccatgctctctttattgtcatttactaatcattgcacactcatgtgcaatctactgtttaattcgcaacaaagtgaaggataatctttgggttatttgtttacaatcatcaaaaaaaagcgatgaccttcacaggcgatcgctttatcttttgataggcattagtcttctaaggtaaaaagattgttttcaggataacgatacaaagatatggtattttttcgttacacacaaactttatttcgtctttttttcgttgttttttttgtgtgcgaacacattgtaactctttgactatctgtcgtgtatgagataaaattttattgatattttgcgcctattttgctcacttttgcttctgctttcttgctctttcgttccttacgagggggtggatggagtaatggggtagggcttcctattatttattctttggtgttttgcttttcatgtttatagtctttgcaatgctagttcggtgtctttgcttttcatgtttataatctttgcaatccttgtccagtatctttgcctttcatatttatagtctttgcaatgccagttctgtgtctttgcttttcatgtttatagtctttggtatccttgtccagtctccttgcctttcatgtttataatctttgtcctcccagttctgtgtctttgcttttcatgtttatagtctttgcaatgccagctcagtgtctttgcttttcatgtttatagtctttgcaatgccagttctgtgtctttgcctttcacgatctcggctctttgtaggattggcgcatgaagtaataacatgtaggagtgatgaagatagcgagtaaagccatggcgccagtgaggaagaacgaaccccatagcaggtcaacgttatcaagtatggcgatgagagtgatgtatatgagatttaaaccgttggcaaacatgatttccagaaaagccattaccgcccagtggtgattgctccaccgccatgtcaacagactgcttacaagatagaatccagcgataggtgcggcgtagagaagcatctctccgtccaccagcgcatgcagatcagcgtttagaaaagcaatgattgcctgattgataataaccaacagagcaaccatcacaaggtttatgcgtatgaaacccttgaatggttgcccccatttaatagttcttttgcccataggcatacgattgtgtaagctcttaacgccagtttacctgtgttattctgttgcccttgatcgtagcagagataacataattgcgtttcgacttaccaccttgacggtcgatatccagcgttgcaggaacctttaccttcagctcttcgtcgttgtca

SEQ ID NO: 4161 - DNA, 24275 bp, synthetic construct
  source 1..24275: mol_type = other DNA
  misc_feature 1..24275: note = Synthetic
actcgtttacttgtaacgtgttaacttgtcaacttacatgaaagacataataacagaggaacgagtgatggcttacatcacaagtaactcgtctacttgttaactccagaactcgtctacttgtccactacttatttacttaatatcatcgtatgcacggatagcttggaggaagcgagcgttgacatcctcgaaagtatatagtccgtcagtattttgattgaggcccttcagcttcaaagagaaaatctgtggagcgtgttggaggtcgagtaaagacatctgtttgagctggtcagtgctctgataaacgaggtttacggctataaaagcctttcctgtagcatcaacccacttctctataacaagctttgaaccgataggtgtcttcttctcgatagagtttgggagtgaatactcctctactccaagggcagcatcgacgctggctatgtttgagtcgtggccacagaggaaggtaaacttacggtctttgtcgtttaactcatcatacatatactgtagaagagggtgagcaacgttgacagctacgataggtgctgtgaaaagaacgtctccataaacatctttcaccttagcaatcttagtccaatcgtccgttgtgagcttatgaccaaaggctgccttcacgccatcaggctcctcataatattgaaggataaacgcatcagaggccgagttagcattcttcaacgaacctttcatgcctggttcctgattgagttcgagcgtgatttgggtgtcgttggtggtgaagtcctttacttctcctttcttataatactcgctttgcttcatgtctaagaccttggcaatgaggtcgtagctgtctttcaatcccttgttgataccaacaagaccttcttttccacccatggcgttgatttgcttcatggcttcagagcagaaggcaggtgtactcttagtaaggcgtgggaagaagattgggtccatctttgaaggtacataacggtggtttacacgtaagccagccactggcatgaacccacttgagaagtattgtgccgtagcgatacagcgttgcatggagttagcatacacgtttacctcatcaatagaaggtacataattgtctttgaacagccctgtctcgatgatccacttgcggaagaactgtcccatctcagtctctaacacaccacctctgagcgttagctcgctggcagccgatgaccagtttgtccactcgtgtggcgtcatcttgctcagtgcagaaccattggttgaaagcggtgaacggatgttatgacgagagaggatgacaacctcttttagtttatatttccctttgaaagcgtcagaacgctgaagctgtgcctgagccaatactgggcagagtagagccagtatcagaaggaggacgaaagaattgatttttctcattgtagtaatactttattaagtcataattcacaacccatagtgtgcgacaataggttgtgaattatcggagttttagaactttatctgcagacgagtctctaagatagagaacgtattattgttgaatgcagcgttgtctgtggcccgtgtgatagaaccacgtactcgccaaatcatgtacttattgaggtaatagttgaaagtcaacgaccagtcgtttaccttaccaccgtagatattggcgtccttgtccgttaaggttgagtagttataggccgcaacaagctccatagaacctgggtctggggtggcaatacccgcatctgccttggtataagtataaccttgacccttgagcaagtagcgtacattgctataagcaccccatgcactgtagtttggcatggcgttgtcacgcttgatacctacgtagaaatactgagcttcaagaccaaagttaccaaccgcaaggttcatttctggagagaacttccacagtgctttagcgtcagagatggtagcctcttgagctgcgacgttggctatacgtgttgggaaaggagctcttaaggtgtatgacttatggctgagagcagctgtcttgttataacgtggagactcatatgcaccactgataccgatgtggaaaatcttaccacgctcagtcaatgggcgccataccaatcgtgtcatcgcaccccatgcctcgttaccgagcttatcagtggtcatcttcattgcgtcgttctcagcaaacactgatgcagtagcgtggaacttatcgccagcatgcacgtacatagcacctatcaaacggctattgaagaaggcttggttggctaaaggctcctccatcgaaatcttaaagcttgaggatgtaccgctctggaggccatactgatgtacaaagtagcccatacgaataaggttctctttgtcgaaattgtagtcgaggctgatgtccttgagagaaagactttgtcgagcataaccgacatcgacctttgctttccacttaccgtaggttgcgctgactcccatacgtacgtctgggatggcaacaccatcgttaagttggtcgttaagtgtctcgtctgttgagtgcataacgcctgcatccatgaggatacgacctgagggtttaactactaactttggctcttcgtcttgagcaaaggcacctgtacaggccattaagccacaggctgccataaggataattcttttcatagatgtatttatgttgtctatattctataaaattaggttttctactctaaagagagtgattcattgagggagagaaaggagttaagtctctgacagatagttgatatcttcagacgaagttaactcctttctcgcttttcctttacggcttagttggcagccttaaaggtgctctttgcaatcttaccctccttctttagcttcgcaaactccttcttcgccttagctaactgctcttggaaagcagggtcagcatggagacgtgctacgacagcagcactgacaatgcgtgctgcatctacgtcgctctgccagtgataaccgcagataacacggctctggcccatctggtagccacgttcaagtatctcattttgacggtcgacattaatctctgagagtacaagagcagttgcccaaccgatagccgtatggccagatggataagaaccattggttgacagttcctgttgttgctctgggttgcaagtcatctctttgtagaaagcgaatggacgaacacgcatgtagtggtctttagcactgcgtgtagccaagtcgccagcgtcctcacgcatattcaagacgagcttgtagatctcaggagttgtctctttgctaatcttaataccgaaggcttcagagaaggcattaggtactccgtcgccacctacacgtgcgtcagctgctgcttggtcgcctcgtggggtgtcgcgctgcatctttccccactgatactgagcctgatcgtaaaggaactgaatgctacctggctgcggaggagcagggagcagttcgagagaacttgcctgttgtccgtcctgaaggtagtagaggtcgggctgtgtacgaacgtctttaatcttctttgtagttgtctgtgcgaaagtggtcactgagaacatagccagcagaccaatgactaaggttttctttgtcatcataatagatttgaatttataattttgaattaattaaaagacaatttgtttctgttgttgcaaaggtatatgaaaaggctaaataaaaatagttgcatcctattatttgcctaaaataaatggatgcaactattcttaatctgctggttatcagttgttatgattattctgatagctttgtaatataattgacgatactacttgaattacgcttacaatagtcgtcgagtagcgtcttgttatctcctatcttactatgatagagtcgactgacaacagggtttaggtttccatagatacctaacatccccggcaggagtgtacgcttcactcttggcatggcaagcagcaggatgagtacacgcacttgctggccgtttacgctcgtaaagtggaatatctcttggcacacttctttgtctgttgtggcaaagctaatgaagaattgctctgatatttgcgctatctggtctgtgacatcacgtgtagcagagtcgatgtcagcaaagagttttgaatgaaatttcttcattctccgttcttcattctccttttttatattgtcgtgtatggtggtatattcttctatcagctgttggagcgtatttaagtacttgatttgtgtgatgcgattgtcgatagtttgcaacagacgcagcagtacgatacggtctcgattgtcgatatctttctctattgtttgcagttcgtttaataggctttctgccatctcttcatagcctttcagccgttgcaattgcacgatactggctgagatataatcgcgaataacctttagtccctttggagtaaagatgttttcgtattgttccttgaccacgataaagtctggatagacctcggctatcgtcagatgtttggttgcttcttgtatatgttgcagcctttctctcatgccatcgttcagtccgctgaggacgagcgtgccttcggtcgaccgatagaacttatcgagtcgctccttaatctcttgtatatgattgagccacacctcgttcttcttgcattgttcgatgatgatttcgatgttatctgtgctacgggcttcttccgagtcgtgtatcatctggctacattcatacacttcgtattggtggatgcggtcgatctgttcgttaagaaacttcaccatctggagggctgtgtcacggtttagtcgggcaatgcgggctgataggttggcgaacagctcattgttagctcgcagactttgagaactgatgttaatcgtttctatctcattactaatagcttcaagtgtgttttgttcgttctctgtcagtctgtcttttaggcctgccaacgcttctaagcgatggcgaaggtcgtcctttcttaactggagctgcttgtaagtcaatgtcttgtgcctacgatagctgaagagaatgatacctattatactcatcatcgtgaagaggatgatgccaataagttgtaggctgggggctttattatcaaaggtaatccacttggcagcctcctctttgcctggagtcaactgtatcacgccaaggtcggaaccaatgtagagcgtgttgttaaggctgaaagcggcctgagcattgaagtgtatgtcatcaaagaaactaccacaatcgtagagtcggttgttttttatcttgtatttatgtatccccatctctggtatcgtatagacaatactgtcattgatacaaaagatttgattgcttccatcggtccgaatggagtcagctccttgtatttgtagatagtgattggtgaggaggagtaggcgagggcgtggcgaattgtaggtgcagagactattgacaaacaccatgtgctcggttcctgcgatgcgttccacctgctttcctttgctgacaaacacaccgtgattaagggtcgagatgtatatcttgccactttctgggctttgatagaaggctgtaatatacctgttattcatcgacttcaccgtgtctgtcttcccattacggcagtctactgacagcagatagtcttgcacaccgagtagtagtttgttttcatgggacagaagggccatcgaggtgatacgtgtccttggttgtgtcagtagttgtggacgcttgaagagctggttgataaggtattgttcgccaatgctgagcctgtacacctgattattagccgtataataatagatgtcttcgccatcggcaaacatctcctttggcaactcgtcgtcttcaaagtcatataccttcttggctacgagttcgtcggctttctggcgaaacagctcgtgttggttgtttacatagatgaggtcattacccgtcctacatgctgcaacgacaggagggttggcattgaagatgccaagatggtgggggatgcgccatagagcgttctttgtaaggaggatggagaagccgtttccatcgtcggcaatggctatccgatgtggattgtcgggtacattattgcggagaggaatactgacaaaacgctctaaattgtcggataggagtattctcgatgatgtaatgaaatagtaggtcgagcctgctttataaaaggatagcaccgactggggcagtggaaagtgcttgctgtcagctccgtagatgttttctatcgttagttgattgtcagaaagaatacagaggtgaccgtcatagaaggctaccttgcgtatattctcacctttatgacgtagttctgtcttctgcgtgtgtaggtttatgcttattaccccggcctgtgtggcagcaaagagccacttgtcgtcgacggggcagaggttgttgaccaagaagggttcgcaacactgggttgctgacgtcgctttgatagggtagagtagggtcagtccttgctgcagctgaccgatgggcatggagaaaagaccttgtgatgtagcgacatagaggtgcttgtctgtaatcgttatatcgtagggagaataacggctacctttgccgggaatgtcgtaggtaagctgatggaggagtgtgtcggctgctatattccataactgcagaccggcattacgtgatgcaatccaaatctgattaggatgcgaagggtcgcgtgctacgtcatagatgcggtcgagccctgtgtaataacgtttcctttcgtctccattgatatgccatattacacccgtctctccgccaatccaatagccagtgttgtctatagacaatgcagacaaacggtcggcatagtggaactctcgctctgataacgaccgtgaaggggctgtctccttgcagcctgtgataacgaatagtagtatcaaacagagccaactgacaagaagatgcacctttgcctgtatattgtattccgtagtcattggatttaactttgtctgcaaagatagcgaattactctgagaattgacgatgttatcttatattgtttgttgaaaagtggtgtctgagagggttttattggatgttttcttgggtggtaggtgatgatgtgttgggtgttaggtgtttaatgttaggtgttgatggagtgcttttgtgggtgttcggtgttgatgtgttgggtgttaggtgttgaatgttaggtgttgatgaagtgcttttgtgggtgttcggtgttgatgtgtcgggtgttaggtgtttaatgttcggtgttgatgaagtgcttttgtgggtagtaggtgttgatgtgttgggtgttaggtgtttaatgttaggtgttgatgaagtgctttcgtgggtgttagttgttgatgtgttgggtgttaggtgtttaatgttaggtgttgatgaagtgcttttgtgggtgttaggtgttgatgtattgggtgttaggtgttgatgtattgggtgttaggtgttaaatattaggtgttgatgaagtgcttttgtgggtgttaggtgttgatgtgttgggtgttaggtgttgaatgttaggtgttgatgaagtgcttttgtgggtgttaggtgtttactgttaagtgttgatgaaatgctttcataggtgttaggtattgaatgttaggtgttgataaaaaggttatgtggatacaagttgtttagtattgagtcttaaagcagcttgtaagtaacagcatatttcatacccacaaaaacaaacatcgtgtactttctcatagcaggtttgggctcccctccttcggaggggttgggggaggtccccacatccaccttctccccttgtcaacatttttcgtccctcttgttcatagtacatgctctttaaggtggcagaagaggcccttctacgtgcgagaacatgcccttcttgcatgcagagaaggcccttcttgaggcatgaagggtgtcttctcgaatgctgtttgtaatatgctgattctttgaaggttatgatgttggtgataagggaggttatacccttgtgttgagggtgtttaactcggtgttgtgtaatgttttttcatggttttacaggtgttctccgagatgtggaatgggatgtttgaaacattattcgagtggtcggataaacccttgaagggcttatctgtgagtgtttttttaccgctttcaaatgttgtgtagagaatttgtacacacgatgttgaggctccgtatgatagagaatgatggttacgaaaggattattttagggctatcttgcgaaagactgaccctcttgtcgtggcgtaaatattcagtttatgggcaggggaaatgttctttctgttatatgcgtaggtcggggaagggagaaagacggatacattaatagtgtatatcatggtgagacgacataatgtgtaatgttttttctgcgataaaagttactgaacagttgtcgaagtatttaacgagtgagacgaaaaaaggggatgtgtcgccacatccccctcgtcgttttaatcgttttatctcttattctttttaagaattcgttgtgcacaatcggccaagacaacgaccgctccggccaggatacatacatccttgatgaccagacgccccgcaccagtaagtaacgggaacccgtgctcgccacttcctaagttgggtacccatacttcgggagtcgtgacaaggaaggacaacgtgccaaacgtcatgagaatgacaaggcctgaaccaacgaaaccaatctttggaaaccagatacctaataaggtcaaaatgccaaatgacataatggcaatacctaaaccatgagagaaggtgtaggtgttgttggcttcatgccagtcgtgcttgaccttgtcaaactcgccttctttgagcttgtagtccttatactctggtgccttctttgtgtagaagaagctcataaatggactgtttgccacgaatggcacaataccctctgcctcatagttccaaaacttcaacccaccaatccatacaaagatgatgaagattgctatacgtattaaatgaatacctgtacctttcagcgatgctgcggtatttagaacgaagtctaataataaattaactttactcataatctgttactgatttatatcatgaatttaataaacactcttttatatttctctctgccagttcttagctttttgtccactatttttttatttcccatctgctatgtttaagccttccacttaccctaattaagcctcttttttacgataagtaggcccttcacttactctaattagactccccatctattatgagtaggccttttgatcactctaattaggctttctaattactgtgagcaggttttactctacgatgattttaaatttcttccatcctggatatggtcttaccctatgataggctcactattaccctaataatgaactcgttttctcactcagaatgttatccattaatccccttgtccttttgtctttagaacttcgttaacagtagtcttccactcctcgttttgaaatcgtcggcaaagatatataattccccttaaacggcaaagaatatcccttgtaattattacaaaaactactacgaatagtcttttttatctaaaaataccatctttgtggtatgataaaatgacatccctttccatatcacgttgttgatgcgtttaccattattgcatctgtcaataatgggagagcctgtgatagtatgtaaaaggtatttagtgggcaattagtgaggatggtgtttattatcaaaaagtaattattctgcagcaaaaggaataaattatattgtttatttggaattttataaaaaaatatataagtttgcataatagatagttatgcgcagttaaattacaactaaaaacctaaatagaatctgcgtagggttagaagatataaaaaaagaccctgcggttgaccgcagggtacaagaaaatcttcggcttatagccttgttgtgaaaagtcttcactgtgtatctgggcgcaaatatacaacttatttctgataaaacaaacaaattcttaaaaatatgacacaaaaagttttaggcttagatcttggtactaattctattggttcagcagttagaaacttggacctctcagatgatctacaatggcagttagagttcttttcttctgatatcttcaggagtagtgttaataaagaaagtaatggacgtgaatattcgttggctgcacagcgttctgcacatagaagaagtcgtgggttgaatgaggtaagacggcgtagattgtgggctacattaaatttactcattaagcacggtttctgtccgatgagttcagagtcattaatgcgatggtgtacttatgataaacgaaaagggctttttagagagtatccaattgatgataaggatttcaatgcatggatacttttggactttaacggcgatggcagaccagattattccagtccataccaactgcgtcgagaacttgtaacacgccaatttgattttgaacagcctattgaacgttataaacttggacgtgctttgtaccatatagcacagcatcgtggctttaagagtagtaagggagagactttgtcgcagcaagaaactaatagtaaaccgtcgtctacagatgagataccagatgtagcaggtgcaatgaaagcttcggaagagaaactttcaaagggcctgtctacctatatgaaggagcataacttactgacagttggagcagcttttgcccagttggaagacgaaggtgtaagagttcgcaacaataatgattaccgtgtaatacgttcacaattccagcacgagatagagaccatctttaagtttcaacaaggactgtcagtagaaagcgagttatatgaacgccttataagtgagaagaaaaatgttggtacaattttttataagcgtcctttgcgttcgcaacgagggaatgtgggaaagtgtacacttgaacgttcaaagcctcgctgtgctattggtcatcctttgtttgagaaattccgcgcttggacattgattaataatatcaaagtcagaatgtctgtagacacattggacgaacaacttcctatgaagttacgtctggatctttataatgaatgctttcttgcgtttgtaaggactgagttcaaattcgaagatattcgtaagtatcttgaaaaacgactgggtattcatttctcctacaatgataagactattaactataaggacagtacgagtgttgccggttgtcctataactgctcggttcagaaagatgctgggagaggaatgggaatccttccgtgttgatggacaaaaagagaggcaagcgcatagtaagaataatatcttgttccatagagtttcatattctattgaagatatatggcatttctgttatgatgcggaggagccagaagcagtgcttgcctttgctcaagaaaccttacgattggagaggaaaaaagcggaggagctcgttcgcatctggtcggcaatgccccaaggttatgctatgttaagtcagaaggcgattcgtaatatcaataagatattgatgttgggattgaaatactctgatgctgtgatacttgctaaagtcccagaacttgtagatgtttctgatgaggagttgttgtctatagcgaaagactattatcttgtagaggcgcaggttaattatgacaaacgcattaatagtattgttaatggcctcatagccaaatataaatcagtatcagaagaatatcgtttcgctgatcataactatgagtatttattagacgagtctgacgaaaaagatatcatcaggcaaattgaaagtagtttgggcgcaaagcggtggagtctgatggatgctgatgagcagacagatattttacaaaaagttcgtgacaggtatcaggatttctttagaagtcatgagcgtaagtttgtagagtcacctaagttgggggaaagttttgagaactatcttacaaagaaattcccactggttgagagagagcaatggaaaaagttatatcatccttcacaaatagctatttaccgtcctgttcctgctaataaggatcgtactgctttaagattgggtaatcctgatattggtgcaatcaagaatcctacggtgttgagggtgctttataccttaaggagaaggattaatcagcttttggatgatggtgttatttctccagatgaaacaagagtggtagtagagacagctcgtgagttgaatgatgctaatagaaagtgggctctggatacttataacagaatccgtcacgatgaaaatgagaagataaagaagattcttgaagagttttatccgaaacgtgatggtataagtacagatgatatagataaggcacggtatgtaatagaccaacgtgaggtagattactttacggaatccaaaacctacaataaggatataaagaaatataaattttggctggagcagggagggcagtgtatgtatactggtcgtaccataaacctatcaaatctttttgatccaaatgcatttgatattgaacacaccattccagagagtcttagttttgacagttctgatatgaatctgactttatgtgatgctcattataaccgtttcataaagaaaaatcatattcctacagatatgccgaattatgataaggctattactatagatggtaaagagtatcctgctataacatctcagttacaacgttgggtagaaagagttgagcgtttaaatcgtaatgttgaatattggaaagggcaggcaagaagggcacagaataaagaccgtaaagaccaatgtatgcgtgagatgcatctgtggaagatggagttggaatactggaagaagaagttggaacgcttcacagttactgaggttacagacggatttaagaacagtcagcttgtggatacacgagttataactcgtcatgcagttttatatctgaagagcatattcccacatgtagatgtgcaacgaggagacgtaactgctaaattcagaaagatacttggtatacaaagtgtaggcgaaaagaaagaccgtagcttacattctcatcatgctatagacgcaacaactctgacgataatcccagtttctgcaaagagagatcgtatgctggagttatttgctaagattgaagagattaataagatgttatccttttctggtagtgaggataggacaggactgcaacaagaacttgatggtttgaagaataaacttcaaatggaagtcaaggcgtgtaggataggtcataaagtttcagaaattggtacgtttataaatgataatatcatcgttaatcaccatgttaagaatcaagctcttacaccagttcgccgccaattaggaaagaagggtcatatagttggaggagtagataaacctcgatggcagacaggtgatgctttgcgaggtgaaatccataaggcaagttattatggagcgataacacaatttgtaaaggatgaggagggaaaagttctgatgaaagagggacgtcctcaaattaatcctacgattaaatttgtaatacgtcgtgaattaaagtataagaaatcttctacagatagtggatttgcatcgtgggatgaccttggaaaagccattgttgataaggaactttttgctttgatgaaagggcaattcccagcagaaacatctttcaaggatgcttgtgagcagggaatctatatgataaagaaaggaaagaatggtatgcctgatattaaattgcatcatataagacatgtgaggtgtgaggcccctcaaagtggcttgaagataaaagagcaaacttataaatccgagaaagaatacaagcgttatttctatgctgcagttggcgatttgtatgcaatgtgctgttatacaaatggtaagattcgtgagtttagaatttacagcttgtatgatgtttcttgtcatcgtaaatctgatatagaggatattccagagtttatcactgataagaaaggtaatcgacttatgcttgattataagttgcgtactggcgatatgattttgctttataaggataatccagcggagttatatgatttagataatgtaaatttgagtcgtcgtctttataaaattaatcgttttgagtcacagagcaatttagttttaatgactcatcatttgtctacatcgaaagaacgtggacgttctcttggtaagactgttgactatcaaaatcttccagagtcaattcgcagtagtgtaaaatctcttaattttcttattatgggtgagaatcgtgactttgttattaagaatggtaagataatcttcaatcaccgatgataaagaaaactttatattttgggaatcctgcttatctctcacttcgtaatgggcagttggttatccgacttcctgaagtggagaaagcagaatttcctgatatcataaaacaggaaactatcagaacggttcctatagaagatattggtgttgtggtattggacaataagcagataaccattacacaaggtgctttagcagagttagtagctaactctgctacagtaataacctgtgatagtaaatgtatgcctacgggaatgttacttcctctttctggcaatacattgcatcaggagcgttttcgtaatcagatagaagctgcaattccattgcgtaaacagctgtggcaacaaacggtaaaagctaagatagagaatcaagcatattgtttacagaagaacacttctaaatcatttgttccgctccatgtccttgctcgtaaagtcaggagtgatgatgctgataaccacgaagcgcaagctgcagcctattactggaagaatctcttttctgatggtttcacaagggataaggatggtattccacctaataatctgttgaattatggatatgcaatacttcgtgctgtgattgctcgtgctttggtggggagtggactgttacctgtctatggaattcatcatcataaccgttataacgcatattgtttagcagatgatattatggaaccttatcgtccgtttgtggatgaccttgtcatttcaacaatgaaaaagatggaggtatcagatgatttgacagtagctttaaagcgggaaatgttgtcaataccagttcttgatgttattataggtggtaagcgtagcccattgatgattgctgcaggcttgacaactgcgagtcttgcgaagtgctataatggggaagctcgtgaaatttcttatccttcctttctttgatgcaacgacttagcgaatatagggttatgtgggtaatggtcttttttgatcttccaacgaatacaaacaaggaaaaacgtgcttatactatcttccgaaaagatttgatgaaagatggttttacaatgtttcaattgtcaatctatgttcgtcattgcgcaagcagagagaatgcagatgttcatgtgaaacgtgtaaaatcatttatgcctaattctggtaatgtctgtattatggtcattactgataaacaatttggtgagatagagctttttcgtggaagtcagccacaagagcctaatgctccaggacagcaactagaattattctaaaaaagagtcccatcattgtgataggactcttttgttttgcattttttatttgtacaaaagtcttgttacttgctgtaatacaggtaaatataacttttaagttgtacgtgctaatgcaaagatacacattttgaagcaattcacaaccttggaatcttaacaccaccagtaactgtgtgttgtacgtgctaatgcaaagatacacattttgaagcaattcacaacacaaccctactctgataacatacaaggaggttgtacgtgctaatgcaaagatacacattttgaagcaattcacaacggttgctcgttcgtcttgctttcttcgagtgttgtacgtgctaatgcaaagatacacattttgaagcaattcacaacttacgtgggttcagggcagtacatacctgacgttgtacgtgctaatgcaaagatacacattttgaagcaattcacaacacccaattaccaacagtaccaagaatggcggttgtacgtgctaatgcaaagatacacattttgaagcaattcacaacgcgtaagcctcgaggttaaccttgtggtaggttgtacgtgctaatgcaaagatacacattttgaagcaattcacaacaagtggacaaaaacaatcaacgacatgtcggttgtacgtgctaatgcaaagatacacattttgaagcaattcacaacatccatggtttcgccaggaggtagacgagagttgtacgtgctaatgcaaagatacacattttgaagcaattcacaacgttacctaaaacacgaacaacgaaaacgcagttgtacgtgctaatgcaaagatacacattttgaagcaattcacaaccgttgagtcgacagaagtgtactaccacgcgttgtacgtgctaatgcaaagatacacattttgaagcaattcacaacaatgtagccagtccaagctatacctttactgttgtacgtgctaatgcaaagatacacattttgaagcaattcacaacactcatcacaatataatagactagctgtatgttgtacgtgctaatgcaaagatacacattttgaagcaattcacaacgaatggagtgtgcgtgcgtttgttccatatgttgtacgtgctaatgcaaagatacacattttgaagcaattcacaacagcgctccactcgagacagtttcctcggatgttgtacgtgctaatgcaaagatacacattttgaagcaattcacaaccatgtctaaacgctccactcgagacagtttgttgtacgtgctaatgcaaagatacacattttgaagcaattcacaacatcctctcactaataagcgtgctccaatacgttgtacgtgctaatgcaaagatacacattttgaagcaattcacaactcttgacggtgctaacctcctttcttctgagttgtacgtgctaatgcaaagatacacattttgaagcaattcacaactcataccaattaagtagccatgagaaggaggttgtacgtgctaatgcaaagatacacattttgaagcaattcacaactaaacgtttagtaactggattaacaatcttgttgtacgtgctaatgcaaagatacacattttgaagcaattcacaactttagctaatgttgattatcagcttaaaaagttgtacgtgctaatgcaaagatacacattttgaagcaattcacaacctattgtgatacttcacgttctcctctgaagttgtacgtgctaatgcaaagatacacattttgaagcaattcacaactctctctggtggtgtaaaacatgtcgctgggttgtacgtgctaatgcaaagatacacattttgaagcaattcacaacagagtgagtgcatacttgccttaccttatagttgtacgtgctaatgcaaagatacacattttgaagcaattcacaacctggtgtcattagtaaaggcaatgtaattagttgtacgtgctaatgcaaagatacacattttgaagcaattcacaacgagaatacattaacataaggtagcatcagggttgtacgtgctaatgcaaagatacacattttgaagcaattcacaacagttgagttcctcacctctaacgctgtgtcgttgtacgtgctaatgcaaagatacacattttgaagcaattcacaacatagaggagtataacacattgaccattcaggttgtacgtgctaatgcaaagatacacattttgaagcaattcacaaccattcatttcgaggacaaatcatgtgataagttgtacgtgctaatgcaaagatacacattttgaagcaattcacaactgctggtatgtccgagtcttctgctgttgagttgtacgtgctaatgcaaagatacacattttgaagcaattcacaacatttgatggaagtcattgcttttgcaaaaagttgtacgtgctaatgcaaagatacacattttgaagcaattcacaacttttgttactgacatcaaacttgatgatacgttgtacgtgctaatgcaaagatacacattttgaagcaattcacaacatatgtcaacacttctaatcgtaagtatagttgtacgtgctaatgcaaagatacacattttgaagcaattcacaacctgtacttgctgctggtaatatggtaaatggttgtacgtgctaatgcaaagatacacattttgaagcaattcacaacgatgcctacttccctacacgtgaagttaagttgtacgtgctaatgcaaagatacacattttgaagcaattcacaacctctcttgacccacttaataacaatcaaggttgtacgtgctaatgcaaagatacacattttgaagcaattcacaacttttcagccgtgtatgcttgagttcctttcgttgtacgtgctaatgcaaagatacacattttgaagcaattcacaacgggtttctctaacttttcttttaagttcgagttgtacgtgctaatgcaaagatacacattttgaagcaattcacaactatggacttgtctatgctatttcgtaatgcgttgtacgtgctaatgcaaagatacacattttgaagcaattcacaacgccgtcctcgtcatactctttttgtgccagttgtacgtgctaatgcaaagatacacattttgaagcaattcacaactttgctttatcgaacagctcgttaattgtgttgtacgtgctaatgcaaagatacacattttgaagcaattcacaactagcagaatttatagagttaagtcattcaagttgtacgtgctaatgcaaagatacacattttgaagcaattcacaacagtaccccttgctacaagataattgattagttgtacgtgctaatgcaaagatacacattttgaagcaattcacaacagtaccgcctgctacaagataattgattatgttgtacgtgctaatgcaaagatacacattttgaagcaattcacaacagagctagttaatcaactatccgataatttgttgtacgtgctaatgcaaagatacacattttgaagcaattcacaactttgcttcatcttgatcagtggaagtggttgttgtacgtgctaatgcaaagatacacattttgaagcaattcacaacagcaccccctgttttaagataattgattagttgtacgtgctaatgcaaagatacacattttgaagcaattcacaactgcagatgttaaatataaagggttaaggctgttgtacgtgctaatgcaaagatacacattttgaagcaattcacaacggatgtgtataacagcgttttcgctgttacgttgtacgtgctaatgcaaagatacacattttgaggcaattcacaacagaggaataattcgatttacgtaattcagtgttgtgtgtattctaatgcaagatatacataaaataattataagaagattattcccacctacgccttcttaccagacacaagggtgaagatgatgaagagacctataacgaagatgaagaggaaggagcctaatgcacccgcatagatacggccggtgtgaacctctaaggcaagactccaaagcgacatgggtttatctttcaattcgtctggctgttttgcgaaggatgaaccttggaagtaggtggctatacattccttgtttgtgaaatcagaactatagccagagattgtctgttcgtctggagctgtacccggtatacctggagtagagaccatagcatcgttgtagtaaagcactgcattgctctttctatcccaataaaataggccatcgaaggagcctacaatccatgctttgttatttgcatattgccagacattctgtcccataacactcactgggggcgctgtggtgattggtgttggctttgacgagaggtttctaagagaatagaaaccttctgacgttgagataagccagtcatgaacttgctcatcataacgtatcattcttagtttgtcattccaaggattatcattgtctaaggttgttccaggcaatggcttcgtactgtttgtggcaaggagaatcatcagtgggggacgtaaagcccatcctgttattgcgataaacagtgtcagagcgaaggtgtaatgccctatctttgtatgccaaacgaccattgacgttgctttatggcgaatccaataccatatacccgttacgcagaggatgattaagacaagtccaatcccatcgacgatgagttttcctattgtcccaaacagtgcaccgctatgcaaaagccatatttgacggaacaatgacactttcccttcatttccctcagcagcctgtagtgtgacgcaagtaaatttcttataaggagctgtagcatagtagagatgagagcgcgaaagtacgatgagcgtatcaccatgtgtggttatgtcggtcagaagttcgtcatcttcttgctttgggaggtcgactatttgccaagatgcgttctttcccagtttatataggttcatgacactaactgcaaagaggtcattctttggagtcttaaccattcctcgcatctgtcgatagtcagcaccagcaggtagaccttggttgtattctgtgaagtgagaagcagttgtatcagtttgaatgatacctgcagcaccatatatgaacaccttttcatggtttttattatctttgtaacgtaatgttccacgtagtaatccgttgttccattggctgaattcgtattgaccgggtaatatcccacggcttacattaatatctgcaaagagttgacgatggttgagtacaataccagaaaggcagaacattaccaagaaaaatgtaacgacaattccaacccatttatggtgtttgcgccatgttttacgtttcatattttgttgttcgtgatatgttgttttttactcagttctataacgagatacaaacttacaaaaaaatactgtaattagagcctttcttgattacattttttcgtttacatgtgtactgttaggcgtgtaaatgagttctataacttaccagaagtatttagcttacgtatcaattgaatataaaccctatcagtttgcctaatttcttttcatgaaaaaaaatatttattgtcgtgaaaagaaatatttatgttcatgaaaataattccttggagacggtcttctcatttggttgtaatagtttacagctttcttcctctttgtcttttccgtctttgatagggtggtttaaggtaagaaatcttgcctcaatacataattaaaacccccaatcaacagggctttacacaaggttaagcaactgttaactgggggatatgtgttataggcaggacttatcttgccttattttctcgtcacacgaacatatctcatcaccttcttaacgactattcttcgaaggtctttgtcattaaacttggtctgggtcagttcgaactcattgttgttaataaatctgacttgaaggttcttgcgtgtcttaccatctatcttcataaagaaaccatcacgacgaaaaccatacacgcctgtgtcgtcgtcacgtttccacctgccattgtcctctctctctataacactcatggtcccattacggtagaagtcgaagcgatgcaactcatcatcgaggtcgtcatcatcatgtccaacgagcgagcgaaggtcaacacgctcaccagtcttgaagtctactgggaggaacttatagtcatcatatctgtcgattatgaaccccaccttatattccttgtgtgttcttggattacgcacgatagcataactacccttattggtcaattcccacgttccaacgatccgtgtgttgttggttggtgtggctgctacttgctgattgtcattatttgcgtcgttgtttgttgcgtatgaactggaaaatgtaaacagtccacctaatactaaaccagcgcacaaagcgcgtttagaagaaaagatttttctcattgttatatactcatttttggattaatatgatacaaatatacgcaaacaaattataatattgttgatgagaccttactcttttaagtgattttatagaattggttgacataatgacatccaattaacagatttattcaaataggtatgaaatctgttagttggatgctaaaggaataagataactttctatttcacaggtttatcgcccatagtgaagtctatttcaggacctgttatcagttgttcatgttcaagataataatgtggataaggctgtccgttcattgttatatgctgtatgaaacggttgtctttgtcgtttttttctgcacggagagtgatggtcttaccgttctcaaggtgtaccttagccatgtggaagtaaggcgaaccaatcatgtattgtgtgctaccggggcaaacagggtagaagccgagggcagagaagacataccaagccgacgtctgaccgttatcttcatcaccacaatagccatcaggctgtgcagaatagagtcggtccatcacctcacgcacccaatattgtgccttccatggctgtccgctgtagtcatagaggtaaatcatgtgttggataggttggtttccatgtgcgtaattacccatattcatgatttgcatctcacgtatttcgtgaatggtgaagccgtaatagctatcgtcaaagacaggtggaagttggaagacactatccaacattgcattaaacttgtcgtatcctcccatcagccgtgccagtcctgcagggtcatgaaacacactccatgtgtaatgccagctatttccctccgtgaaggcatcgccccatttgaaaggattaaatggcgtttgaaaactgccatcctcgttacgtccacgcatcagtcctgtctccttgtcgaaaaccttctgatagttcattgcacgaagtttgtagggtttgagttccttagcgctctttccgagttttaaacctaactgatagatgcaccaatcgtcgtaagcatactctaaagtacgggcaacgctctcgttaattcccacgttataaggtacataacctaagcggttgtaatagtcaaaacctttgcgtccagtcgaactaacgcttggatgtacggcattcgcaccatgagtaacagctttccaaagggtctctatgtcataacctcgcagtcctttgatgtaagcatcagctacgaccgaggccgagttgttgcccaccatgcagtcgcgatggcccggactcgcccattcaggtaggaagccactctccttgtaagcatttactaagcctgcttgcatcttctcgttcattgacggatagacgaggttaagcaatgggaagagcgaacggaaggtatcccagaagcctgtgtcagtaaagaggtagcctggtagtactttgccgttatagggactgtagtggacaggattaccctgttcgtcgagttcatagaacgtgcgtgggaacaatacggagcgatagaggcaactataaaacgtgcgaagatggtcgatattgttgtcttccacttcgatacgtcctaatatgttgttccattcctttctaccttctgccttcacctcgtcaaaagtcttgccctcaacttccttgagattacgcagtgcttgttcgttactaataaacgatgaggctacctgtacattcacttgttcgcctcgtttcgtgtggaaccccactacggccatagcgtgattgcaggtagagacggtctttccatcagacagtttcccatcttcaacacagcccatgtaggtgaagtcatggtcgaaacgaagtacaaaatagttcttgaaaccatttggtacacctccactattctttgttgtatagcccacgattgtacgcttatcaggcataatcgttacagaagagctcttgtcaaaggcgtcaacaacaaagtaggccgcttctgtctgtggataagtgatgcgcatagaagcagcccgactggtaggactaatctctgctgtgacatcatggtcagccagatataccttataataatagggtgttgcggtctcagccttgtgtgagaaccagcttgcacgtccttcctcgtcaaacacctttttacccacaacgggcatgacagcgaactgtccgtagtcattaatccatgggctgggttggtgagtctgcttgataccacgtatcttatcggctccgtaggtgtaagtccacccatctcccatctttcctgtctgtggtgtccagaagttcataccccatggtaaggcgatggcaggataggtgttgcctgttgaaagctctgactttgaggccgatccaa

SEQ ID NO: 4162 - DNA, 24269 bp, synthetic construct
  misc_feature 1..24269: note = Synthetic
  source 1..24269: mol_type = other DNA
ctcgtgccaataagacaatgaatacagacagcaaagctaacaaggatttatatcttcagaagggtatcatacctgaggtgaatggtcaggtagtgtggactgaaacctttaatgtacctggagcaacagctgacgaactttatgacaaggcctttgcttatctcacagaactcacacaaggtagtaaccagttggagggtagtaaggtagctttggtgaataagggcgaacatagtattgtggcaacagtacgtgagaagctcatcttctcttcgtcattcctttcattagattatacccaattcaattatgtacttcaagccacttgtcgtgacggacaggccacattgacgatgaatcgtttgacttatcgttacgatgtacagggcaatgtttctgatttcaatgcagagcaatggattactgataagcatgctgtaaacaagaagcagacgcgtctcttgccagtatctggtaagttccgtcgtgctacaatcgatcgtaagaatagcatctttgagggtttcgaacaagcactgaagtaagagaaaaatagcaatcgacgagggcgtgtctgaggtaatggataaggataactgagccattaatgtagggttcttacctattaacataagcttaataaaagattacaatcctcgtaataaaacttagaagaaatggaaatacagaatagtacggcgcgtcgtccagaacgtcgtcataaacgtgaggtaaaagatcgtttcctgcctattcgtcagtgccttaacatcatttttatgttaggggcgattgtaggtatggcggtctatttcttaaccgataacacaacgataggtattattattattcttgtttcgatggtctttaagatgatcgaaagcatactccgtattattcgttaaatgaagagatttaccttcttgtttgccttcattgtgttagtggcgaatgctgctatggcacaatttgatgataactctacggttgatgatgggacattcactgccgatggggttagacagaataagaatgctgggcgttctgattctatacaaagtcagcataaggagattccacgtggactgaaggtgtggacgatagatgagcgtttcggtgaccgcaagcctgctgtccccgatactttgtcgtatatgtttatgaatgctgaccttacctatggtatgcgcggacaatataacacattgggaaacctgggctctccacgtcagaatcgtatcttcatcgatcgtcgtggtccatcagaattcttcttccttgatccgtatgatatgtttatcgtacagcctaatgagttccagtttacctcaactctttcacctatcacgattcttaactacaatacggcaggtaacaggaataacggagaagaccgatttaaggctatctttgcggtaaacgctggtaaggagtggggcttcggctttaagttcgactacctttacggacgtgggtattacagcaatcagagtgcttcccattttgattactcaatgtggggaagctatttaggcgaacgttatcaagcacacctgcttctttctctgaatcaccagaaggtggcggagaatggtggtattgccaatgatgcctatatcacacaccccgagtcattccgtgaaaactttagtgaagaagaaattccaaccatcttgaaacagaattggaatagaaatgataaccaacacgtctttttcaatcatcgttatagcctcggtttctttcgtaaggtgccgatgactgaagaggaaattaaggccaaggagtttgcgcttaaatctcaaaaggcacaggatgcagagaaagataaggagaaagcacgtcggcaggcaaaggccaagggacagaagtttgatgaggaagcatacgataaggagaagcgttctgctggtcgtcctgatgatgctgtcattgctggtgatgtgtcacaagcaaaggcgcaaactgataaagcgaatgctaatgatcgcctaacggtaaatctggaggactctactcagatggcagaactcaagaagcaggatgcactggcgaaggactctacacagaagtggatgaaggaggaatatgttcctgtgacaagttttattcatacggcacgttttgataactatcgtcgtatctatcaggcgtacgaaactccggctaacttctatgcacagaactacttcaactatggtactgcagccaatgacagcatttatgatagcacaaagcattggtcattgaaaaatacttttgcggtcgctttgctggaaggatttaataagtgggcgaaagctggattgaaagctttcctttcctacgagttgcgtcattatgcacttccaactatgcaaacgccaagtggttctactatagccttctttaatggtgataagacatggaatcagcatgatatttctgtgggtggacagctcctgaagaccttgggtaagactttccattatgatgtcagtgctgaagcttggttggctggaagtagggcaggacagttgcatgtcgatggtcatgcagaccttggcttcccactcttcggtgataccgttcagttggctgcaaccgctttctttcatcgttctgccccatcgttctatatgaatcagtattatggtaagcattatatgtgggacaataaccttagtcaggagatacactctcgtatcctcggtgagttctctttgcagaagacgcgaaccaaactgcgtgtaggctatgatgttctcaagaattatacttacttcggaatacagaacgatcgtgtgcgaagcggtgacaactacctcgttcagcataacgacttgaatgttcgccagtcaagtagtcctatcagtttgcttacgttacaactccaacaggatttccgtctgggtatctttaactggcagaatgtgctgactttacagaaatcgagcaaagacgatattctccctgtaccaatctttaatgcttatagtaatctgttcttacgctttaaggttgcacgtgtgttggatgttgaccttggcgttgacggacgttatttcacaagctattatgcgccagagtatataccaggaattggtgcctttggtattcaagagacggaggcgagtcgtacaaagattggcaactatcctcatcttaacgcttatgccaacttccaactacagcacacacgcttcttcataatgttcacgcatgtgaacagtgccgagggtggtaaatatttcttcacaccacactatccgttgaaccagcgtgtattgcagtttggtatcagctggaacttcttcaattaatcgaaaagaaatttatagaatatagacattaataagataaggtggtttttgaaaacaagaatataaagaccaatagtctttcagcatgggtgcttgcagcgcgtccaaagacgctcacgggggcaatggtgcccgtaatgattggaacagcttgggcttggaggttaggcgggtgggggaacttccgtgtgcttcctgctattctttgttttctctttgcttttctgatgcaggtggattctaactttatcaatgactattttgattgtctgaaaggcaatgacgatcgagccactcgacttggtccaaagcgggcttgttctgaaggatggataacacttcccgctatgcggttaggacttgtcgtcacttctgccttagcctgtcttgtcggttttccactcatcttctttggtggctgggaaatgattgtcgtggggttagcctgcgttctctttgcttttctctataccacctacttttcttatctcggcttaggcgacgtcttggtgttagtattctttggtattgtacccgtcgttttcaccacatacgtcatccttcctacccattttcaagccctgtgctttgatgttattatgtcgggagttatctgcggtttggtgatagacaccctgcttgttgtcaacaattaccgtgatagagagaatgataaacgcgacggaaaggtaacgctcatcgtacgaatcggtgaggaaaaggctgaaaaactttatttagctttgggacttatggcatttattcagttatctttccttctctctttagaagggaggtataaccttcttacctttattctcttggtcatcatctttgcaccttataatattttacatcacaagactgcgatgctaatgaagaaggtaaagaaaggtaaggaactgaataatatcttagcactgaccgctcgcaacatactgctctatggaatagctgtaacgttatcaatacttatctcataattttcgttctatgcaacagcctaatctcgaaataatgaactttgtggagcggcaaattctcccacgctataatgactttggtaagagccacggactcggacatgttcaacgtgtcatcaagaattcgcttgcgttggcagccgttacgggtgctgatgtgaatatggtatatattattgcggcctatcatgaccttggaatggcaggacctcgagccattcatcatatcaccagcggtaagattctcatcgctgatgtgcgtttgcgtaaatggttctcgaccgaacagctaaagattatgaaggaagcagttgaagaccatcgtgccagtagctcacgtgttccgcgtagcatctatggtaagattgttgctgaggctgatcgtgatttagagcctgagatagtcttctctcgtgccatcctctatggtattgagaactatccagagaagaatgatgaagagatgtggcaacgctttcgtgaccacatgaaggagaaatacggacgttcgggctacctaaaactgtggattcctggttcaccaaacgccaagaaccttgaaatcatccgtaagacaattgataatgaggctgaactccgagaagtattcgaccgcatctacaaacagatatgcgaacaagaagataatgacgaataaaataccaatcgtaatgacgaaagaagaattgatgcggagggcaatcgatctctctgctgatagtgtacgaaatggcggtggaccattcggtgccgttattgcccgcaacggagaagttgttgctgaaggaagcaatggagtgactcttttcaacgacccaacagcccatgcagaggttacagctatccgtaaagcatgccaaaagttgaatactttcgacctttctggttacgaaatcttcacctcctgcgaaccttgtccaatgtgccttggtgccatctattgggcacaccttgacaaaatctattatgctaacgaccgcaaagatgctgccgacattggctttgatgatgacttcatctataaggagattgaggttcaaccgcaatatcgtaagaagccttcagagattcttttgcgtaatgaggcgttagaagtcttcaagcaatggacggagaaaacggataaaactgagtattgatacgcttcaagctaagcatctcaccatttattagactatctatctactcttgttcaagcattaataatatgcgataaacaggtatcataaccatgggggaataacacaccacaggtgctgcgtagcggcacagactggcgaacattgcgtttctatcaaaaagctgatgcgctttaccaaatgacgttcgtcttttgcaaacgcttcctacctgcctatggagaccgtaccgttgatcaaatggttcaggcggctcgctcgggaaaacaaaacattgtggaaggtaaggaagatggtctaacctctacggaaatggaactgaaactgctcaatgtggcacgtagtagcttgcaggagcttcgtcaggattatgaggattatctccacacgcgtgggttgaatctttggaggaatagccatccacgttacaacgctctcgtaacattctgccggcttcataataactatgccgactatgcccctttcgtaaataaatggacggcagaggagttctgtaatacagccctctctttatgtcatatcacggaccggatgatgtgtcgttaccttggctacatgcaaaaacgtttcgtgacagaaggaggtatcaaggagcgaatgtacgctgcccgcactggttatcgaaaggagcaagaccgcatgatgcaagcccttaaggaggagaatgcaaccttgaaagcggaggtggctagactgaaaaagctgctggaagataggcagaaggaagagtaggagcttgcttggctttctttagctgttctagtcatgctagtttagctagttatcctagtcatcctagttatcctagccctcctcacaaaaatcaaacataacaacaatggaaacaatctctgtgccccatccgttagaaacttttgtcccagctcgggcagctggtcagcgcaatgttctatcattggctctcccaccgatgcctctgttaagagtggcttttgtgggtgtgggagcacgtgggcggatggctgtgaagcgttggtgtcatattcctaatattgagatagctgcaatctgtgatgtgtccagagaagtggcagaggaggtagcaacgctcgtagaacagtatgggaagcctcggccaaagatttattggggcaagacggcttatcttgatttatgccagcagcaagggattaatcttgtctatgtttgtaccgattggatgtcgcatgtgccaattgctattcatgcaatggagcagggtaagagtgttgctgtggaggtccctgcagcactgaccctaaaggacatttggcgactgatagacacggctgaacgaacacagcagcattgtatgatgcttgagaatgcggtgtatgatcattttgagaatgcggtgtgtcagatggctcgtgagggtctgctcggtgaactcgtacacgtcgaaggtggttacgcccatcctattggcgaccgttggacagcttggcgtatggagtataaccgtatgactgcaggtgatatttatcctacccacagcatcggaccagcttgtcaactccttgatattcatcgcactgaccgaatgtgctacctcacagccatgcaaacgaatgcttttaagggtaaagagatgcatcaaaaagtgatgggagaatcttgcgaaagctttgcgaatggcgatcaaacgtcaacgatgatacgtacagcgaagggaaagaccattctcatacaacataatgtaatgacacctcgcccctacaatcgtatgtttcaggcagtaggcacccatggatatgctgctaaataccctgttcctgaggtgttattaaatgctgaggctgcagcaaaaattggtattgagttgaaggactgcaacttgcctttgaacgcctcgcaaatagagatcttactcaatcattatgctccttctttctcgtcggagataattgctttggcgaaagaacttgatacacgtggggggatgtcattctttatggacgtcagacttgccgaatgtttacagcaaggcctgcctttggatatggatgtatatgacctagcagagtggtgttgcatcgcagaacttacgaagctttctattgagcatggctcaatgcccgtgatgattcccgactttgtgcatcgtaagtctttaagcgctgaggaataaaatagtcgtaatattagttgacaagttaataactgactaagtttataatctacttcacctaatgacataaaaaaaggggaatctcacattccccctttttatcgtttatctttttctatttttcaggattcgttgagcgcagtctgccaatactaccacagctccggctagaatacttaagtccttaatgaccaatcgaccagcacctgttagtaacgggaaaccatgttcaccactgcctaagtcaggtacccatacttcaggtgtcgtgacaatgaaggacagagtcccaaacatcatcaggatgactagtcctgatccaacaaaaccaactttcgggaaccaaatacctaacaaggtcaaaaaaccgaatgtcatgatggcaatacctaagccacgtgagaaggtataagtgttgtttgccttatgccactcgtgtttagccttatcaaactcaccctctttgagtttgtaatccttatattcaggtgcattctttgagtagaagaaactcataaacggactattggcaacgaaaggaacaataccttcagcctcatagttccaaaacttcaaaccaccaatccaaatgaagatgataaagatggcaattcgtatcagttgaacacctgttcctttcagcgatgctgcagtgttaagaacgaaatctaatagtagtttaactttgttcataatttgtttttttaatgacacttaggtcctgaatttatacttacttttttgaaatcacttatagaatctgtagattaagtttagtccttacctattcttgtaaaccaatattttattcttatatcttgattcttcggcaaagatatatattaatcttcaaatcgcaaagaattattttgtatttatttcaattttagccgttgtatctctgttttatccgcaaaataccatgtttgtggtaggaaaaactatccttattggcgggacagcacaattttgtgccacaataaacaaaggtaaaatatatgtatgactgattttgaaactattcattcttatctttctgttttagtttctttctaatatataaagatatagtgataatattatgaaaaaacattacattgttaagagggaatcccatcgaaaaataccaaaaaagctctaaaaattcaagtttgcaactatcaataaatcaagatgttacaagcctggttctaaaaggtgcccaatgaggcttagtaaggtccttaaagggcaccttttacaagctaattgggcgtcttttgaaaccctaaagaccatctattgattttattaagtgcgaaaataatttacaaatagcaactgtaaggaattaagttaaccttataatccgcacaatatgaccacgagttgatatggtgtcatttccctttttgttcattccccttttagtttatatcttctttatggctctctgtaatggtagaatcaacctatatcgctataaacctgcacgttcaatttatgtttcttattcaagaccccttctatttcctttcacgctttactgtttatcttttgagatgaagataatagtttctatttttatatatggttgtgttttgctagataacttgtttcttttttcgttttataatcacaacatttcatacacaaataatgcagaacctattatttaatcattttttaagttattatgatcagcagtaactatttagcgataatgaatgttgactatcaataacttataaacgtaatattgtggtaaaaaggctcgaaatgacattctttaccagaatttgtatatatctatttatgtaacttattgataatcaataatgacggctctataacgaatcgtgtgggtaattcgttatagagcctaaaaatattgtcaaaaaactaaacacaacttcaaattgaccttagttttaatacgcttgacgcacattaaatccctacccttccatatacagtaatggtgttaatccttcgcacatgtggtgcataccatccgcaccacatgtgctaagcacccgcaccaaaccggtggagtatcaatacacaacccacacgattcgttatagaaccataatgacttatacgtcttatcgctaaatagttacgatcaccacgattcaactgggatggaaatgttttttgagttctattaaaatttgaatgtttctgatttaataaaaatatccacaaatttggaactttgaaaaaaaatatctaagtttgcgtttacaaaagttaagtaaagatgtaactaagagccttcaaaaaagcctgagtcttaagactacaaaaaaaagcccctacggttgtccgcagggtgcaagaaaatcttcggcttatagccttgttgtgaaaagtcttcactgtgtatctagttgcaaatttacaactattttttgaatatacaagtaaaaacatataaatatgacacaaaaaattttaggcttagaccttggtactaattctattggatcttcagtaagaaatctggacctatcagatgacttgaaagggcagttggagttcttttcttctgacattttcagaagtagcgtggataagggtagtaatgggcgtgaatattcattgtcggcccagcgttctgctcacagaagaagccgaggcttgaatgaagcaaggcgacgtaagctttgggcaaccttggatttgctcattaagcatggtttttgtccaatgtctcctaattctttaataaagtggcgcacatacgataaacataaaggtttttttagagagtaccctatagatgataaggttttcaatgcgtggattcttttagattttgatggtgatggtaagcctgattattcaagcccttttcagctgcgcagagagctcgttacacgtcagtttgattttgatcagcctattgaacgttataaattaggacgcgctttgtatcatattgctcaacatcgtggttttaagagtagtaagggcgagacattgtcacaacaggaaactgatagtaagaagccatcaactaatgaatttaacgatgttgctggagaaatgaaagcttcggaggagaaactgtcaaagggattaaccacttatatgaaagaaaataatttattgacagttggtgcggcctttgctcaattagaagatgaaggtgtgagagttcgcaacaataatgattatcgagcaatccgttcacaattcaagcacgaaatagagattatttttaagttccaacgaggtctgtcgttgaaaagtgacttcttagaacgacttgttagtgagaaaaaaaatgttggtactatcttttataagcgccctttacgctcacaacgtggaaatgtgggtaagtgtacacttgaacgtaccaagccacgatgtgctgttggtcatcctttgtttgaaaagttccgtgcttggacgttgattaataatataaaggttagaatgcctgaatcggaaaaagccgaacaacttccgatgaagttacgtatggagctttaccgtgactgtttcttagcatttgttagaactgattttaagtttgaggatattcggaagtatctcgaaaagcgtttaggtgttcacttctcttataacgataaaactatcaattacaaagatagtacaagtattgcaggttgtccgataactgctcggtttagaaaaattctaggagaggactgggagtctttccgtatggatggaaaaaaacagcgacaagcgcatggtaagaataacattacgtaccataaagtctcttatactatagatgatatatggcatttctgttatgatgcagaagagccagaattagtattatcttttgcacaagatacattgaattgggagaagaaaaaggcagaagaacttgttcgtgtttggtcagcaatacctcaagggtatgcaatgttaagtcagaaggccattcgtaatatcaataagatgttgatgttgggtttgaaatactctgatgcagttttacttgcaaaagttcctgaactcttagacatttctgatgaagagatcttatcaattacggaagactatcatctattagaatctaagattgggtatgagaaaagaattaatggaatcgtcaattctctcatagctaagtataaatcagccccagaggaagatcgttttgctgatcatgattatgagtatcttttagatgaacatgatgaaaaagacatcatcaaacagattgagagtaatcttggtgaaagaacgtggtgcttaatggatgctaatgagcagactgagattctacagcaagtacgggataagtatcagaacttttttagaagttatgaacgaaagtttgtagaatctccgaaattaggatgttatcttaaggactatcttatagagaagttcccgatggttgatgagaaacaatgggaaaagttatatcatccgtcacaaattgccatttaccatcctattcctactggtagagatcactcagacttaagattaggcaatccagctattggtgcaataaagaatcctacggtattaaaagcactgaatactttaagaaagagggttaatcagctattggatgaaggtatcatatctcctgatgaaacaagggttgttgttgaaacagcacgtgaactgaatgatgctaatagaaaatgggcattagatacgtacaacagaatccgagaagatgaaaacaagaagattaagaatatacttgctgagttttatcccaatcgtaaggatataagtgcagtggatgttgataaggcacgttatgttattgaccaacgtaaagaagattatttcataggggcaaagacatataataaagatattaagaaatataaactttggttagagcaaggcggacagtgtatgtacactggtcgtacgataaatctttcaaatctctttgatcccaatgcttttgatatagaacatactattccagagagtctatgtttcgacagttcggatacgaatcaaacattgtgcgatgctcattataatcggttcataaagaaaaatcatatcccaactgatatgccgaattatgataaagcagttatcatagatggtaaagaatatcctgcaataacctctcttctacaacgttgggtagatagagttgaacgtctgatacggaatgtagaatattggaaaggacaagcacgaagggcgcagaataaagatcgtaaagatcaatgtatgcgtgaaatgcacttatggagtatggaactggaatactggaagaagaagctcgagcgttttactataactgaagtaacagatggttttaagaatagtcaacttgtagatactcgagttataactcgtcatgctgttttataccttaagagtattttcccacatgtggaagtgcagcgtggagatataacagctaaattcagaaagatacttggtatacaaagtgtagatgaaaagaaagatcgtagtttacattctcatcatgcaatagatgcaacaacactgacgataattccaagttctgcaaagaaagagcgtatgttagagttgtttgctaaaatagaagagataaataagatgttatctttttcaggtaatgaagaaagaacggggttgaaacaagaacttgatggattgaagattcagcttaataaggaagttaaggcttgcagggtaggacataatgtttctgaaatcggtacgtttataaatgaaaatattattgttaatcatcatgttaaaaatcaggcactcactccagttcgtcggcggttaagaaagaatggacaagtagtcggaggagtgaataatcctcgttggcagactggtgatgccttacgaggtgaaatccataaggcaagttattatggtgcgataacacagtataaaaaggacaatgatggaaaagtgcagatagaagagggacatctacagattaatccagagattaagtttgtgatacgcaaagaactaaagtttaagaaatcagctgtcgatagtggctttgcatcgtgggaagattttgagaaagctattgttgataaggacctttttgttttgatgaaaggacaattcccagaaggaacatcttttaaagatgcatgtgagcagggtatctacatgataaagaaaggtaagaagggggaggctgataagaagttatacaaaataagacatataagatgttatgctcatgtaaaaaatgctttgaagataaaagaacaaacttataagtcagagaaagaatacaaacgctatttctacgcagcggtcggtgatctatatacgatgtgttgttatacaggtggtaagagtcgtgattttagaatatatagtttgtatgatgtctcttgtcatcgtaaatcaggaatagaagacatacctgaatttattgcggataaaaaaggtaatcgactaaaacttgattataagttgaatgttggcgatatgatcttgctttataaggataatcctgaagagctattcgatttagacaatgtgaatttgaataagctgctatataagataattgggtttgaaaatgatggtttacgtgttaaaatggtaaatcatttgttagcaaacgaggttaagggagaatctgttaaagattatacgaatttgcccgacgtcattcgctgtggtgtaaaaacgataaaattccttattatgggcgagaatcgtgactttgttattaagaatggtaagatcaactttaatcatcgatgataaagaaaaccttatattttgggaatcctgcttatctttcacttcgtaatgggcagttggttattcgacttcctgaagtggagaaagcagagcttcctgatatcgtaaaacaagaaactgttagaacgattccaatagaagatattggtgtagtagtattggataataagcagataactattacgcaaggtgctttagcagagttagtagccaactctgcagcagtaataacctgtgatgacaaatgtatgcccacgggaatgttgcttcccctttctggtaatacattacatcaggaacgttttcgcaatcagatagaagctacaataccattgcgcaaacagctatggcagcagacggtaaaagccaaaatagtaaaccaagcctattgtttgcaaaagaatacttctaaatcatttgcgccacttcacgtgctcgctcgtaaagtgagaagtggtgatgttgataaccatgaggcgcaagcagctgcttactactggaagaatatctttacagatggttttacaagggataaggaaggaactcctcctaacaatcttttgaattatgggtatgcaattcttcgtgctgtgatagctcgagctttggtgggaagtggactattaccagtctatggtattcatcatcataaccgatacaatgcgtactgtttagcagatgatataatggaaccatatcgtccatttgttgatgatctggttctttctacgatgaataatatggatatcccagaagaactgacgatagaattaaagcgggagatgttgtcaatacctgtacttgatgtgcttattggtggtaaacgtagtcctttgatgatagctgcaggtttaacagctgcaagtcttgttaaatgttataatggagaagctcgtgagatatcttatccttcttttctttgatgcaacgactaagtgaatatcgggttatgtgggtgatggtcttttttgatcttccaactaatacaaataaggagaaacgtgcgtacatgattttccgaaaagacctgatgaaagatggatttacgatgtttcaattttcaatctatgtccggcattgtgcaagtaaagagaatgcagacgtacatgtgaagcgtgtaaaatcttttatgccaaactctggaaatatttgcataatggttattaccgataagcagtttggggaaatagaactttttagcggaacacaacccaaagagccaaatgctccaggtcaacagcttgagttattttaaaaaagagccctgtcaatgatgacagggctcttttaaatagcagtttttattttgcacatatgtcttgttagcttctgattatcagaataatatctgatttcggttgtgcgtaatactgcaaagatacacattttaaagcaattcacaactataagcaaggagaatttaagccgataattgttgtgcgtaatactgcaaagatacacattttaaagcaattcacaaccaaacgtgaatttataaaccttttcggatgttgtgcgtaatactgcaaagatacacattttaaagcaattcacaacaaatcagctcgatctcttgttgataactcgttgtgcgtaatactgcaaagatacacattttaaagcaattcacaactagcactcgccttaccttatacaatcggtagttgtgcgtaatactgcaaagatacacattttaaagcaattcacaactacttctgcgaaattgaagcgtgaatacatgttgtgcgtaatactgcaaagatacacattttaaagcaattcacaaccaaacggtcttgttacttctgctcaactccgttgtgcgtaatactgcaaagatacacattttaaagcaattcacaactttgcccccatacgcgtttagcgaccataagttgtgcgtaatactgcaaagatacacattttaaagcaattcacaacggcatctaattatatgtcggaagatgtatgttgtgcgtaatactgcaaagatacacattttaaagcaattcacaactcagatgatgatatactttcgcttattcctgttgtgcgtaatactgcaaagatacacattttaaagcaattcacaacgttcccacgtattctaagctaaagtataaggttgtgcgtaatactgcaaagatacacattttaaagcaattcacaacccttatgtttgggcttcaaatggtctcgtagttgtgcgtaatactgcaaagatacacattttaaagcaattcacaacgacgtttgaatttaaccctgctatgttgagttgtgcgtaatactgcaaagatacacattttaaagcaattcacaacgacgaacagggacgtataaatcaaacaagtgttgtgcgtaatactgcaaagatacacattttaaagcaattcacaacatagggcgtccgcacttgccttatcttacgttgtgcgtaatactgcaaagatacacattttaaagcaattcacaactttgtagctaaatgctctgctagagcaatggttgtgcgtaatactgcaaagatacacattttaaagcaattcacaacatacgttacgtctgactgttgttatgcttggttgtgcgtaatactgcaaagatacacattttaaagcaattcacaacacttatctctaccaaataccggcgctactagttgtgcgtaatactgcaaagatacacattttaaagcaattcacaacgttcacatactagcctagctaagcgtcaagttgtgcgtaatactgcaaagatacacattttaaagcaattcacaacccttagttttaccataccctgtaggtaattgttgtgcgtaatactgcaaagatacacattttaaagcaattcacaacgatgcagagaatatgaatcttaccaagattgttgtgcgtaatactgcaaagatacacattttaaagcaattcacaacttaccttatgcggtgggtgattatgtacctgttgtgcgtaatactgcaaagatacacattttaaagcaattcacaaccatgggtgatgctggttctatggatttcgggttgtgcgtaatactgcaaagatacacattttaaagcaattcacaacagaattattttcctaaaacatttgcgaaaagttgtgcgtaatactgcaaagatacacattttaaagcaattcacaaccccctttaactcttttatctgtatagttacgttgtgcgtaatactgcaaagatacacattttaaagcaattcacaacatggctgggtcatactcctcttcccattcgttgtgcgtaatactgcaaagatacacattttaaagcaattcacaacttaccaccgtcagtatcaatcaccttcttgttgtgcgtaatactgcaaagatacacattttaaagcaattcacaactgtgttcaacattacaagtttcaagacgctgttgtgcgtaatactgcaaagatacacattttaaagcaattcacaacggtgcaacagatacagtcccttgtgtattgttgtgcgtaatactgcaaagatacacattttaaagcaattcacaactattctattactacacccttgcccagactagttgtgcgtaatactgcaaagatacacattttaaagcaattcacaacaaattataatgttatactgttggcttatagttgtgcgtaatactgcaaagatacacattttaaagcaattcacaacgataatattgataagaataataagaataaggttgtgcgtaatactgcaaagatacacattttaaagcaattcacaacatgctgtatctccttttatataaggcatagttgtgcgtaatactgcaaagatacacattttaaagcaattcacaacgataacactgataagcgtaacaaaaataaggttgtgcgtaatactgcaaagatacacattttaaagcaattcacaacttacttcctgttggttgctgggaagttaatgttgtgcgtaatactgcaaagatacacattttaaagcaattcacaacttacaaaatggaacgccgtcaagtgctttggttgtgcgtaatactgcaaagatacacattttaaagcaattcacaacatcgcttacgagggtgtgagataccacaatgttgtgcgtaatactgcaaagatacacattttaaagcaattcacaacacattcacgggtatagagttaagagacgaggttgtgcgtaatactgcaaagatacacattttaaagcaattcacaacattgggctcatcgttctttgatttaatgacgttgtgcgtaatactgcaaagatacacattttaaagcaattcacaacattatgtgtattcatagtatcgttccacaagttgtgcgtaatactgcaaagatacacattttaaagcaattcacaacatcgtactaccacaactaagtaaggaagacgttgtgcgtaatactgcaaagatacacattttaaagcaattcacaacttagctttagatgtcgtatttagagtatttgttgtgcgtaatactgcaaagatacacattttaaagcaattcacaactccagttgatgttgttgaaaaggctttaacgttgtgcgtaatactgcaaagatacacattttaaagcaattcacaacttagtagttaagtcatcctgtatctgtgtgttgtgcgtaatactgcaaagatacacattttaaagcaattcacaactagggggcagcatagcccccacagcgtccagttgtgcgtaatactgcaaagatacacattttaaagcaattcacaactgttcctcttgcacgtctgaaagagataagttgtgcgtaatactgcaaagatacacattttaaagcaattcacaacttaaagataagaaatagatttttggtcattgttgtgcgtaatactgcaaagatacacattttaaagcaattcacaacgaattttgacatattaagtgttgaagccgtgttgtgcgtaatactgcaaagatacacattttaaagcaattcacaacattgggctcatgcgttctttggctttttgcgttgtgcgtaatactgcaaagatacacattttaaagcaattcacaacattgcaacgacacattagtcggcttatacgttgtgcgtaatactgcaaagatacacattttaaagcaattcacaacgcagaaactatatctatgctactggtcgtgttgtgcgtaatactgcaaagatacacattttaaagcaattcacaacactgactattgaaatacctttgtattatggttgtgcgtaatactgcaaagatacacattttaaagcaattcacaacgtcatggtcttaattaacttttgagttatggttgtgcgtaatactgcaaagatacacattttaaagcaattcacaacttatcagtttaatatgggttacactccaactgttgtgcgtaatactgcaaagatacacattttaaagcaattcacaaccaaacttatgatttacatcttcgtaaaggtgttgtgcgtaatactgcaaagatacacattttaaagcaattcacaactgtcaggatgacgaagaatcgttgcgcttcgttgtgcgtaatactgcaaagatacacattttaaagcaattcacaacataatggacctactttttcatcagttatacgttgtgcgtaatactgcaaagatacacattttaaagcaattcacaacttatgggagttacgggcgtttcctttttgagttgtgcgtaatactgcaaagatacacattttaaagcaattcacaaccatgttaacacatcctatcgtaactatatgttgtgcgtaatactgcaaagatacacattttaaagcaattcacaacttagctttagatgtgttctttagagtattgttgtgcgtaatactgcaaagatacacattttaaagcaattcacaacatagccgtccttatagtttacctgaacagcgttgtgcgtaatactgcaaagatacacattttaaagcaattcacaacattagcattatatttcaattacgaggcatgttgtgcgtaatactgcaaagatacacattttaaagcaattcacaactcttaagatagattatttataaacataaaagttgtgcgtaatactgcaaagatacacattttaaagcaattcacaactcaagtggtaaggacatttgaggtgagcaggttgtgcgtaatactgcaaagatacacattttaaagcaattcacaacctcactgcgttaatggacgtttcgcactatgttgtgcgtaatactgcaaagatacacattttaaagcaattcacaacgcagccgacttgcagcctgtcaatggtaagttgtgcgtaatactgcaaagatacacattttaaagcaattcacaacataaataaaataacgaatgaaacaatcatgttgtgcgtaatactgcaaagatacacattttaaagcaattcacaaccaaactattttgcatcagcacttctgatggttgtgcgtaatactgcaaagatacacattttaaggtaaatcacaacttgcttttattaaatcatcgatttttatgttctttctatgttattctatacctcttatgaaatcttttgcatttagaaatttgttgctccaagaaataattgaatatttacaatcgaatgctctgattctatgtaggattgtatttccatccgtgatgaggtttttttattagagctttttgaatgctcttactatcaaatagtagctattgtttttctatcttgatactcttttataatattgaactatagtcttatgtcttttttcgttttaccaatcacggcataaaataaacttgctgtcactcctgtcatttatgctctatacttaacttgttagtttagagcaagataaatgaacttttaaaagtgacagcaaattaaaataaaacaatctctcgtgtatgtaattctttctcttacatgagaagtcttatcacactatagctaatcgagatatttcaatgactcgttcttcgtttaatttgttcgtgtttttttcctacttggttatttgctcccctacgctttcttacctgacacgaggacgatgatgatgaggatacctgcgacgaagatgaagaggaaagaacctaatgctcctgcatagattcggccagtgtgtacctctaaggcaagactccaaagagacattggtttgttcttgaactcttcgggttgttttgcaaatgatgaacctaagtaataagttgctatacactccttgtttttgaagtcagaactaaagcccgtaatcatttgttcgctcggtgcagtaccaggaatactaggattgaaagctattatgtcatcgtatggggcaacttcgttataatctctgttccaaaggaaaagaccatcaaaggacccgacaacccatgtgttgtcatttatacgttgccatacgttctgtcccatgacgcttacagggggtgcatactcaatagctgttggtttgtcagcaagtgttttgagtgagaaaaatccttcagaagttgagatgagccaatcgtgcttctggtcatcataacgtatcattctcagtttgtcattccaagcgttgtcgctactcaaggttgtgcccggcaatggttttgtactattctttgcgagtaaaatcatgagaggtggacgtaaggcccagccagtgatcgcaaggaagagtgtaatatagaaggtgtaaactccaattttattatgccacacaagcaccgatgtacttttatgacggagccagaaccatatacctgttacacaaagtaagatgaggataataccgattccatccacgagtagttttccaatggttccgaataatgcgccactgtgtagaagccatatttgacggaagagtgaaaccttgccttcatagccgttaggggattgaagtgtaagacaagtaaatgtcttgtaaggtgtcttggcataataaaggtgggaacgagaaagcacaatcaacgtatcaccatgcgtgatgatatcagtcaataattcgtcattctcttgtagaggtaaagacaccggttgccattgtgagttcttacctaatttataaagccccatgacgctggctgcaaaaatatcatttttaggagttttcacaacccctcttatctggcgataatcagcacctgaaggcagtccttggttatattctgtgaactttgatgccgctgagtccgtttgaatgacaccagccgcaccatagataattactttgttatgcttatctgcatcattataacgcagagttccacgcagtaacccattgttccattgttcaaaagaatagcgcgctggtaggatggcacgacttacgttgatatctgcgaaggattggcgatgattgagaattattcctgataagcagaacattaccaaaaagaatgtaatgattattccaatccatttgtgatatttacgccatgttttgcgtttcatattttgttgtttgtgatatgttgttatttactcagtttttaaagtgagtacaaacttacaaaaaaaaatctatattttaggtctcgtaaacgaacatttttcgacgatatgattttgaatttacgcacaaatagtttatatccttagtgacaagtgttctatttattccttacgaaaaacttgcagcattgggattttgttgctatcttcgcagacaagaacgctatcattgacatccgaataagaatcaaaacatgggaagaaataaattcgcaaaagacgagataaaagaaataaaaaaactactccgactgaagaatgcgggaaatcgtgcgaagcagaaacttgttcgtcatgacctccgtaccatctacgagtttaatatatctgatttcaatgaacccggtaaagcttttggcgaggaggaattgcaggacgctattgaacgtggcgctattcagattcttgacgatgccacaattgccgacatgaaagcaaagcgtgctcgtgacgaggctcgtgacgaggctgcacgtgagcagcaagctattgaggcaggtgagatgacagattggaaagctgttgctaaagagtgggaaaagtgggagcaatcgcagaataactaatgtgcccgattattttgtggcattctttttgaatattcaatgaaataagaggaatccctatttggatgcgtacgggcttttagagcaatgagaggtccttttttagtgacttcatttaagattgataaaataataaaacaatgacattatatccaaaactcattacagatgcactggagaaagtaatttatccaggaacaaagaagaatattattgaaagtgagatgttggcagacacacccagcatcaatggtaataaagttagtttcacgcttattttcccacgtgagaccgatccttttctcaaatctactataaaggccgctgaggcccagatacactattctgttggtaaggaggttgaagtaactatcaccacagaatttaagaatgctccacgtcctgaggtcggtaagttattgccacaggtgaagaatatcattgcagtaagttctggtaaaggtggagtagggaagagtaccgtctctgctaatcttgctatagccttagcacgtcttggctataaggttggtttgctggatacagatatctttggtccaagtatgccaaagatgtttggtgttgaggatgcacgtccatacggagtagaaaaagatggtcgtcagctcatcgaaccagtagagaaatatggtgtaaagctactttctatcggtttctttgtcaacccagacacagcaacgctttggcgtggtggtatggctacctcagcactcaagcaactcattgctgatgcagactggggcgagttagattactttattctcgatactcctcctggtacgagcgatattcatctgaccctcatgcagacgcttgctattacaggtgcggtgattgtatcaacgccacagaatgtagctctggctgatg

SEQ ID NO: 4163 - DNA, 22772 bp, synthetic construct
  misc_feature 1..22772: note = Synthetic
  source 1..22772: mol_type = other DNA
cagcaatgggtatttggaggcctaactgcccttcaatcacctctcgaacaacgctcatttgacctttaccaccatcggtgatgatgaggtcgggtagtggcttttcctcgtcaatcatacgcttataacgtctataaacaacctcttgcatcgacgcatagtcatcaggtccaaccacggttttgatgttatacttgcgatagtcgctcttcgagggcttcattcctttgaaaaccacacagcctgccactgcatttgttccgctaatgttcgagttatcgaagcattcgatgtgatagggcagtttagaaagctgcaaatggttctgcaattctttcattattcgggtgtatttttgctcaggattgagcttatcggcttgcttcatgcggtcgaacttatactgctttccgttcatttccgacagctctaaaagcttctttttgtcgcctctttgtggcacggtgaagtaggcgttggtcaattgccaatctatttcaaatggaacgataatctcttgcgcctcactggcaaaacgattgcgaatttcgaggattgcactcaccaaaagttcttcgtttgtttcgttcaccttttgcttgtattcgtaggtgaaactctgattaatcgtgccatttttaacgtgaatataattgataaaagctgttttttcgttgtcgtgatgcgtgatactaaacacgtctacattgcgtatggtgtgactaactacctcgcttttggcaacgaacgaggcaattaattcgtattgctttttaagctcttgggcttcttcaaaacgcatttcttgagccaactgcatcatcttttcgtagagagcaacactggttttgcgcacgtttcctttgagtatttctttggcttgggcaatcttttcgttataatcttccatagtctgcttgccaatacagggtcctaagcagttgtgaatgtgatactctaagcacgatttaaacttgttattggcgatgccttgcggtgtaagtggaagctgacagctacggggtttgtagatcttggtaatgagttctaaaagcgatttaagagcggttacgttggtgaaaggaccaaaatagctgcctgttttgtgattgatggtgcgggttttgaatattcgaggaaagtattcgtgcgtaacacaaatactggggtaggtctttccgtctttaagtagaacgttatagcgtggtgtgtatttcttaattaagctgttttcgagtagtagtgcgtcttcttctgtgttaacaacggtataggaaatgttgtgaattttacttacaagtacctttgttttaaatctatctacttctttgtggaaatacgaggacacacgacttttgaggcgtttcgcctttcctacgtatataataacgttgttttcatcgtagaattggtaactacctggtttctcaggcatgctttgtacgatgccttttaatttacttatgcgttcttcttttttatcctttgtcatgcactataatgcctttagaatcagtatttctatgcttttgtgtttcacgtgaaacttttatgtgtaataaaagcagtgtggtaaagtttcacatgttgttcatcttgtcgatgaaaggtttgtttctttcttgtgaaagacgagaaaggggtggggaataataaaaggattgaatggcgccttatgtaagtttggcaaaccgattcaatcctttcgtatcttaaagttttagtaatgtggtaatttcgatgtctttatcgaatacctctctaccattaagtccttcgtctaagagctcgatgatgaaattgcaataaatctttttaggtttgaattttctaacaagatcgcatgcagctttcattgttccgcctgtagcaagcaagtcatcgtgaagcaaaaccacgtcgccttcttctattgcgtctttatgtatctcgatagtatcgatgccatattcctttgcatagctttcttgtacagtttcacaaggtagctttccaggctttctacatagcgcaataccagcgtttagtttgatggcaagagccgaactcataacaaagccacggctttcgatgccaactaccttagtaatgcctttgtctttgtaaagatcatacatttcatcggcaattgtctttaagcactctgcatttttaaatagggtggtaacatctctaaagttcacaccttttataggccaatctggaattgaacgcagattgtctaataatagtttgttgttcattatcaaataattatattgttatttcttattcttttgtttcacgtgaaacttatgtttgtcttgcgatagttccacgtttgtttctttcttatcttgcggattcatcgaataaagttgtcgatgtattcgaataatgttgtggttgtattatcttcccaataagataaggagcacgttgatatcgcttggagatacaccaggaattctacttgcctctgctaacgtttcaggttgaatcttttcgagcttctgtcttccctctgtagatatctcgtgaagttgcgcatagttaaatcttcctttgattctgatatcttctaaacgcctcattttatcggcaatgattcgctctctttcgatatatcctctatatttaattcttatttctgctgcttcggtgatttcttcctttctgttgggaacgtcttttaaaatctcgttcaaatggggaataacttcagcaaggttgctcatggtgagttgaggacgagcaattaaatctgaaatcttaatagaagagtggataggagttgttcccaaacgttctaaacttgcattgatatctttgggttttatactggtttcatcgcagaattgtatgattttagaaatacaatcttctttctgtttccaccaatcgtaacgctctttggtagcaatacccaattcaaatgccttagaagttaatctgtagtcggcatcatcttggcgcaataagattctgtattctgctcttgaagtaaacatacgataaggttcgtcgacacctttagtggttaaatcgtcgatgagaacgccaatatagctttcgtctcgtttcataacaaactccttatcgttgtagaaacattttagagctgcattgatacctgcaaccaaaccttgacctgctgcctcttcgtatccagtagttccgtttacttgtccagcgaagtaaagtccttttaccactttactttcaagagtatgtttaagctgagtggggtcgaaataatcgtattcgatggcgtaacctgggcgataaatcttggcatctcttagcgcagggatcttatgaagggcgtttaactgcacctcgaaaggcatacttgaagagaaaccattgaggtacatctcgttggtgtcggtgccttcgggctctaagaataaaggatgtttgtctttatcggggaatgttacgagtttggtttcaatagaagggcagtatcttggacctgtactttgaatctgtccgttaaacaatggtgagtcggcaatacccttgttgagctccatgtgtgcttcgggggtagtataaaaagtccaacatggcaattgtttgagtggcttatgaagattcatatagctgaactgatggaagtcgaagtcgccatcttgtttctccatttcatcgaaatgtaccgaacgtttatcgattcttacaggtgttcctgttttcattcgatcagaacgaatacccaattggttgatacattcggtgagatggggtacagcaggctctgcacatctacctccagggaaggttcttcgtccgatgtgcattaagccattgaggaaggttcctgcagtgataatgacacattttgcggtgaattcaactccccaaacggttcttacgccaacaatctcattgtttttaacgatcaactcgtctacttggtcttgccaaatgtcgaggttctctgttttatctaaagtctctttccatttagttataaacttttctcggtcgcattgtgcacgtggactccacaccgcggggccttttccacggttcaacattctgaattgaatagccgttgcgtcggtaattagacccatttgtccgcctaatgcgtcgacttctctaactatttggcctttcgcaataccaccaatagcggggttacagctcatttgtccaatcttattcatgtcgatagtgattagacaagtcttagctcccatgttggaagcagcggttgctgcctcgttaccagcatgtcctccgcccacaacaatcacatcatatttgaagttcattcttgttattttggttttatccttaaatatgttctcgtataatatataaataggtgtgagtctttcaacgttcttttcaaatgtaaaagaaaccaacctctccttcagtttttaatctgttgttttatacgcaatatccttgtgttatgtaataaataaaacatcttcttatagaagcttaaaaacattcgaacacaaaagtacagaataaaattggatttttagtcaaaagctttgatttatcatcaaaatatagtatttttgcaagcggttttacgattcatatacctacaaatgggggtgctgtgaagcgtagaattgcaacttaaacatcaggtttaagcttcaagaagaatatattctaacaattaaataattaattttcagtcaattatgtggttatttaaatcctctattggtagaaaagtgataatgtcagtaacaggcattgcgcttattctatttttgacattccacatgtcgatgaatgttgttgctttgttttcagaggcaggttacaacatgatttgtcatttccttggtgctaactggtatgctgttgtggctacaatgggtcttgcaggtcttgcaatgttgcacattgtgtatgcttttatcttgacagcacaaaacagaagagcacgaggcagcgagcgttatgctgttgttgacaaaccaaagaaagtggagtgggcttctcaaaacatgttagttttaggtattattattcttcttggcctattactacacttgtttaacttctggtataacatgatgtttgcagaaattattggtgttgaatttgctcattctccatcagatggtttcgcatacattagagacacattcgcaaatccagtttacgttgtgttgtatgttatttggatagtggcaatctggttgcacctttctcatggattctggagtgcaatgcacaccttaggtattaatggtaaggtttggtttaagcgttggcaagctatcggcttggtatattctaccatcttaatgttaggattcctcgttgtagttcttgcgtttgcgttcggctgtgcgcctagcttatgctgccattaattcagtgtgtaagaatttaattactttcttttaagatttaaagattatgactaatcagataaattcaaagattccagaaggacctatagcagagaaatggaccaattataaagcacatcaacgtttggttaacccaaagaataaattaaagttagatgtgattgtcgtaggaacaggattggctggagctagtgcagctgcatctcttggcgagatgggctttaatgttcttaacttttgtatacaagattcacctcgtcgtgcgcactctattgcagcgcaaggaggtatcaatgccgctaaaaactatcagaatgatggtgactcagtttatcgtcttttctacgatacagttaaaggtggcgattatagagcacgtgaagcaaacgtttatcgtttagcagaagtgtcaaatagtatcatcgatcagtgcgtagctcaaggtgttccttttgctcgtgagtatggtggtatgttagcaaaccgttcttttggtggagctcaagtaagtagaacattctacgcaaaaggacaaactggacagcaattgttgcttggtgcttactcagcgcttagctgtcaggtgaatgcaggaaaggtaaagctctacactcgttatgagatggaagacgtagttcttgttgatggccgtgcaagaggtatcattgcaaagaacttagttacaggtaaactagagcgtttctctgcaaatgccgttgtaatagcaacaggaggatatggtaatgcttatttcctttctaccaatgcgatgggttgtaactgtacagcagcaatccaatgctatcgtaagggagcttactttgcaaatccatcatacgttcaaattcacccaacatgtattccagtacacggtgataagcaatcaaagcttaccttgatgtctgaatctttgcgtaatgacggacgtatttgggttccaaagaagatcgaagacgctaaagctttgcaagcaggtacaaagaaaggctctgacattccagaagaagaccgtgactattatcttgaacgtcgctatccagcattcggaaacttggttcctcgtgacgtagcatctcgtgctgctaaagagcgttgcgataagggattcggtgtaaacaacacaggtcttgctgtattcctcgacttctctgagagtattgaacgcttgggagtagatgccattctacaacgttatggtaacttattcgatatgtacgaagaaattacagacgttaatccaggcgaattagcaaacgaaataaacggtgttaagtattataatccaatgatgatctatcctgcaatccactatacaatgggtggaatctgggttgattacgagctaatgacttcaatcgaaggcttgttcgcaattggagagtgtaacttctcagaccacggagcaaaccgcttaggtgcttcagcgttgatgcaaggtcttgcagacggttacttcgtacttccatacaccatccaaaactatcttgcagatcaagcaatttggcctcgtttatctacagatcttcctgaattcgaagaagctgagcgtggagttcaagcagaaatcgatcgcctaatgggcattcaaggaaagcgttcagtagactcaatccacaaagaacttggtcatatcatgtgggaacacgtaggaatgggccgtacagcagaaggacttcgtgaaggtattgcaaagatgaaagaactaagaaaagagttcgataccaacctattcatacctggaagcaaagaaggacttaacgtagagctagacaaagccattcaccttcgtgactttatcatcatgggagaacttgaagcatacgacgctctttctcgtaatgaaagctgtggtggacacttccgtgaagaatatcagaccgaagaaggagaagctaagcgtgatgacgagaactatttctatgtaggatgctggaaatataatggcagcgatacagcagaaccagagcttatcaaagagccattagagtatgaagcaattaaagttcaaacacgtaactataagtcgtaattaagttaacgagtgcatcttatgtcgacagctcacaaacaatcgagcacagcagtaatgtaacagccacctaacggggcagttcctactcaagtcgacataacaactctaaacgaataagctataaaacccatatggagaaaaatataagtttcacgctaaaagtatggcgtcagaatggtcctaaggcaaaaggacacttcgattcattcgaaatgaaggacatccctacagatacttcattcctcgaaatgctcgacatcttgaacgagcaactcatcgaagaaggtaaagaaccatttgtgttcgaccacgattgtagagaaggtatctgcggtatgtgttcactttacatcaatggacacccacacggaccagctacaggagcaacaacttgccaattatacatgcgccgtttcaatgatggagacgtaataaccgtagagccatggcgttctgctgcattcccagtaattaaggactgtatggtagatcgtggtgctttcgataagattatacaagcaggtggatacgtaacagtacgtacaggccaaccacaagatgcaaacagcatcctaattccaaagcaagatgccgacgaagcaatggattgcgcaacatgtatcggttgtggtgcttgcgttgcagcatgtaaaaacggttctgcaatgttgtttgtaagttctaaggtaagtcaacttgcacttcttccacaaggtaaaccagaagctgcacgtcgtgcaaaggcaatgatgttgaagatggaagaactcggattcggtaactgtacaaacactcaagcatgcgaagcagagtgtccaaagaacgaatctattgccaatatcgctcgtctaaaccgtgagttcatcatggcaaagttaaacgactaatattgctttaattaaaatagactaaggatgcctgtctgagaaagataggtgtcctttttcattttacgcccttttgttcttttattaggtagaacatcgagcctaaagacaccgccccgcatccttatttatcattccgttacccattgttgtagcagaaagatgaggtaaagacccctcacaaagccccaatagctgtatttcttctatattttcgctgtgtttcattaaaacacctcgccccttacttttccctatttttattattttagcgctttagaaagagtttaatgaactatattattaatgccttgcaataaaaaactatacaaaaaagctctctaacgacctgaaatcatgagagagcaatatatttatatgatgtgattttctatgccactaagcgccaaataaaggcgatgagcatcgtaacaacaatgctaaaaacaagctttgttttgttctcccttgtatgggttttctttttcgcctttgtagtatctgcaaagctccattaatttttctctatcatccatgtttctttttacaatttatattgtcaacttcagtagtgtctattattatcttttctcctttagcattgcattctttaatttgtttgttagtatcctttattccttctataatctcttcataaagatcctcgtcaacaccgagcttttttgcctcctccttacttatgtttaggtaaaatacactgtctttataaaaggcataatctttcagcgcaagggcagcagctcgtttaattcttatttccttaggcatttgtcttagttcttcaacactaagcaatagtgcctttgcctcttctgcctcagaagcatatacacgatttcttacgctattgtttgtttgcgatggagagtcttttttagcgcacgaagatacaatcaatatagccaaaagacttaaaggaataagttttagaaaatttttgtccatctgttttatgtttaataggttaataaaatggtatgataaagagcatgaataaaagaaaggaaaattctctttttcagcttaataagtaatagtctttttgcaaatataggtaaaaaaataaatgcagatattgtttttaggcctatttaacgcaggcacttctcgttttattttatgtcttcacagaacaattcaaaccgcatttgagtggaagaataacgacatttggatttgttcttttttatttcttatccttgttctattccataaaagcccgtaaagatagtttaaagaagctttaatcccttgtttccttcctttgtgtcatctccttatttttctataaacagcctcttgtgcccaaaagcattgcaattgtgttccaaaatcattgcaattacacaccaatctcaccgcttttatgtactaattgcattgagtttaaggcagacttattttacagacggtttatacatcttatagctgaaaaatagaaagagccaattgtaggggagttgatgatagaaaggtgcgttaaaaatattgtcttaatgtatttttatttaaaatattttcttacttttgtaaaagacaacacttaatgaaagatatagggaataactataagctatatataaaaacagtgctcccacggttgtccgcaggagcaagaaatcttcggcttatagccttgttgtgaaaagtcttcacatgtatatctgtgtgcaaatataaaactattatttgaaaaaacaaataaaaaccttaaaaatatgacgcaaaaaatttttggaatagaccttggaacgaactctattggtacttctgtacgaaatactgacctcggaaataacctagtagaccagttagaattcttttcttctgacatttttaaagcgagtgttaatagagaaggagtaaatggaggaaaaggaagagaatattctttagcaagctctcggtctgcaaaacgtagaaaacgtaggctatatgagcatcgtagatataagttgtgggctacactcgacttgcttatcaaaaacaatttgtgtcctatgacgccagaatcgttagagcaatggcgtacttatgataagaaaaagaaacttttcagacaatatcctattgaggataaagcatttcattcgtggataattcttgattttaatagtgatggaaagccagattattctagtccatatcagttgagaagagagttggtttcagttcaattagactttaatcaagctatcgaccgatataaattaggacgagctttgtatcacattgcgcaacatagaggttttaaaagtagtaaaggtgaaaccattgcagagcaagaaaagcaagaagacgacagcaagaaaaataagaataacgctcttatagaagaacatgttgatgcaacaaaggcatctgaagaaaagcactcaaagggactttcaacctatatgcaagagcataatctgaaaactgttggtgccgcttttgctcaactagaagacgaaggaatacgaattcgcaataatagtgaatataaagcaatacgttcgcaacatcaagatgagattaaagaaatatttaaatttcagaaaggattatctagccaaacacaattattagatactcttataagcgaaaagcaaggtattggaaccattttttataagcgtcctttgtgttctcagcgtggaaatgtgggcaaatgtacacttgaaccaaacaaaccacgttgtcctataggtcatcctttatttgaaaaattccgtgcttggacgtttattaataatataaaagcaaagtcgcctgatgcagattctgcagaaccactgcctatggatatgaggataaatatctataataaactcttcttgtcaagagttaaggcagattttaaattcgaagaaattaggaactttattgagaaacaatggagagtggccctttctaaggacgataaaacaattaattatagagacgatacgagtgtggcaggttgcccaataacagctcgtatgataaaagttctaggtgaagactgggagaaattccaggttttaggaacgaaagagcgacaaacacaaggtaaatctaataatgcattgcaccaggtttgctacacagcagaggatatctggcatttttgctatgatgcagaagactctggtaaggtgcgtacttttgctgaggaaacattgggttgggacgagaaaaaggctgcagaattagtgcgtctttggtcggcaattcctcaaggatatgcaatgttgagtcaaaaagccattcgaaatattaatcgaatgttgttgtttggcttgaaatattcagacgcagtgttgcttgctaagcttcccgatatcttagaattgtcggatgaagatattcaaactatcatcaaaaaagcacaacaactagaagaagttgtaaacgaagagaaaagaattggcaacattgtcaattcgcttatcgctaactataaagctgaaagcctagaggatcgctttgctgatcacaattatgaataccagctagatgagtcagatgaaagagagattattaaacacatagagaataatataggaaaacaacgttgggaattgatggatgccgacgagcaaatctcaatattagaaggggttagaagcggatatcaagcattctttgctaggcataagcgcacatttgttgagcttccacagctaggcaaacgattagtagagttgctctcaaaagaatatccttctgttacagagaagcaatgggagcgtttgtatcatccttctcagatagctatttatcgcccaatattgctagataagtcagacgagaagaggcgtttgggcaatccagatataggcgcaataaagaatccaacagtgatgcgaacactcaataacctacgaaggagagtgaatcagttgttagatgatggagtattgatgcctgatgaaacgagagttgtggtggaaacagctcgtgacttgaataatgcgaatgaaaaatgggctttagaaaagtatcaagagataaggagaaaggagaatgacaaaatcaaaaagatcttagaagagttctatccacaatttagcaacatcacaagtacagatgtagacaaagcccgttatgttatagagcaatgcgaagaagataattatacgtctaaaaaagaaagcggaacttatagtaagaatattcaaaagtataagtattggttagaacaaggaggacaatgtctatacacaggacgaattattagcttgtcaaatcttttcgattctaatgcattcgatctcgaacacaccattccagcaagtgttagttttgacaattcagaccaaaatatgacactatgtgaggcacattataatcgtttcattaaaaaaaataatattccaacggcaatgccgaattacgaagaggatgttacaatcgatggaaagctatacactgcgataaaacctagattggaaaaatggaaaaaacgcataaaagactctctaaaaatgttgaatattggagaactcaagcacgacgtacgcaaatgaaagatcataaagatgaatgcacaaaagagaaacttctttggcaaatggagttgcaatattggcgagataagttgcaacgttttaccattcttgaggttaccgatggttttaaaaatagtcaattggtagacacccgcatcatcactcgacatgcaattttatatctaaagagtgtttttaagaaagtagaggtgcagagaggaagcacaactgcagagttccgaaagatactaggattgcaaagtgtagaggaaaagaaagatcgtacattgcactcgcatcatgctatcgatgcaactgttttaacaactatacctgctgcagctaaaagagatcgtattcttgaactcttttacaaagtgcaagagaaggaaagaatacttaaaaattactctggagatgctcctataggtttaaaacaagatttagaaggcttgcaggaaaagcttaaaaaagaggtagaggcttgtaaacttggaaacaaactaggacaacttggtagctttattaatgagaatattattatcagtcataatgtaaaagaccaaactttaaccccttctcgcaaacgattgaggagaagaggacgtgtggtttataataaaaaaagagaaaatgataatgataagaatcctatttggcaaacaggagataccttaagaggagagattcataaagaaagttactatgctgctatcacgcaatacgcaaaagataaagacggaaatgttctccttaataatggaaaacctaagatagatcccacgatttggtatgtaatacatcgagaacttacatattttgatgattggaaacctcttgaaaaggtaattgtagataagaatctttataaattgatgaaagaacagttcccagatggaacttcttttaaaaaagcttgcgagcaaggtttctacatgattaagaagggaaaggacaaagaacataatataaagactcacagaataagacatgttagatgctattcagatgttaaaggggcattgaaaataaaagaacaaaccaataaatcaacaaaggaatataagcaatatttctatgctgcagttggtgatttatacacaatgtgttgttataccaatggaaaaaataaggaatatagggtatatcgtttatatgatattgcacaacatcgtaagagtggaatagaagatatccctgaattcattacagatgaaaagggtaatcgactcgagtgggcttataggttgcgtagtggtgatatgatattgctatacgaaaatactccagaagagttgtatgacatggatcctgtgaacctaaaacaaagattatataaggttgatagatttgaaagtaaaggccctacgatatgtatgacacatcatttgattgctaatggagaaagaggaaagtcaataaaagattataataaaatgccaccaacggctcgatgtagcgtgaatactttaaaattcttgataatgggtgagcataacgacttcgttataaagggtaataatattatattcaatcatcgatgattaagaaaacattatactttggcaatccttcttatctctcacttcgtaatgatcagttggttattcaacaaaaagtgggagagaaggaagcgccaggtataataaagaaaggcatagttagaactattcctatcgaagatataggtataatggtgcttgatcatgcagatatcaccattacacaaggtgttttagctgcattactcgagaataccgttgccgttataacatgtgatgaagagcaaactcttaagggaatgttgctccctttagtaggaaatacattacatcaagaacgctttcgcagtcaattagaagtaaatatccctgtaaacaagcagttatggcaacagacgatcaaagcaaaaatagaaaatcaagccttttgtttgcaacgaaatacatcaaaaacagcttctccacttcatgtgttagcacgtagtgtgaagagtgatgacgcagataataacgaagaacaagcagatgtttattattgggagtacatctttccagagtgtctaaacttcataagaagtgataaagattcacccattaacgaacttcttaattatggatacaccatcttgcgtgcagttattgctcgtgcgttgataggaagtggattgctacctgtgtgtggaatccatcgtcgtaatcacaataatgattattccttagcagatgatattatggaaccttattgcccatttgtagacgattgggtaataaaaacaattcaaaagttaggaaatcctacagaattaactctagactataagcgagaaatgttgcaaatacccgttattgatgtttcaatagcaggcaaacgcagtcctttaatgattgctgcagcacaaacagcagcaagtcttgcaaagtgttatagtggcgaaagccgtaaaatatattatccttcttttccttaatgcaaagattaagcgagtatagaattatgtgggtaatggttcttttcgatcttccaaccaccaacttaaaagaaaagcgggactatattcttttccgaaagaatttagtaaaagatggttttatcatgtttcagtattctatttacgtccgacattgtgccagtagagagaatgctgcagtgcatgtgaaacgtgtaaaatcctttattcctcgctcaggagaggtttgtattattgttataacggataaacaatttggtgaaatagagatatttagtagctctgaaccgcagaagccgaacacacctggagtgcaacttgaattattttagaatataaaaaaagagtcctaatattaatattgggactcttttttgttgcaatttttattttacataaacataagatatattattgaagttcaattaaatatatcattcgagttgcttatgatattgcaaagatatacatttggaagcaaatcacaacgccgtcgtgtgacggaatagcgttagcgtagttgcttatgatattgcaaagatatacatttggaagcaaatcacaactaatgtccctcttgttttagatgattatgggttgcttatgatattgcaaagatatacatttggaagcaaatcacaacaagcaaatggtttaggtctttccagacaatgttgcttatgatattgcaaagatatacatttggaagcaaatcacaaccataccaaggtcttcaaattcaggaataagttgcttatgatattgcaaagatatacatttggaagcaaatcacaacaggctatcttcatagcaggaccatcacaatgttgcttatgatattgcaaagatatacatttggaagcaaatcacaacgttatgcgtgatgcgtacgaatattacgcagttgcttatgatattgcaaagatatacatttggaagcaaatcacaacatacctttgagccatctctcttagaaacaagttgcttatgatattgcaaagatatacatttggaagcaaatcacaacgcaacgccacaaagagcgaatttaaagcaagttgcttatgatattgcaaagatatacatttggaagcaaatcacaacttataaacgctttccagtcgttgaaataaggttgcttatgatattgcaaagatatacatttggaagcaaatcacaacttataaacgctttccagtcgttgaaataaggttgcttatgatattgcaaagatatacatttggaagcaaatcacaacttattttgcagttacagaaatgaagtcagagttgcttatgatattgcaaagatatacatttggaagcaaatcacaacaacgtggaatatttgcacaagcaattaaaggttgcttatgatattgcaaagatatacatttggaagcaaatcacaacatatggactatagagaggttttagataaaggttgcttatgatattgcaaagatatacatttggaagcaaatcacaacttgggagagcggttttatttctaaaaaatgttgcttatgatattgcaaagataggcaactttagtcaaatagcaacaccataatacatttttattattctaatgaaccatagcgagatatgagggtgtaggacgaatgtaaagcctttgtagggcagtgcttgtgtttttcctgtctaaaaccattacaattacagactgaaatcattgcttttatgccccaattccattgcttttattgtccaaaagcagtgagtttacaaagtggaatgaatggagatgaaaaagaactcaataggagagaaaagcgaatggggtatattgaagccgtgaaagagtaggtttgtggagtgataaaggctgtaacgtgtgagataatagaaaatgaaaaagctctctaacgacctaaaatcattagagagcaaatgtgttatatgatgtaactttctatgccactaagcgccaaataaaggcgatgagcatcgtaacgataatacctaaggagagtggaagcaaggttgcaagggccgtccacttcacacttttcgtctctttgtatatcgtgtagatcgttgtactacatggatgatgcaacaaacagaacaccatcacgcacacagcagtgagcaagttccaaccacctttcaacaaaatcatcttcgtttgctcgtccgttccctccattaatacgcccgatgaggcgaaatctgcagggcctaacaccagcatagtgagcattaatatcgttggtatcacaatctcattggcaggaatagccaagatataagccaaaagaataacgccatttaagcccattagccagccaggagtgtctaagaacgatatcaagtgctgagcaatactaacgtcgcccactgtgatattacaggataaccaaatcaaagcacctgctggagcagcgaaaacaacagcacgccaaagtacgataagcgttcggtctatgaccgaggtgtagagcgtttgccagaattgaggtggacgataaggaggtaattcgaggtggaaggtagacacttcgccacgcaataccgttctcgaaagtacccacgagctaccaaacataaagcctactcccgccaaaacaaccgccatcaccgccaaaagagccaccacattactatattgagagggcactgctgcacctataaagagcgttgcaaggaggatttgagtgggccaacgaccattgcaaagcgaaaagttattggtgataatggcaatgagtcgctctctactactgtcgataatacgagtagaaaccacgcctgctgcattacaaccaaaacccatactcattgtaagagcttgctttccgtgtgctcccgaacgacgaaatagctcgtcaaggttaaacgcaacacgtggaagatagccgaaatcctcgagtaaagtgaatagaggaaagaagatagccattggtggaagcatcacagacacaacccaagccgtagccaaatacacgccatctaccattaaacccgtgaaccattcaggcgaatgcatcgacacaaacaactctctaagatgtggatgtgcaaagccaatcaaaatctcattgagccaagtagaagggtagttagaacctattatcgtgagccaaaacacgcaacagagcagtgccaccatgataggaaagccccaaatgcggtgcgttagaatgcggtcgagcttgatatcgaatggaagtctaccccgttcgttaccttgttgcaccacttctcggcatatttcttcggcttgtgcatagatatcttccatccattggtcgtgaaagttattgccaatttgcaagtgaatacgttctgcaagggcgtttaattcagcgttactaaagcgttcttgcacgctcacatcgccttcaatcagtctaaaagcaatccattcggcattgtgaatgtcaggaaacgtctcctttatcttatccgataattcttgaataagagcgcttgtttgagcaggaaggttgatgcttcgatgaggcttgcacacatattcgcccttcaccacagcccttgtcatagccaaaagctggtctattccttgtccagagcgtgccgatgcacccacaacaggaatgcctaagcgacgtgaaagcgcattgagatttacctcaatcttatttcttttcgcctcatctaacaagttaacgcacagaaccgctttgttggtgatttgcaacacctgcaaaatcatgttcatattgcgctctaatcgggtagcatctgccaccattaccgttacatcaggattgccaaagagaataaagtcacgtgcaatttcttcgtcttcactcgtagatgataatgaataagtaccaggaaggtccacaattcgatatgcatcattttgataaacaaagaacccttcggccttaccaacagtctttccgggccagtttcccgtgtgttgtttcaagccagtaagactgttaaacaccgtacttttacccgtattggggttgcccgccagtgcaattacatatttagattgtattccttgcgctccttttcgttgcaaagtgtgcaggtttgcttgtgcgcaattggcgcaaggactattgtttgctattttgttcatagatgaaattctttagagttgtaattctttcgtaaggtgataaatgagttgatgcgatagaaaaacagagccgttgaggcctgttctattgcacatcgttggccacctttcttacgttttgaatcaaaatgtattgtgcttggtcgtgtcgaagggctattgcagtgcctctaaccacgtaagctacagggttacccatcggacttttcatgtcaatggcaattctactgcctttcacaaagcccaaatccatcagtctacggcgcaatgctccacggcaagaaggcgacaaacccacaatggtagcctgctcgtttgcctgaatagtggttagtcgttgcgcccttgtctcaggcatactctcggcttcttccttcgttacttccaccctgttcatcgcctctagtgcaacaagaggtaggcacatctgctcgccttcgtatttaaacgagaacgaggtgctattgatttcggtgatataaataatcgagtccttggttaatcccaaatccgtaatctgcttaaacagcttattattgtcgtcttctacatgcgtaatccgccaccaagtgtgctctttcaagggcaattcgcaagtgtcgtgaggcatcattgcgagcgattgagtgggaatggggtcgccatgggggtcgaaaagtgggttacctaaaagagaggcaatgcgactttgctcctcatctgatattacatgctccatacgattagccctttggtgccattctgtgggtgcatatccagagtgttcagcaagatattgctcgtaaatgcggtgcgctctaatcaatttaagggcgtttcgcttacccttttcagtaagttctaactgcgcacctgcagtgatttcttttgttaaaacaacagctcctatcaccttttccagttcttcttgagtaacgttcaaaatgcttttctgcttcaaagcatcttcaaacgaaagcgaaccgccaaggttataaagttgttttataaagtcttcttgtagttccttctgtcttttctgagtgcgttcgtttaacgaatagttcttgaaaggcagtaaagtaacaagtttttctatatatttattcatctgtttcgtttactgttatgatgcaaaggtacaaataatatatagagtgcttttatctcacgaactctttttttattataatgtataaataaaagcacagcttttgccttgtaatggcagtgcttttgaggtgtaaaagcattgcaattggttggtaattagatagatattgtaaatggagtgataggcagttggctttcaatgactttgacagagcgtgttaaaaataagaaaattgcattttatcctcataaatgaggaaaaaaacttctatttttatacaacattaaaattaaaatattatatttgccccataaacatattgattagcctatggatatacgtaagctgataaaagtgaatactttgttcacctatcgtcaaaaggttgttggattgataatgtgtggtactattgtaggtttggttctggtgtttgcctattacttgcgtttgcatacttatttaataggagatgacccaggagcttgcgtcaattgtcacatcatgacaccttattatgcaacatgggcgcattcttctcacggaagaaatgcaacgtgtaacgattgtcatgtgccacatcaaaacatcgcaatgaaatacttttttaaaggaaaagacggaatgaaacacgtcgcttactttgttactaactctgaacgtcaagccattagagcagaagaagcatcttcggaagtgataatggacaattgtattagatgtcactcagacttaaatcaagctgcagttaaaacgggacgaatagattatatggctgccaaaagaggtgaaggaatggcttgttgggattgtcatcgtgatgttccacatggcggaatgaactctcttactaagacaccaaatgcagaatcgcaggtacctttgcctccaaatcctgttcccgagtggttacaaaaagctttaaaacgataaacttaaatcctaattaataactcaatagaaaagaatagaatttcatcttcttttgaattaaaaagaaaataaagcgaacaatcattataataacttgaaatctaaaactaaaagaatatggcaaagcaattgaagaaatggaaaggatggatgctttttggtggttccatgctagttgtatttgtgttaggacttatctgtttctctctattagagcgcagagcagaggttgcaagcatttttaataatcgccgagtagcgatgactgactctattgtttcacagaatgagaagttcaaagaggactttcctagagagtatgaaacatgggcaatgaccgaagatacaacgtttcaaagtaagtataacggctcacaagagagagatattctcaaagcttatcccgatattgtaattatttgggctggctattccttctcaagacaatacaatactccacgtggtcaccgtcatgctattgaagatatgcgtaagattttgcgtacaggtaaccccggagtagataatgataccgacatacaaccaggtacttgttggacttgtaagggtccagatgtgccacgtttgatgcgtgaaaagggtgtagcagcattctatggagctaaatggagcgagtggggagaagagaatatgaacacagttggatgctcagattgccacgatgcacgcacaatggaattgaaaccagctcgtccagccttatatgaagcatggcaaagatcaggtaaagacgttaaaaaagcaagtcatcaagaaatgagatcacttgtttgtgcacagtgtcataccgaatattacttcgaaaaagagaaccatcagtatcttaagttcccacaagataagggcttaacatgcgaagatgctgaggcttattacgatagtattggattctatgattatattcatccattgtcaaaggctaagatcttaaaggctcaacaccctggatatgaaatgtttaaacaaggtattcacggacaaagaggtttgagttgtgcagactgtcacatgccttatatgcaacaaggtggtattaaattcaccgatcaccaggtgcaaagtcctcttgcaaagattgatagaacatgccaaacatgccacagacaagatgcagaagagcttcgtcagaacgtttatgaacgtcaaaagaaggtgtatgacttcgctgttaaggtcaataaagaacttgcaaccactcacttagaagcagaattcgcttggaagaagggtgcaactgaaaacgaaatggctactgctcttaacgatattcgcaagagtcaatggcgttgggactattctttagcaagtcatggtgctgcattccacgctccacaagaggtgatgcgactccttgcagaatcaatgtcgtatgctaagagcgctcgtatcgagatcgcaagagtacttgctaagca

SEQ ID NO: 4164 - DNA, 22718 bp, synthetic construct
  source 1..22718: mol_type = other DNA
  misc_feature 1..22718: note = Synthetic
ggtgtcaacacgtggataggtggtgaacttcttctcgtagaggctctgaataagttgtaaggtctgttctgcggaatagccgaacttacggttgcaatccacctgcaaagaagtcaaatcgtagagtcgaggcggtgcttccgttccctttttcttctgaatatcagtcaccgtaaaaggttgcccttcaatagattggagaactgccctaccctcttcttccgtcaagaactctatctgcttgtagatagggcccttactcttgatggtcttgccttcttctgcagcagccttcacttctgcggcatcctctgcttccgcttcctcatcatgagcgatggcggtgaatttggtgtcgcggtagagtgtggagagcacccaactttgtttgggcacaaaactctctatctcctgttgacgacgcacgatcaacgccaaagtgggtgtctgcacacgtccgacagaaagcacctgcttctcctgaccatacttgagcgtgtagagacgtgtggcattcatgccgagtgtccagtcaccgatggcacggcaaagtcctgcctcatagagtgactggtattcaatttggtcttttagattgttgaaaccctcacggatggcttcctctgtcaacgaagaaatccacagacgtttgacaggacattttgccccagccttctgcatcacccaacgctgaatcagttcaccctcttgccctgcatcaccgcagttgatgatactatcagcagcctgcatgagtttctcaatcgtggcaaactgacgcttcaccccgtcatcatccttcagacgaataccgaaacgtgcaggaatcatcggcaggtcccataaatcccaacgcttccaacgctcaaaatactcatggggattcttcagctcgcacaaatgtccgaacgtccaagtgacctgatagccattgccctcaatgtagccttgcttcatgtctttggcgcccaacacgttggcaatgtcacgtgccacactcggtttctccgctatacaaacaatcatgagtgtttctgttggtcgtgcagttccttcgcctgtcgcaagatgtcgctggcaaagatgaagtcttccagtttcttgttggtggcatccatgatttccttgttgctgccctgccattcggcacgtccttcgcagatgaaggtgatgttttcaccaatgcccatcacggagttcatgtcgtgggtgttgacgatggtggtgattttatcctcatgcgtgatgccagcaatgagttcgtcaatcacgatgctcgtcttagggtcaagacctgagttcggttcgtcacagaaaagatatttcggttgcagcacaatggcacgcgcgatagccacacgcttctgcataccacccgaaatctcgccggggaacttgttttcagctccttgcagattgacacgcgccaaacaatcaagtgccctgcgtttgcggtcttcgtaagcatcatacgaaaacatgttcaagggaaacatcacgttgtccaacaccgacatggagtcgaacagtgcagcactctggaaaatcatgcccatctcacggcgaagcaagattttctccttcttcgacaaagacacaaaatcacggtcatcgtagtaaatgcttcccttggtcggtgtgagcaatcccacgatgttcttcatcagcaccgtcttaccgctaccactctgaccaatgatgaggttcacctcaccatcgcggaacgtggcattgatgtcctgaagcacttccctgtcctcaaaactcttgtataagtgttctacttttatcatgtcagcatgtttgtcaagaaaatatcagaaaagagtacaagaatactgctggtcaccacagcatcggtgctcgacttacccacttccacactgccaccttccacggtgtaacccttgtaggcagagacactggtgatgatgaagccataaacaaccgccttgatcataccgcaccagaagaaccattggttgaactgataacggaaaccctcatccagttcaggcacagtggtggttcccatcaacgaggtggcgtatgcacccatgatacccgccgccacactcaatgtaaccaagatgggcatgatggtcatcagccctactatcttaggcagtatgaggtaattagcagaattgacacccatgatgtcaagcgcatcaatctgctgcgtgatgcgcatggtgccaatctccgaagcaatgttcgaccccaccttacccgcaagaatcagacacatgatgctcgatgaaaactccagcaacataatctcacgcgtcgtgtaaccaaccaccatacgtggcatccacggactctgaatgttcaacttgatttgaagacaaatcaccgcaccgatgaagaaggagatgatgagcacgatgccaatcgaattatatcccaattgatacatctccgtgacatattgcttcaagaacattctccatctgtctggctgtgaaagcacacgtcccatcagcatgacatacctacccagatgggttaatccactctttattgaaagcacttctattgtgattttaatgatttataaatggcaaaatcttggcaaaattagtcatttttgttcaaaagaaccgcttttaacatagttttttcttttataaagtgactaatcgccaaacaattcgtacttttgtaactaatttgaattgatatggagctaaataaacaatccataaccaccaacgcgggggatgagaacataccagagttttctgacgaccggaacacactctacactcgtaatcttgtcaagacatatggcaagcgcactgtggcaaacaatgtgtccatcagcgtgcgtcaaggagagattgtaggactgttgggaccgaacggagcaggaaagaccacgtcgttctacatgacgacgggtttggtggtgcccaatagcggacgggtgttcatcaacgatgaggaaatcaccaaagaccccgtttccacccgtgccaagaaaggcgtgggctatttggcacaagaggcaagcgtgttccgcaccatgagcgtggaagacaacatcatgaccgtgctggagatgaaatacaagtccaccgaagagcagcgggagcatctcgaacggttgctcgacgagttcaacctgcagaaagtgcggaagaaccgcggaaatcagctgtcgggaggtgagcgacgacgttgtgagattgcccgttgtcttgccatcgaccccaaattcatcatgcttgacgagccgttcgccggtgtggaccctatcgcagtggaggacattcagtatgtggtgtggaagttgaaagaccgcaacatcggcatcctcatcaccgaccacaacgtgcaggaaaccctctgcatcaccgaccgcgcctatctcctcttcgaagggcgcatcctcttcaaaggcacaccgcccgagctggcaagcaaccccatcgtgaaggagaagtacctcggaagcaattttgtgcttcgtccaaaagacttccagatgattgaagagaaaaagaaaagagagttggaggataattaacacattaatatattaaatgacagaaaccgaaaagttagtgaagtcctgcatcgcaggcatccaagaaaagaagggaaagaaaatacgtgtagtcaacctcgaaggcattgacgatactatcaccaaatatctcgtcatcggcgaaggcaactcgcccagtcaggtggcagccatcacagaatctgtgcgcgatttcgctcgcaaggagcagaatgcgcgtccatcggcattggacggaacaagaaacaacctctgggttgccatcgactttattgatgtagtggtgcatatcttcgtgcccgatgcacgcgagttctacgatgttgacaacctttgggaagacgctgaaatcactgacattccagacattgattgacgaaacatgagtacaaacaacaataacagcaacaacaaactgcaaaagccacgtttcaacttcacgtggctctatatcctgctcattgcaggattggcattcatgatattcacacgccacgacacatcggcttcacgcagtgtcgattacaccaccttcaaggaatttgtgaacaagggatatgtggctgatgtaactgtcaacaaagacaacaacaccctcacccttgccatcgattccaaacacgagaaacaggtctttggtgctgtgagcaagaacaagaaacccgcccgcatcaaggtggagtttggttccattgacaatctggagagttacctcgacgcacagaacaaagagggcaacttcaaaggcaaggtcacttacgaacgcgataacgacttctttacgaatctcttgtggaacttcgcgcccctcgtcatcatcatcctcatttggttctttatcatgagaggaatgggtggcggcggcttcatgggaggtgcgggcaacatcttctccgtaggaaagtcgaaagcgcagctcttcgagaaagacgacaagaactctccgcaaatcaccttcaaggacgtggcaggacaagctggtgccaagcaggaagtgcaggagattgtcgatttcctgaagaagcccgagaaatacaccaacctcggtggtaagattccaaagggagccctcttggtaggtcctcccggaaccggtaagacactgcttgccaaggcagtggcaggcgaagcaggtgtgcccttcttctccatgtctggttccgagtttgtcgagatgttcgtaggtgtgggcgccagccgtgtgcgtgacctcttccagcaggcaaaagccaaagcaccttgcatcatcttcatcgacgagattgacgccattggtcgtgctcgcagcaagaccgcagccatgggaggcaacgacgagcgcgaaagcaccctcaaccagctcctcaccgagatggacggcttcggcaccaacagcggcatcatcatcttggcagccaccaaccgtgctgacatcctcgacggtgccttgctccgtgccggtcgcttcgaccgtcagattcacgttgacctgccagacctcaacgaacgtaaggaaatcttcatggtacacctgaagccattaaagatagacgaaacggtagatgtggctcagttggcacgtcaaacaccaggtttttctggtgccgacatcgccaacgtctgcaacgaggcagccctcatcgcagcccgcaacaacaaagagtgggtggacaagcagtgtttcctcgatgccgttgaccgcatcatcggtggcttggagaaaaagaccaaactgctcaccgcacaagagaagcgcaccattgcccttcacgaggcaggacacgccaccatctcttggttcctcgaatatgccaacccattggtcaaagtcaccatcgtgccacgtggtcaagcccttggcgcagcatggtacatgcccgaagagcgccagatttccaccaaggaagagatactcgacgacatctgtgcgacactcggtggacgtgccgctgaagaactcttcacgggacgcatctccacaggagccatgaacgacttggagaaagtcaccaagcgcgcttacggcatgattgcctatgcaggtatgggcgacaaactgcccaacctctgctactacgacaatcaggagtaccagttcagcaagccttatagcgacaagactgccgaggccatcgacgaagaagtgcgcaccctcattgcaggcgaatatgaacgtgccaagaaagtgcttttggagcacaaggacggtcatgcacaactggcacaaagactcatagaaaaagaagtcatctttgctgaagacctcgaagacatctttggcaagcgcccatggacctcacgcaccgacgaaatcctcgcatccaatgccgaagacgagcagaaggaaggtgagcaaccctccagcggtaccgaccacaagaaagagaacgaggaaatcatccgtcagaagattgtgcaggcagtccttgagaaggcagagaaagccaaagagaacggacaggattccgacaatcccccctccgacaaaccaaccgaaaccgacaaaccaaaagaaacgtgaaaaatctgattatacgtgccatcacgggtgcactattcgtcatcgtccttgtgggcggaatcgtgttcaacccctactctctcctgattctcttcaccgtcatcacagccttgacggtgtgggaattcactacgattgtcaatcgtcacatgcacctgcatgtcaaccgtttcatcaccaccgttgcggcagcctacctctatgtcgccgtgtgggcattcaacaccaacatcatgggcgcggaggtcttcatcccctacctcatttccatcatctacctgttggtgtctgaaatctacttcgaccgccccgaaaacatccagaactggggcatgaccttcatggcacagctctacatcgctctgccattcgcatcgctgaacacactttgtttcatcagcacaccagcaggagtgacctactactactggtacgccctgtcgttgttcatcttcctgtgggcaagcgacaccggcgcctacctgttcggttcatggctgggcaagcaccacctcttcccgcgcatctctcccaagaaatcatgggaaggcagcatcggtggaggcatcacagccattgccgcctcacaaatcattgccagtttcatcccctttgccgagacactctccgacaccacaagccgcctcctgtgggcaggacttgccgtgctcaccgtcattgtcggcacatggggcgacctcgtcgagtcagtgctcaagcgccgtctcggcatcaaagactccggcaacatcctaccagggcatggaggcatgctcgatcgctttgatagttcactgctcgccattcccgcagcagtcgtctatgtctatacaattatgcttaatataattcactaaacaactatgactgaaattcagaaccccactgaggaacctgtagtggaacctacagccgaacctgcaaccgaacccgttgcagcagaagaaacagcagccgttgcagaaactgcaaccgagccagtagccgaagaagccgctgagccagtagccgaagacgctgccgaagagcctcaggcagaaacctcaactacttctttcgccacctacgaaaccgaagcagaagtcgtcaaccgtctccgcgagatttcagaaagcgacgaagaggtcactcgccaagaactcgacagcctcaaaagcaacttctaccgcatccatcgccaagaggcagatgccgcctacaagaagttcatcgaagaaggaggtgcagccgaggagtatgctccagaacccgaccccgaagagaccgccttcaaggaattgatggcagccatccgcgagaagcgtgcagccattgctgccgcactggaacaggaacgcgaggcaaactatcagaagaaactcgaaatcatcgacaagataaaagcgctcacggacaatcccgacgagattaaccgtggctacaacgacttcaaggaacttcagcagcagtggaacgacatcaaggaagtgccagcagaacacgccaccaccctctggaaaacctaccagcaggcagtcgaggcattctacgacaccctcaagctgagcaacgaactccgcgcctacgacttcaagaagaacctggagcgcaagaccgccctctgcgaggcagcagagaaactggcagaagagaccgacatcatcgtcgccttccgcaagttgcagcagctccatcaggactaccgcgagacaggcccagtggcaagcgaactgcgcgaggaaatctggacacgtttcaaagatgcctccaccgtcatcaacaagcgccatcaggaatacttcgaagcccgcaagcagaaggaagaggagaacctcgaaaagaagaccgccatctgcgaaaccatcgaaggcttcgacatcgaaggactgaaaacctttgctgaatggaacgccatctcagagaaaatcaccgccttgcaggcagagtggaaaaccatcggctacgcaccccagaagatgaacaccaaaatcttcgagcgcttccgtgccgcatgcgaccacttcttcacccgcaagaacgaatacttccagtcagtacgcgaaaacctcaaccagaactatgctctcaagctcgaactcgtcgagcaggcagaagcactgaaggacagcaccgactggaaagccaccaccgacgcactcgtcgaactgcagaagaaatggaaggaaatcggcaccgtgcctaagaagtacagcgaccagatttgggagcgcttcaacgcagcctgcgatgccttctttgcagccaagaaagaggcaaacaagggtgcaaacgaagagcagcacgccaacttggagaagaagcgcgccatcatcgacgccctcacagctatcgtgcccgaagagttcgaaggcgacctccgcacccgactccgtgaagcacaggacgaatggaaccagattggtcacgtgcccttcaaggagaaagacaagctctacaagcttctccgcgaacagatggaccgtctttatggctatgccaacgaacatgccgccaagcgtcgcatcgaccgcttcaaggagagcatcaagggaggcaacggaggtgatgtacgttcacgccttctccgtcagcttgacatcctcaacaacgagatcaagacctacgagaacaacctcggcttcctcaccctcagcagcaaatccaagcagggcaacagcctcatcgaagagctcaaccgcaagatggagaagctcaaggcagacaaggaagaagtcagagccaaactgaaagcactcgacgagcagtaatgctcaccgcatcataccaaaaggagggttgccaccaacggcacaccctcctttctatttaccccccttcatgcgaatgaaaaaacaaaaattttaccatttctttgaaaatgaaaaatgaaagaatgagaaaatgaaatatctacgatgtgtctgtcaacgctaaactctcaacctttaacattatacattatcactcaattctgtttcatattacacaggtagtccactggagggtagtactaatcaattctgcagtgccccgtctgttcgcccaccgctgttgaggtatctcacccatacaggtgtcggtgtctcacccatacatgtgttggtatctcacccatacacccaacgaggtctcactcatagaactatcctttggtgttcctttagtcctcctttagtcctttagtgctccttgtgttcgtagtggtaagatagtggtaaggtagtaggttcgtagtgataaggtagaagtgggtagtagttgtcactagccaactgtcaactcaaaaagtttatcgcaagggataaaggtaaaaaatcattttgagccttttaccattcctgtacagcgcatttgttatcattttcccgatgttgttgacggcaataaaatctggaataatcttacgtttcttttgtattgtgttcggttttcactaacgttggcttcgcccaacttaggatgcgcctcaacaataaaaatgaaaaaattattctttcattttgtattgtgctcggctttcactaactttgcaataataaaaccgaaaaaagtggaacctgtaccgtaatttggaacaacataggtgtacctttgctgtcaaaaatcataaactatcaaaaaacaacaagatgaaagacctgaatcaattcgtgggaacatacccgttttcgaaaaatcacccggttgcaaaaaaagtccccgttaaggacgagggcagaaacctgaatgttttcacaacggaataatccttattgtgatttgcggcaagaaataagaaaaaaatgattccttttgaagaaaaaattgtgcataactgttgtctgattgaagccttttctatacctttggcagcataaaacaaaaactccacgacaaaatcgcggagtaaatacttcggcttatagccttgttgtgataagtctcacaaattagtatggtgcaaatatagtatattatatattaattacaaaataaatctttgaaaaatgtcaaaaatattaggaattgacctcgggacagggtctattggccttgctttaaggaacccagaagcgggagatagcgttttagagcaactagagtatttttgttcagacatttatcaagcaggtgtcggaaaagatcgaactggagaatattcactggccgcagaacgaacaagtcacaggcaaagtagaagactaaaagaaacacgaaggcggagattatgggcgactctgcaattgctcatagactaccacctatgtccaatgagccaatcctctttagaccaatggaaaacatataacaaatccaaagacctttatagaatataccctattaacgatgctgcttttgcaaactggataaaaatggatttcgattcagatggggttcccgactacagcagtccctatcaactacgcaaggagttagttacaattcagtttgattttacaaaccaaacaaatttgtttaagttgggaagagcactataccacatcgctcaaagaagaggtttcaaaagcagtaaaggagaaaccatctcatcacaagaaacagaatccaaggaatctgtggattactctgacaaagacatctctgctgaaatgcagaaatccgagacaaaattatcacaagagatcaccaactatatgaccgagcatgggtgtcataccgttggtgaagcatttgccgtactcgaagacgaaggcgttcgaatcagaaatagtagatatgtcaccgtaagaaagcaattggaggaagagattaaatacatatttgatttccaaaaaggactaagcgttgactccgatttatatactcgactaacaagcaagaaaaagaacatcggtaccatcttctataagaaacccctacgttctcaaaaatggctcgttggaaaatgcactttagaaaacaataaaacgagatgtccaataagccatcctgaatatgagaaatttcgagctttgtgtttcttgaacaatataaaataccgaaaagattctctttcagaatgggaatccctgccaattgaagttaaacagattctttttgaagccctattcagcaaacgagtgaaagcagatttcccattcaaagaaatccgcgaaaaagcccaaacgctcttacatgtttcgttgaatggcgactgtgaaaaagaacatagaaccattaactacaaagacaaacaaagtgtacccggatgccctgtcattgcacgaatgagaaacttattgggtgatgactgggaaacattcaacatggaagggaagaaacaacgtacatcgcacagcaagaataacataaactcccatatagtaaaatatacagcattggatttatggcatatctgttatgaaaccgacgatcctgagtatttaacggaatttgcccatcagcaactgggatgggatgataaacaaactaaaaaatttgttcgactgtggtcaacacaagcccaaggttatgctatgttaagtctaaaagcaattagaaatattaaccgaatgcttttggcgggtttgaagtattctgacgctgttctcttggctaaggttcccgatattgttagattatcagaaaccgagttgcaggaacttatatctgattatgactttacaataaaaaaatccgttgacaacgagaaagttattcttggcattgtcaattcattgattgcccaatacaaatcattggacaccagaagtaagtttgcttttcacgattgtgaatataaattgcaagatactgattacaaggatattcagaagcaaatatgtaacactatcggaaataaaacatgggaattgatggataaagaagaacaagaatccatctaccatcaagtctgtcacaaataccaagactttttttacaatttcaaaagagacttctatcgattacctcatttagcagatacactgaaggattacctcacgagaagatttcctgcgattgaaaccagtcaatgggagaaattataccatccctcccttatttctttatataatgtggagcgaacaggtacagacaaggctgaattacgtttaggttcacccagtatcggagccatgaggaatcctgtggctcgccgtaccctgaacattttacgcaagaaaatcaatgcgatgttagatgctggtttgatagacattgacgacacacgaattgtcattgaaaccactcgccaattcaatgatgcgaatatgcgttgggccatcgaagcatatcaacgtgaacgcgaaaatgaaaacaaagccattcgagaactcctccaggagctttatcctaatcgagatatcaacgaatccgatgttgattctgctcgatatgctattgaacaacccatagaaacggatggaagaaagaactctgaagaacaattggaaagcctcaacaaatacaaggagaacaaaaatcggacctatggtatcgatgtcacaaagtatcgcctttggaaagagcagaaatgtctctgtatttatacagggaaaatgattagcatcactcaattattcaacgagaattctttcgacatagagcatacgattccacgtagcatatcctttgattgttcggacaagaacctaacaatctgtgatagtttctataatcgttccatcaaaaagaatctcatacccacacaacttcccaactacgaaaagaatgccgttattaacggggttgaatacaccgctatcaaaccgaggcttcagccatggattaaacgtgttgaacaattgaaggacaacgtggagttctggaaagcacagtcaagacgggcgatggaaaaaaaccgaaaagattattgcattagacagaaacacttatggcaaatggagctggactactggaaagcaaaagtagaacgcttcactatgacagaagtaaaggagggattccgaaacagtcagttgattgacactggaatcatcactaaatacgccactttatatctaaaaagcatcttcaacaacgttgatgtacaaaaagggactgcaactgccgaatttagaaaaatgcttggcatacaatccgttgacgagaagaaagaccgcagtttacattcgcatcatgcaattgatgccacaatcctgactctgattcccgtagcagcaaaacgccaacggatgttgaaattattctatgatattgaagaggctgaacgctttggtcatgactctcaatatatgagaagaatattgaatcaagaaattacagaatgcaattttggacagaatatcagccaagttcctcaatatatagaagagcatatcatcattaaacatcatacaacagacagaacctttagttcaatccataccataactggatataacaaacacatgcctggaggtgattctgtacgaggacgtttgcacaaagaaactttctatggagcaattcaacttccatgtgaatccggaaccggtcttgatcggaagttcatcacatcaaaaggaaaatttgtttatccagacaaaccatctataactattgtgacaaatgtggatatcacgtcatttgcttcagaaaaggattttgagaccatcatagacttccatgtacgcgactctatcaataagaccatcaaaaagagattgatggacggtttatcattcaaagaagcaatcaatcgacccatatggatgttagacaaagagggcaacgagataaaaacaaacaagaatgggaaaatgctctgtcccatcagacacgttcgctgtaaggttaaggctggtcggggctacatgactcgcgagaagtctctggaaattcgccaacacatcaacatttcaactaaaaagagcatcaacatctctgacaaaagttataaacagaaagtgtatgcccaaaacgacaccaactatttgtatctgctttatgaaggcataaaaaaagggcacgttgacagaaagagcaggattataagcttatgggaagcaacaatgttacatggaaacaacgacattgaaatagaccaactcatacgcgacacattagattacaaccgcatcgttgaaaagagcattgaatacaaactatctgcaattatacgagttggagattatgtgttgatttggaatgaaaatcctgatgaactgaaagaacttgacaaggctgaaataagcaagaggctatatgtcgtcgttaaattcaacacaactggagctgatttgctattcctcaaaaaacacttatctgctaatgtcgagccagacctaaatttagtagccaataaagtaaactgccttatagaacatcgagattttgagattgacacccttggcaatatcacttttaatgattaacctatgattaagaagaccctctacttcggcaatcccatgtacctcagcctccgcaatgcccaactggtgttgcggaagcctgatgcggacaaattagaagagtcgttcaaacaggaagcagaacggaccatcccgattgaggacatcggtgtggtggtgctcgacaacaggcgcatcaccatcactactggagcgatggaggctctgctcggcaacaactgtgccatcataacttgtgacagtaccaacttgcctgtgggactgatgctgcctctcagcgggaataccacacaaagtgagcgtttccgcaaccaaattgatgcatcgctgcccctaaagaaacagctttggcaacagactatccgacaaaagattttgaatcaggcaacggtgctgaacaaaaacactggagcgattgtcaagaacatgcaagtgtgggcaaatgaggtgaagagcggtgaccctgacaatcttgaagcacgtgctgccgcctactattggcgaaatatcttcccctctctccccaactttgtgcgtggacgggaaggtgaccctccaaacaacctgctcaattatggctatgccatccttagggcttgcgtggctcgcggattggtggggagcggactcttgcccacattgggcatccatcaccacaaccgctacaatgcatattgtttggctgacgacatcatggagccttaccgtcctttcgtggacgacttggtcatcaacatcatgcaagagtatcctgattacagcgaactgacacagagcatcaagacagcccttctcatgattccgtcactcgacgtgatgctggatggaaaacggagtccactgatgattgccgttggtcaaacaactgccagcctcgccaaatgcttcaacggagaactgcgtaaaattgcctatccagaattgtagaaaacagcgaacatgagcagtttgtcacgcctcaccgaataccgagttatgtggattttagtattcttcgacttgcccacagaaaccaagaaggacaagaaacgctatacggattttcgcaagaaactccaagctgacggattcaccatgttccagttctccatctacatacgacactgtgccagcaatgagaatgcagaggtacatttaaaaagagttaaatcttttctaccagagtttggaaaggtcggattgctaactataactgacaaacagttcggcaacatgcaacttttctatggccagaaaccaactgagcccaaaacgcctggagtgcagttggaattattctgaaaatgaaaaaaccagccgtcgagctggttttttcatatcacacacccttcttttttattttctaattacacctacaacttcttaatactcttttacttacaaagattcaggtgtatatgactctgcaaagatactaatttgaaagcaaatcacaacgcccaactgcgcattctcatggaaggagttggtgtatatgactctgcaaagatactaatttgaaagcaaatcacaactaacggaactcaaatctcttagttatggcggtgtatatgactctgcaaagatactaatttgaaagcaaatcacaacggagaagaggattttcaaacttcctaccagggtgtatatgactctgcaaagatactaatttgaaagcaaatcacaacgacaaggatttcattgttcagattgaatttggtgtatatgactctgcaaagatactaatttgaaagcaaatcacaacttgcacgagctgtgcaataatggcctcaaaggtgtatatgactctgcaaagatactaatttgaaagcaaatcacaacgggacgcaagtctatctgtggcaagtcccaggtgtatatgactctgcaaagatactaatttgaaagcaaatcacaactgtacgttgtctcggcgtccaatgccgctaggtgtatatgactctgcaaagatactaatttgaaagcaaatcacaacttatatgccttttcatcttcaaagttctcggtgtatatgactctgcaaagatactaatttgaaagcaaatcacaacggtcggaaagagttggagcaggcgcaacgtggtgtatatgactctgcaaagatactaatttgaaagcaaatcacaaccgccagcgagaaggtgttcgacatctactaggtgtatatgactctgcaaagatactaatttgaaagcaaatcacaactactaactataatactgcaaatggttacgggtgtatatgactctgcaaagatactaatttgaaagcaaatcacaacctttgttaaaggctttggtaattcccatagggtgtatatgactctgcaaagatactaatttgaaagcaaatcacaacacaatccttgcatgccttttgccaaggtttggtgtatatgactctgcaaagatactaatttgaaagcaaatcacaacggtttatcatcgttgtttcttccgttgttcggtgtatatgactctgcaaagatactaatttgaaagcaaatcacaaccattcgccgtatggtgcgtgatgcccaattggtgtatatgactctgcaaagatactaatttgaaagcaaatcacaacgtaatcctgctcaaccctctttaggttgggtgtatatgactctgcaaagatactaatttgaaagcaaatcacaactagatcacgatgaagccatttttgtccagggtgtatatgactctgcaaagatactaatttgaaagcaaatcacaactgaaactcttgaacggattgtcatccacggggtgtatatgactctgcaaagatactaatttgaaagcaaatcacaaccataaccgccgatacgaaattggcgatcgggtgtatatgactctgcaaagatactaatttgaaagcaaatcacaactacatcaagaaggttctcccagttccgccggtgtatatgactctgcaaagatactaatttgaaagcaaatcacaacattggagaatcagtttgctcagatgcaggcggtgtatatgactctgcaaagatactaatttgaaagcaaatcacaactccaagcattattggctcccatttgtcagaggtgtatatgactctgcaaagatactaatttgaaagcaaatcacaacttttatggagattaaaggaaaggtgcattgggtgtatatgactctgcaaagatactaatttgaaagcaaatcacaaccgagaacgtgaagagcgtggagagcatcatggtgtatatgactctgcaaagatactaatttgaaagcaaatcacaactgtgcgttttgtgaagttgagattgcaaaaagaagtgtttttgatgtgttttcacatgatattaaaataaatatcatttttattaagtattattttgtggatgatattaaaattcatacctttgtgttgtcaaaacaaacagatttatttaattattaaaaaatgaagtacaatgaattagaaaagaaactcaaaaaaattggatgttacgacacaggcgaacaacaaaatggccaccctttatggttcagcccagtaacaggaaaatttttcaagatgagcaatcacggaagcgatgaggtggcaaaaggaactctttactcaatcaaaaaggcagctggtctcaaatgaccagcagccttcaaaaaaatagcctacaaatcaatcaataacaaataatcttaatttccacagagaatttagggttcccaaaattgtattaacaatgagaaagactaaagcaatcatcgaacgcgccaacgatggtaattacagcgtttacatggatgctgacgatgtcagctaccttgtgacaggcacaggcgcaacagtagaagaagctgtaaaatgcttcgaggatggttacagcgacatgaaagcgttctacacaaaaaaaggtatgaagtttgaagaattggagttcgtatatgaatatgacatggcttcttttctttcctactattccaagaatttctctcttgcaggtttatcgaggctcactggaatcaatcagggtcagttgagtcactatatgacaggaagacgtaagccatcacgtatgacagtcatgaagatgcagaactccattcacaaattcgctggtgagttggaaagagtgaacttcgtttagtatcatttttcattttttataaataaatctgttgccttccacagcaatgtggagggctttttatttcccgagttctttctttagcacctttctcccttcgtggatgcgtcgcttggtgtatatgactctgcaaagatactaatttgaaagcaaatcacaacactcagcttgcttacctattaaattaatttggtgtatatgactctgcatagatactaatttgaaagcaaatcacaaccaacaggattgactaaaaaaaactatgcagaggaagtttttggaagctaaaggctgaaaaactgcggcttttttgttttgttttccgaaaaaatgtaactttgcgaaatcatttgtacaacaacatcttgataacctattcagatatgagtatgaagtatttgactatcatgttgatgatgtctggcctgattgtgtcggcatgcagcaacaaactgaagagctacgactcggacgttgagagtgattccattgagagtgattccattgcaagggtgacacagcggctggattcgatagatgcggagtattatgtgaaggagcggagcatcgagtccatcagaagggtgtgggctgacaagaagattaaggtggatgccgaccctgcagcgctgggcatcagtcagctggccctggcgttctgtcagacttatccacagtgtgacacgaatgaggcactgaggagatatcttgtcgctccgcacaccgacggcaaggatttggatagcctttccttcaagtcgccgacctataagcacacgtttacctactggattgagcctgcgttgaagaacggttacattcgcagcatgggggaaacgcaggttgaccgcaccacgtatgtgtgcttctggaaccgcaagaacgggcacaagctgtttgcggccttcatggaggagtgttgggagacttcgacgtgggaggagtgtctggtggtgttctacgactatgatcccgctacgagggtgatgagtcctgaacctgcgctgacggacttgattgagaagcgcatgaaggattatgacgcgtattcggtcgttctgcctaaggagggtaaggacatcatggtcatgggcttcatctatggcgatgaggaggaagaggaagacaacagtgaatacgtggagctgaatctgaaatggaacggtatgacgtttaactggggaaattgaactgaaagaggatgtgacttgaatgaatcagccccgaaagttttgtgtgactttcggggctgattcggtggatttataggatttgaatcattttgtctggaaataaatttgaatgattttgaaaagatttgtacgatttcgcccgaagggcactcccccacacgccgcgcgaggcgtgatttccgctcaatccgctcaatcgttccgcaggaacttgtttatataaaaacatacccctttgggatgatcaaactgattcagcagatttataggattgattcaaatttccgtcacctcatgctgttctcagccagcaggtcgtagcggataccgtcgttcagcatggagactccgattggttctgtttcgggctgcttctcggttttctgcgagggagtgcttcgttttgccaactggtgaggcgtgatgggttgactgactggttttacttgatacacagtgtcgtgtaccacttcgtgcacggtcacagtgtcggtgacaacgatggtttttgccaattctgatgcaggtgtctctgctgacgggcgcagatataaacccaaagcgaaacctgcaagacaggcggctgggatggcgacataccatccccaacggctctgacgcttccagggacggatgtgcatgcggtcattttgttcctgacgcagttggcgagcggcagcaatgatgtcgtcattgctcaaggggctctgtggggaatgtgtgttatgggttgtcatattgctgtagtttttttcggatgatggtcattgttttgtgcagtctcgatttcaccgttccttctggcagatgttctatctgtgcaatctgcgggatggtgagttcctcctcatagcggagggagaagagcaaacggagcggtggcggcaaggattgcaagacggagtaaagggcttcgttcagcctttccttatccatcttcacttccacctcctcgtcgctgacgggttcgacatcgagggtggagaggtagtcggtcacatgctcgttgtgccggtaggtgtttttgcagagattgtaggcgatggagaagagccatgtggcgacgttgctgtcttccagatagcggtctcttgcctcatacattcgcaggaacacgtcgtgggtgtagtcggctgccagcatctcatcgccgcccagttgacggaagaagaaaccctgcaggcgtcggacgtatcgacggtagagttcctcaaatgccgactcgctgcctcggctcacacggagcatcagctgctcgtcggtcatctgacggtttgatttgaagagaagaatgctcatgggttcactcctgatcaaggttcaacttcatcgtttcatactccagatagctgggactgtccgcctccagactcaggttcgtcatgtcgtagttctgtgaatgcagccgctgatagagatgggacagcaattccctgagccacgtgtagcgttcggcgttgtgcttcttgtaatagggaagttggtcgcgcaacaggataatgtagttcatggcataaaggtttccctccgcactctcccgtttctccggttggaacgacatgcgcagatattccatccagtagcgcgtctcgatgttgcgccgcttcaccgccatgttgccgtagggctttggggaatagcgcagcgtgagtccctcgttgtagaagtgaggctgcaaatccttcggaatgccttccccgaggctgaaccaggtcacgcttgtggctgacacatagacgggacgcttggaatgggtgcagatatggcggaagatgcggggatacgattcgttctgatagggcgaccagagtttgtcccacaaggcatcatcgaaatccatgccgattcgcttgaagacgctcccgatgtattctttccataccgcacaattctcgttgtacagaattttgtcgcggtgcacccccttcaccagttgcaggatgagcttgccaatgatgtctccatcgtaaggagccagatagacagccccctcgtccatgccctgcagttcgttgaaatgatattgcagttcctcggctgggtagagcccgcgttcgtagtattcggtcagcacgcgcgtcaaccgagcggtgtcctgcttctggatgagatagcccgcccatttcttataatccgacgccacggcatcgtgcggcaagtggtcaacggcaaggtcggcaaacttttcatagtgttcgaagaactcttccgagctccatccttcctcccggtatgctccttcgtacgcgcaataataaaatgtataggtatcgggtatcgcctgcttcatgcgacccaccacattcagttccttgcgcagttcctcacccttgttccagtccttgaagtgcagacgctccaccaagccgttttccacttcgaagaggtttcgccacgccttctcgtccttcgggtgctgagccacgaagtcgttccaatagctgtacaggctgtccagcttttccttcttctcgaggagcatctcgatatgcccttctatctgttcagtctcctgcgcacagacatttgctgtacctgccgcgatgagcaacaatgcaatcaatatctttttcattttcttctacgttttgtttggttttctaattgtttcactgtccgaaagcacttgacgtctttttgcttttcatgacagcatacacccgaaaaccgaaaccgttcacaaaaacagcatcttttttggctcactcgtaaacacctgtgtctgtcttaaacaaaaacactctcaagtaatagaaccgcggatttagccgatttcacggatttatttctacaaccacgaatttcacgaattgggagagccttggcggctcttgggaaaccatccggacggggctttcgccaagaaagccaaaaattcgtttaattggctacgccgagctgaaggttcgtcaaattggctacgccgagctaaaggttcgtagtcaaaaaatctgtttaatccgcaatctgtggttaaaaattaaaatctccgctcaatccgctcaatcgttccgcaggaacttgttttaacgtgagttcggtataagaagttgcgccgttggcgccgaaagaaaaatagataaaaac

SEQ ID NO: 4165 - DNA, 17700 bp, synthetic construct
  misc_feature 1..17700: note = Synthetic
  source 1..17700: mol_type = other DNA
cacctccccctcctccagagcacttgtggggtaacacgacgctacgaccgtggtcagtgcgagcgtgatatatgaaacgatatgtttgtgcaacttgttcatggccgtggtgtgtactgttgatgaatctgtgtggtgtctcttctcgtatgtcgcaatgagtcacttctcgagcgtgttgcccgctcttcagacttgaagttaaagatatccttcagtcggtcgagcttgcgtttccacatgaaaccggcgccgaactcgcctatctccccttcgaaccagtcgtaggtgctgcggtcgtagaacagtttcaaatatttgttgctggtcggactgaggcggtattcgaaagtcacgttgtcgaagaatgtctggtttctgttgtacgcatcgcttcccgtcgacacctttccgccgatgaccacgcgcagacggttgttccagaaccgtttggcgaacttgaatgaatagtcggtatgcatggtacccgaggcatccgtagcattgtcgacgccgatgctcacgtcgagcgtgcgcagcgcattgccagtgatattattgatttccgcctgtaggaacgagctgagggcgctgttcatcgacagtgccgactcgttgccatcggccatatacatacctgttgaaatcatggccacagccagacgtcccctatcttcttcagacatcatgcccagctgtccactcaccgacatgtcatcgggcgcatcaatgatgaactgcagtcccatgtcttgcagtgtcttggtgatgaccacgccacattcgaagtcgacacttctgccagtcccaccatcatcgttcaccatggccttcaccttctccgtggcggtgatattaattttcgggttgtcgggcgcgccctggaactccaagtatccgccctccttgatggtgaacgtcttgagcggtatgatgggcagcgaatatttcatctctccgctgttcaccgtgtatcgtcccgttatcctgaaattgttggtcacgttgtacaggagtcgcaggttaccttcgcccatgatgtccacgtaattgctgtggtcggcgttgaggtcacagcgtatgcgagcgctctcgtccacgttcagtgtcaggtccatgtcaagaccagagataggcggtcggttcaccacctgtgtcgtcgagtcgctgaagtcgacgaactgcaccagctcatcgagacgagtgtcttctgccagtggcgagtctttgagcacataggtgaggtcggtgtttcccagtacgtccacgcgtcccttcatctggaaggcgtcgagcggtccctgtattctaccgaacatattgatgaaagccctgccgtaagcctcggcacgtggagtctccttggcgttgatgatttcgaagtcgcgtgccgacatacgcaggtcgatcatcatgcggtcgaggttggagaaatcgagttgtccgttgagtgtcagcggtttgtcgttataggcatagagtttgaaatcctcgaacagcaagtggctgttgttgattcttacgggatggttgtccacgcgcagttgcacgccgtacggcacactcaggatgtatgccgagtcgagcaatatcgacccgtcgatgttgggcgtcgacagcggtccgttgattttcagcgttccctcgccatagcccttgaatcccaatatctggtcgggcatgaaactgttgagcaatgccaaaggcatcctcgccaggttgaagtcagcatccaccctaccctttccttcgggatagtatgtgcccacgacagttcccacctcacgttggtcgctgtatatgacagcgtcgatataatgcgatccgtcttcattaggcatatacacgaattccgtgctcaggtcgccgagcacattcttctcgaacgtcatgtcgtcgacactcaccgagctcgacaccgtcagttgtttatccgtcttcaccacgtggaagtcgccatcgagaatacccgtgatgtcgggcaggaaaggcaccgccgaagtgatgtcgccgaggttgaggttctgcatactcagcgtgaggtcttggtcggccgccacattctcgtcatcggtatataggtgtatgctcgtgccgtcgtcggccgccatgtatacgtttgccgccagtcgctgtttcttgcccagtcgcaagtagttgtattcgttgaccttgaattttttgtatcctatcactggctccaagtcagagaagttcaggcacagcgagtcgttgcgcaccatcgccctcagtcccagtttcacgcccagcgagtcgtttgcgtcgtatatccgcgtcgacaggtccgacccgttttcgaagagtgagccatccacattggccctgaacacataggtaggattaccctcgaagttttgcacctcggcattgtatttgaatcctgtcgagtcggtgttgatggcgaagcgcacgcggtcgaagagcatatcgttcaccgtcagcgagtcgaccttcacgtcgccgttcagtccattgacatgcgacgaatacatgtttacatacacctgtttgtaggttatcccctgttcctcgaacatcctcgagagcaggttgtcactgcccccactcatatagatatccacatccggcaggtgctcacggatgacgttatcgtcaatctttctatcggcaatcatcttactgatttccttgcccagccgctgtcccttgttgagaatcttctggtatccgcccttgccctccaacgacagttcgaaatcaccgctgttcaccctcacgtgcgtcgtgtcgttgttgagcaacacgtcgatgtcgataagttcagccgccaggtcgcttcccggttggctgaacaccaagtcgtccacctcgccctgcacgtcgtagtaactattcaggtcagtcttcaccttcatgtgcgcgcacatgcccagcgttgtcggtccatcggtgacacccaatttgtagaggtcagccttgacgaagtcggcggagatattggcatctatggccttgcggctgatgcgtccgtcggcatagagcataccgtcgaagagcgagttgtgtccctccacctccgccagcatccttcccttgtcgagactggcatccagtttcaccgtactgaggtcatagcccatagccgagaatttcgtcaagttggcctttgccttcagtctcgtcgagggattgaagatatcagtgccctgtccctgtgccgtgatggtgcccgtaagcggcgacagttggtatcccggcaggaagttctgcagcgggaacgcctgcgccttcacgtcggcatcgtaggccatctgtcgcgtgtcgacattggcttttgccaccatttttcccccaccctgtgtggcggtgaagtcagcacccagccgactgcccgttttcttgaaccgtccgtcgatgcctatgccctgcggcacacgtatcatcttctgcgtggcagggtcgagggccgccgtcacaaagcccaggtcattggtggtacctttgagtgtcacgtcggcattcatcctgtcgaagttcgtcacgttgtcgatggtgcccgaagccgtcatgttaaacgccgtgggcagcgtcacgttcatgttccgcaaggtcagccgttgcaggttgcctcgcacctgcccgttgacgttcaacgccctgttgggccatcggctcaccattgccggcggcatggccccgccagcgaaacgcatgatgtcctccttgcccacatatccgtccacctgtgcgaacatctctcccggctgttggtcgtcgaaggcattgagatccatctcgaaatgtgccgacagccgcgagtgttccgtctgcatctccagtgcgggcacgctgagcgtcttcccatccatgcgcaacggtccactcaggtggttcaccgccagtccgctctgttctcggaagttacagtcgcgcaggttcacgctgatgtcaggtgctaagtaatggagcgagtcgatgccaatgtttacgtctgtgagcgacaggtggttggtgtccagtcccttcaccctcggagcgaaacggttgtcgtagcgcagcgagccatcgttccagtccatgcgtcccaacgcgtattcccccttacccaggtcgaagcgtccattttccgcctcgagcgtgcccatgcccacgccgatgaccatcgtgtcgcccggcatgtggagggtcacgtcactcttcttgatgtttagtttatctacgaggatgcgccatttggcgtcgctctccgtggtgtctggtggcactgtgtcggccaatgcgatgtcgaggatggcaccgtcgagcgatgccttgtccacgcgcagtccctcttctttcaggtctatgccgtggctcaccacactcagttcatcgaagcgtcctttcacacgcgccgaggggatgaagccattggtgttcatgttcgtgcggcgcagtgtcagttcatccacctccacctttcccttgaacaggggcagcagctgcacgctagccaccagctcgcccacgtcggcgatggtgtcacgttggttggggatagagtcattgggttttatcatcttgaaatcctccacgctcaagtcgagtgggaacttcaaggatacgtgtcctacgctgatgtccatgcccgttttctccgaggcataggatgccaccttttgcgccacccagttttgtatgggtggtatataaagcaatatgagcagcagcaaaaagagcaggatgggcgtcaagatgatgccaacaatccatttgagcacttttttcatagacgcaaactatatcagcgtaaagctgttttgcaaagacattgcaaatatagacaaaatccgtgaaacccaagccaaaatgccaaagtttttgtttttccacattgattgtcatagaaaaaacgtatctttgcaatatgtaagttgaatgccctgttacgcttaccaacaatcattttgaatgagactgatttgccataataaccatttcctgctattcattctcgctatcaacaacaattataagtactaaaagaaatgactatgaataagatacatacgaacatcatggcggggccgaacatcactgtccccatgatatcggaatacctatcaaaaatcagcagattctgtctgttgtttgtaataataacaggtgtgtattcctgcaaatctgttgaacataagcaggattatacccaatatgatgcgatgactcgaagaaatgtctatatagttgttgaagagatgcccaaatacaaaggtggcgacggtggtttcttaaatgattttgttaatcatttccattatgattatccggagaatgagcaaggcagtattgaaagcattaagttttacgaatgactggcaagccggaagacaaaacggaaagcctgtcaacgtattattaacaaggacaatacatatttgtcctaatcactaagtcttccggataagccaacaatttgggggcatttcgaattgacaagtttattttttatgctgagatggagtaacttattcaaagttacccccttttttctcctttgcttgtctggcaaattcgaacaacgacaaaggcagatggcagtagcccgtggggttcttgtcgaggtagtcctggtgatactcttcggcggtgtagaagttcgccaaaggttgcttctccaccaccagaggctggtcgtagttccgttgttcatcagcaaacacctgttcgatgatgggcaggtcctccgaatcggtataataaacacctgtgcgatagcgcgttccctcatcatgaccctgtttgttcagactcgtcgggtcgatggccttgaagaacatccttaagagaaatgccaggctcaccacctgagggtcgtatttcacacgcaccgtctccgcaaaccccgtctggtcggtatacacctccttatacgttgggttctccgtgtgtccattggcaaagcccacttccgtctccaccacaccctctatctgcttgaagaaatgctccgttccccagaaacagccgccagccaagtaaatgtctttcatgcgtaccaatatcccatctttctcatgctccacgaagggaccttctttcgtttcgaacaacacacttcccgtctccagacactccacatcgtgccatgtgtttttggggatgtcgacaccgtagacacccgacgccgtcgagagcaccacgctctccttcacctggccatcatcatggtatgtgcttacacgcacttttcctttcaggatgacgatggtctcatctttcgtgggatggtggtgtatgggaatcgccgtacccacttccaaggcgttgaggaaacggtgacatttatcgtccaggctttggtggaagttgtggttcatcctcaggcgcggtgattttctcgcctgttccaccacactgtctatcagttggttgtctatgactttcatacttttcttgttggatatttcaaaaacaaaagattgttggtgcaaaagtaatgaaaaaaacgaaaggcaaaggcgcctcaataagttaagccacttctttttttacttggaaaggtatttcttaccatccactatgtaaagaccgggtgtaccttgaggaatagagatgagcatacggcccagcaagtcataggcacccttatgttgtccaccgtcatctaatttgattccaatagcatctgtcgagccactgacaaactgccatttatcgaactgcacgttgcccttgagaatcaagtatatggtgtgagtgcctgagatgagaggagagagctgagcggtgagcgtattccaactgtcgcccgtactactgatggtggcgatgtcgtccccattcttgtcgtcgaggcgcagggtgatggtgccactgcccttcaccaaacacttcatcgtgctggcatctgtctgaaaatcggcattgcgcacctctatgacgccctcggtgggtgtatcggcggtaatgcaagtggtacccaccgtggctaccatgtggcccacgtcatccgtcggttggtagagaataccgagcgtggcagcactagtggcggcgtactgtacggtatatgggtcgagatccttgatggagccaacaccttttttcgtggggatgcactcgtggaggacaacgttctcttcgtccacttccatctcatctacgtagatgctgcggaaaccgccattggagcctaatgaaggctcaagcaggttggtctggtagaacagataccagtgtccctggtacttgtgcaggtggctatggttgttggtgtagcccatgccgttatcgccggggttcttgaagtagttgcccccatagacccacgagtcggtatcgagtggtgtcttgctcgtgaaatagttcatgctgcactgtgtcggcttttcgccaccccatgtccaaggagagtgttcgctccaatcgttgttgtaggtatagacgtatgtgccgttgatataattcagttcattcgcctcgaaatgataaggagacaacagtttcactggtccttcggcgaaggagtgcaggtcggggttgagtttagctatccagccctgcgagttgccgaaggagagccatgcgtcgccattgtcgtctatgacggctcccgggtcgaatatggcaccgctgcctttcaccgtctcgttgttgccatcgatgaggctggtgttgagaggcgatgtccatgggccaacgggcgacttggcctgaatgacacctgtgccccatccgctgttggagaagtagagagagaagagggtgctgccgtcggcttgctgctgactgatgatgctgggtgcccacgaggccatgatccacggagccaccgtgcccaccggaatctgtccgtggtaggtccagttcaccatgtcgtcggtcgacatcatcaccagcgacttgatgcgctcgtaggtgttgctttccgctccctcgtcatactgttggtggtcgttggtgccgtagacatagaggcggccattgtactccacagccgtgggatctgcacagaactggaagtccaacaacgggttggccatgcccgtgccaagtttgggcgaggtcaccactgtcttgataatggatgcgtcggcagactccttggtgaggatggtgatgctctcgaaataaatcttcgccgtcacgccctcgccgttttcatcgttgttgagtccctcccagtcgccttgaaacatcactatcttgacaagcgtctttcctttttcaaacttcaggctatggttcgtagcaccgtagcgcaccacgctctctgtctcgctctcatcgctatagaccgccttcaccactatgcggtagtagttcacgggctgggcaaacaccatgtccaaacgggtatactcgtcggtgctgaggttgtcgatggcccaatagttattggcccagttggggaacgtgatgctgttctcgctggcgttggcctggccgccccagccgccccagtcgaagacgatgtcgctgaccgacaggtgaatgtcctcggttgaattgctggtagcatatgcccaactaccaccggcgtatgcctgaccagcatgatagaatagcgccatcaccgtcaggagcactttcagatagtctagatataatagtcgtttcatattatacaattctactatgtaagataaaaaatgctgcattaacgtcaaggtatttattcgtttattgttagaaatttcaaaaacaaaagattgttggtgcaaaagtaatgaaaaaaacgcgaaaggcaaaatcaagctctcaagaaagaaacaaaaagtaaacttctgatacgccccaatatgagaatgtgccgtttgaagtacctgagagttgggagtggacaacgattaatgaaatatgttcaaaaataggttcgggaagcactccaagtccacaaagaagtgtttctcgttgaatgtaaattttttctgccttgcctcaaacaggaagccctttcccatttcaagcaagaaattttgcagtttgctgataatggcggattcgaggtttgactcactgaaactgctatcacgttgcagtccaagaaactctaacgtaataggatctttaataatatcgttaggctattctattgtatgtccctcgtgtgacaagcgcaggacctccttggggtcacgactcaaagccaaacgctcatagaggcttgccccatattctcgtttcaattgtcgcacactccagtcttgtttctgacattcaatctcgtagaaacgacgttcctcatcattcttgatacgcatgagaaccagataatgagaccaggagagagtgaaagacagattgttcccatatttccgagacagcgtttcggaaatctccagaggttgaatatcggatttccgagacagtgtttcggatttcgtctgcactgcggacgagatttcataccctgaatatattcgatagaacttccgacaattttccagagtatcaacagaccaaccttctccgtacttattagtcaacctggctgatagattcttcaaaacagcctgaccatattgagcccgtcgttcaccttgttgctcatcctcaggtgcggtgatttcctcgcctgtcccaccacgctgtctatcagttggttgtcgatgactttcatacttttcttgttggatatttcaaaaacaaaagattgttggtgcaaaagtaatgaaaaaaatgcgaaaggcaaaggcaaatggccccgtatctttcaaattacctctgccaatgctaaaccataaaatattacaaaaaagtcaattcttttttcaaatataatttttctatttcaaaaaaaacatgtaagtttgcaaagtataataatgaagattgaatacctattttttattctaaacaattaatattgccttgtatgcaaaaactaataaatcatataaacaaaaaaactcccacgtaatcgcaggagtaagattacttcggcttatagccttgttgtgaaaagtccttcactagtatcttgctgcaaagatatgcattttcaataacaaaccaaaataaaaacagaaaaaaaatgaaaaaaataatcggccttgacctaggaacaagttctattggcacatgtgtgagaaacaccagtataggagacaaccttgtagatcaattagaatattattcttctgatatatttaaatcaggtgttggcgaagaaaagggtaaagaatattctttcgctgccgataggacaaaacaccgccaatctagaagattatacgaaacaagaagacgaagattatgggcgactttgtcagttcttatcaaatatgggtattgtcctctttccgaagaatctttgaaaagatggtccacatacaacaaagagaaaaaactgtttcgagaataccccattgacgacaagccgtttcagcaatggattaaattagatttcaatggagatggaacgcctgactattccagtccctaccaattgcgtagagaactcatcaaccaacaattcgatttcaatatcgagcaaaataggtacaaattggggcgagccctataccatattgcgcaacgtcgtggttttaaaagtagcaaaggagaaaccatcgccacacaagaaaacgacagtacttcagaagacatcgctgaattaatgaaaaaatctgaaaccaaactatcaggcgcactcatacaatatatgaaagacaaacaattaagcacggtaggagaagcgtttgcttatttagaagatgaaggaatcagattgaggaatagtcaattcaaagcagttcagagccaatatgaagaagaaatttcccttatttttaattaccaagaaggactatccaaagaatctgacttttataaacggataattagtaggaaaaagggagaaggaaccattttttatcgtaagccattaaaatcacaaaaaggattagttggcaaatgtacccttgaacctaatagagcaagatgccccatctcccacccagaatttgagaaatttcgggcatggagtttaatcaataatattcgatacaagaaagatgttgatgacagttggatagaactcgatattgaagtaaaaaagaaactataccatgacgttttcacttccagagttaagaatgattttccatttgaagatgtaaggaaataccttgaaaaagaactatccatcccccttgtcaatagccgcgaagggaagaccattaattataaagacaatcagaatatagccggatgtcctgttgttgcaagactcattcgactatttggcgaagaatgggaaaaatacaactaccaaacagatataatacgtcatggagatagcaaacactccaacaaaaagcacttaaaatcatatacagcattagatatttggcatatttgctatcaagccgatgatgttgaggagttgaccgaatttgttcaacaaaaaatgaattgggacgaagagatgactagaaaaatcgtccggctatggtcctccatccaagaaggttatgccatgctcagcctaaaagcaatctccaacatcaatcgaatgctttgtgaaggattcaaatattcagatgcggtgatgttggccaaaatacctgacatctgcaatgtatctcttgaaaaaatgcattctattcttcatgactttaagactattatcattcctaaattggaaaatgaaaagagaattatcaatatcacaaataatttgatagccaattataaatcaactattctcgaagaccgttttgcagaccacaacacatcataccaattaagtgaatatgataaagaagatatcataaaagcaataaaagattattgcggggaaaacagtttctccgatatggacacaaacgaacaagaaaacttattaaatggtgttacgtcaaaataccaattgttctttcaaagccacaaacgggaatataacaaattacctaaaaacagtgaagtttttaaggaatatctaattcaacaatttccagatatagataagcttaaatgggataaattatatcaccattcacaaatatcatcttattctcctgatgtgaaaaatgacgaatgtagactaggtcgtccaaacattggaggcatcaagaaccccgttgtccttagaacattaaacatcttacgtcgcaaaataaacagtctattggacaaaaacattattgacgccgaaaacactcgagttgtcattgagaccacacgaggtatgaatgatgctaatatgcgttgggctattgaggcttaccaaagggaacgagaaaaagaaagaaaggaaattggtaaaatcttatcggaattctacaaaacacgtgaaatcaatgacaatgacatagatattgcaagattcgttctcgagcagtcaaaagagaattcaatgaaggatgacaaacaaaagatgttcaaaaaagacatttcaaaatacaaactatggcttgaacaaggtggtatttgcatgtatacaggtaagaccatcaatctatcaaacttgtttgatggcaatgcctttgacatcgaacataccattccaagaagcatctcttttgacagttccgacaagaatctcaccatttgcgattccaactataacagaagtataaaaaagaaccaaattccaacatctttgcccaattttgagcatgattgggaatctaatggtattctttatacagccatcaagccaagattatcaaaatgggaagaaagggtcgagcgaatacaggacaacattgacttctggaaatcccagtctaggaaatcacaagaaaaagaacgcaaagatttctgcattcgtcaacgtcatttatggaaaatggagttagactattggaagggcaagttggaacggtttacgcttaaagaagtaaaatctggattccgtaatagtcaactagtggatactggcatcattactcgtcatgctgttttattccttaagagcgtttttaccaatgttgacgttgagaaaggcagtgttaccgccgatttcagaaaaatgttaggtattcaaagcatttatgagaagaaagacagggataagcactctcaccacgcaatagatgctgccatcttgactgtcattcctattgcagcaaaaagagaccgcatgcttcaattgttttatgagattgaagaaacagagcgtttaatcaacatatgttcaaaggattccgcaaaaagtctgagttataaattagatggccttcgcagaaagatgatggatgaaatagcggattgtcatatcggcaatatttccgccgttccaacctatattgaagaaaacctcctcgccaatcatatttctttcgataggactctagttcctgcaaaaaaacgagtaagagtaagaggtaaggtggtaaaagttaaaaacgctgatggagaagaagtcactaagtgggcacaaggcgattgcatcagaggtagactacataatgaatcatattatggagcaataaaaattcccgtacaagacgagaatggaaagccgaagaacgaagatggccatttcatttatgatgaaaacaaagagaatatctctatggttatccgtcaagacatcaaatccttcacgaaaaaagaagagtttgagaagattatcgacccgtcattacgctccatcatttctaccacaatacacagacggatggagaaaggcgcgacctttgcagaagcaataagtcaagacatctatatgacagacaatcatggaaatgaaatacgtgaggacaagaaaggaagaaaacttgctcctatccgacatgttagatgcaaggtcgccgcaggtcgtggttacatgacaagagaaaagtcattggagataagacaacataaccatttttccaagaagcagaaggctaatttaaccaatcgtgattacaaaaaaatggtctatgcccaaaatgacagtaattatcttttccttctttacgaaggcataaaaagaggcgctttgattaggaaatgccgttttatcaatacttttgaagttgccaatattatacgaacaagacgttttgataattttgaaaaagaattatggaacgaaccttattatcaatctttcagtgaaagtggaattgaatataaactttctgctattcttaaagctggtactcgagttcttctatgggacaaaacaccagatgaaatatatgatttatctagaattgaattattaaaacgattatatgttgtagttaaattcaataatgcaggaagcgatttcttatatttaaggcatcatctttcagccaaatccgatattgacatcaaactggtaccaaacaagatgaattgcctaattgaaggcagagattttacgattgacgttttgggtaatataagtttcatcgaatagacatgattaagaaaacgttatattttggtaatcctgcatacctttcacttcgcctcaggcaacttgtcattaagttgcctgaggtggaaaagagcaatatgacggataagatgaaggcagatttagaaaggacgattcctattgaagacattggggttgtcattcttgaccacaagcagataaccataacccaaggtttattatctgccttattagaaaatacaactgctgtcatcacatgcgacgagaaacgaatgcctaatggcttgtttttaccattagaaggcaatactatccaaaatgaaagatttaggaaccaaattgacattactatccctcaaaaaaaacaaatttggcaacaaactatcattgcaaaaattaagaatcaagcatattgtcttcagaaaaacactattaagtcatttgcgcccctgcatgtcctagccaaaaacgtaagaagtggtgacccggataattatgaagcacaggcagctgcctattattggaaatacatttttgaagattacccagactttatcagaaataaagatggagcgccgcccaacaacctgctcaattatggttatgccatactaagagccacgatagcaagagcacttgtcggtagcgggcttttaccagtttatggtatccaccatcacaacagatacaatgcctactgccttgcagatgatatcatggaaccctatcgaccgtttattgatgatctagtcatttcaatatgtaaaaaattcgatataggagaggatttgacaacagacataaagagagaattgctttgcattccaacaatagacgttcgaataaatgggaaacgcagtcctttaatgattgcagcaacactcacatctgcaagtttagtaaaatgtttcaatggggaatctagaactgtatcctatcctgaatttccatgaatagacttagtgaatatcgtgttatgtgggtgatggttttttttgacttgccaacaattaccaaaaaagataaaaaagcttatacgacatttagaaagaaccttcaaaaagatggttttaccatgtttcagttgtcgatatatgtacgtcattgtgctagtgtagaaaatgcaaacgtccacaccaaaagagtaaaatcttttttaccagagcatgggaatatctgcataataactataacagacaaacaatttggagaaatagaagtttttgtggggaaacggtcaaaagccccaaatgctccaggacagcaattagaactattctaacaaaagaaatccagccttttagctggatttcttttacaaacgcagcgactttttattctctacaaatacacagtaagcaattggttatcattggattacaagaaccctattgtttatgccactgcaaagatactaatttgaaggcaattcacaaccactataactatcaatagcgatatgggaggattgtttatgccactgcaaagatactaatttgaaggcaattcacaactactggatcagcgtggtggacgagagcagcattgtttatgccactgcaaagatactaatttgaaggcaattcacaaccgagaaccttgagggtatcaccaagaagaaattgtttatgccactgcaaagatactaatttgaaggcaattcacaaccccgccattgggtcggtgaaccacgggtccattgtttatgccactgcaaagatactaatttgaaggcaattcacaaccgactgcttctcctcattatgctgattttcattgtttatgccactgcaaagatactaatttgaaggcaattcacaactttcctttgcttcaacagtctttgcgcacaattgtttatgccactgcaaagatactaatttgaaggcaattcacaactccgctggatgtatcatagtaggttataacattgtttatgccactgcaaagatactaatttgaaggcaattcacaacgcaaacttatcttgaccagcaaaaagagcaaattgtttatgccactgcaaagatactaatttgaaggcaattcacaacgtggagtggtcagtggaaattttccactgaattgtttatgccactgcaaagatactaatttgaaggcaattcacaacggagaacagtttgcgtgaaatatgggaaaattgtttatgccactgcaaagatactaatttgaaggcaattcacaacatatgaaaaaatttatcaagaaaatagcatattgtttatgccactgcaaagatactaatttgaaggcaattcacaactcttaacgtccaattctgcttttgctactaattgtttatgccactgcaaagatactaatttgaaggcaattcacaaccattgcaggcgccaacggttatcaaggtaaattgtttatgccactgcaaagatactaatttgaaggcaattcacaacacaccacaacaacatggaagaacaagaaaaattgtttatgccactgcaaagatactaatttgaaggcaattcacaacgcccgtctttttgggggatgtatgcgaaatattgtttatgccactgcaaagatactaatttgaaggcaattcacaacacggagatttcctgagatgcctcctgcgagattgtttatgccactgcaaagatactaatttgaaggcaattcacaaccgtacgtctttccgcttgacgtgcccccttattgtttatgccactgcaaagatactaatttgaaggcaattcacaaccttgacacgctcccgtagtgttttcttcgattgtttatgccactgcaaagatactaatttgaaggcaattcacaacgatacattgagccaatgcaccgagaaaggattgtttatgccactgcaaagatactaatttgaaggcaattcacaactgtccgtcgagttggaagatatggaggacaattgtttatgccactgcaaagatactaatttgaaggcaattcacaacttacggcattatagcgaaacattattattattgtttatgccactgcaaagatactaatttgaaggcaattcacaactaaatgaggttgcaaagtataatgcgaagattgtttatgccactgcaaagatactaatttgaaggcaattcacaaccggcaaaggtcataagcatattggaggtcgattgtttatgccactgcaaagatactaatttgaaggcaattcacaacccgcttttgttcatcttgtctatgaagcgcattgtttatgccactgcaaagatactaatttgaaggcaattcacaacggatggttattactgacgctttaacaccttattgtttatgccactgcaaagatactaatttgaaggcaattcacaacctgtgtcatccacggattccctgtacgttgattgtttatgccactgcaaaga

SEQ ID NO: 4166 - DNA, 17519 bp, synthetic construct
  misc_feature 1..17519: note = Synthetic
  source 1..17519: mol_type = other DNA
cgccgaatgatatactgatagatacaaacaacagggtatatgtggaggtattccgttgcactgcgaataattcttccggtaggtggagcagctcatatatagcagccatttacgataaaaagtattaccccgaatggacaaaacacacgttaacatttaattttaagcgtgagattgtgatggacaacggaaatacttatgattatgatagcatcagggttctattttatgcgagtggccacacgatttacacatctcagccaaaattggaaataggtgacaccgcatccgatttttgtcttaacgaagaagaccagaagggacaagacggcacaagcatcacccctaaggggcaactcacaagctcagcaaatctccctacaactgcacaaaaaggagattcgtatattattgacggatttttgtgggtgtatacgggagctaacactactggcacggtccgcggatttgtcaacgcaggtagtataaaagggcctgcaggggcgtcgtcttatgtgcatattgcatacgcaaactccgcagatggtactatcgactttacgactaaagacaacgccgacggcggtaagacctatttatttgtaggtatttgcgtggatacaaattccaccgacccaacagacgctaataaatataagtggacggctctcgcagcagaacctgtacggccaaatatattgtatcaagcaggctttgaggaggggcgcatcgactattggcaggcagggcaagctctcgcaaatacaaaaatcgaaaaaagtatctgcaacggccgcaacgcactgacattaacaggtaacgatggcgcactcgtggcgcaaaacgtagttgatagattgcaaccaaatagatggcataccttgtctttttacgctaaagtaaaagcgggtatccatgttttggtcactggaggctttatcgagagcaatgccgtgggaggacattttgctcctttgccagattcgaccgacctcgacctcttgtcgctatctccaaacagcgactacaagttttattcggtcacttttaagacacggccaactttacccgcaggagacaagtttatatcgtttactttatggggagctggctcgtctatcagtatgccaaagcttgaggagggacagactgcaacggcttttatggtaaacgaaaacgacttaaaagcctcaacgctgcgcccttgcggtcaatggggcagcaatgtgacttatgaaaataaccgtctatttatagacgtggtgagctacaatgggcagtactactcttgtaaaaagacaaatgtgggacagataccttctgcgaattctccattttggggaatttctaacaagatgaagtttatagctacggatctattgcttgcagaaagtgcctttattgacaatcttggggtgcgtactatcgcaactcgagcgaatgggcctcgatttatcgcagaagcaggaacttgggctatttatggcacaaaccaaaagccgagtattgagagctgggtggacgacgaaggcaatgctcatctcaggtttaacgacaaagatggccgtgccatttatgatttaggtccgcaaggagtgagagatatgcttacatctccagcttttgacagcattggtttatctgctgccatgccacttggatatacagacgaacaaatgcagagtaaacttgtggagtatgctgcaggtggcttagataaggttagctatagccgatattaccaatatcatgctggcaaaaatgcgctcacaaaagcctatgacgataaagtctttgtgtccgacactttggctctatctcctaatctgtactgcccaaatggccgatacatcctcaaagggacggctcaagagagtgagccacaatttgtcagagatggcataacctatccctctgcacttgtaggaggatctgctaccgtatggactataaaaaatggagctataacagagatcaagaaaattctttgggtaagaacagtatataaatgaaacatctataatcaagaactcgcttaagttctccaccggggaggagagaaaaagaagcccccggcctgttaattagtaacgccaatcacttttaacaacacacccataagatgctgaccggaggctaaaaacctctgctgcaccttatgggcttttttatttgttattaaaatgattggcgttgctaaattacaaaaaatacataaatgaagatatttgagattgtaaaaattaacagggaactactaataaacctgcatacagcgggtgtaaggatagaggatgctggatacattgatttgtttgtagagtatcagaatttgtttaacaaaggagaaaaggtgtcctatatcgtagctgtacttgcagataagtatgctgtgagtgaacgaaaagtatatggactaatcaaacattttcaaagtgactgcaatttatttgcagtatgatagttgatggccgttcttgtttgctgcgaaaactcacgacctttgctcccattatgacaaagcaatatctttcggcaccgctaccttttcagggacagaagcggatgttcgccaaggagtatatcaaggtactccagcagttccctgacggaactgtcttcgtagacttgttcggaggcagtggattattatcacatatagttaagtatcagaagcctcactccgaggtgatctataatgattttgacggatacagactacgccttgagcacatacctcaaacaaatgagctactttcaaaaattagaaaggtgctgtacgatgcaccaagatataaaaagataacaggagctacccgtgaaagggtctttgagtgtctgcaagagcaccaggatcattatggatatttggattttatcactatatccgcatctatcatgttttcgatgaagtatagcctaagtatagaggagatgcgaaaggaggctctatataataatgtgcgcttgacagattacccgctatgtgatgactacttagatgggataacgattgtgtcggcagactataagcaggtgtttaatcaatataaggacactccaaatgttgtgtttcttgttgatcctccatatttaagtacagaggtaggtacttataagatgtattggaaacttgctgactatcttgatgtgctgacggtacttactgggcactcatttatttactttacaagtaataagtcatccatccttgagctgtgcgactggattgatcgaaataagggcataggtaatcctttcgatggttgtacaaaggtcgagtttaacgcccatatgaattatagcgcatcgtatacagatattatgctctatactaaggccgtttgaaaagtattctaatgtcgttaatactatatattcacaagcattcatatatggtagtgtgacgaaaacgaagttttctccctcaacacacaataaagatgaatgaaaagtgttacatttgcaagaaaagataccgtaaagattatgattgaggaaaataaagctatactcacatttgaggatttcaagaaccaaaatggaattatattttggtgggcatcagaagtaatggtaatgcttggatacacggacatcaagacttttagaaaagttttagaccgtgctacaaaagcctttgtttcgctcaatatcccccactatgagaatatcattgctgtaaagcgagaaatagatggcaaggaagttcaagacttcaaactaacacgctttgcatgttatatggcagctatgaacggagacacgaagaagcctgaagtagctttggcacaagtctattttgcagaacaaacgcgaaagtttgaactctacgtacaaagtagccaagatatagatagattgctgattcgagaagaactcacggatggtaataagtcgcttgcaggcgttgccaaagctgcacaagttactgattacgcaaaatttcaaaatgcgggctaccttggaatgtataacatggaatcatggaaacttgcaaagcggagaggagttgaaaagacaaaactatttgatggcatggggcgcgcagaacttgccgcaaatcttttccgagtaacgatgacagaagagcaaatcaagaaccggaacctcaaagggcaagcacaacttgaacaaacccactacaatgtagggaaagaagtacgggagatggtattaagaaatactggcgttacccctgataagttaccacaagaaaaggctttgcccagtgtaaagaaagaactcaaatcaggctatcgaaaaatgaagaaattagataatcccaaaaacaaaaaacgatgaagtggtcgaaataagagcataggttatcctttcgagggttgtacaaaggtgagttccgcccacatgaattacaatgcgttctatacggatattgtgctctatactaacactgtttgaaaagtattctgatggtatttgaactctgtgtatagaaagaggtcggtttgaatgttagtttcaaatcgacctcttagttttgtgtgcgtttttattttgttacatttcgttttactcaaaaaaataacatttcgttttatctgagcataacatttcgttttgccggatctaccaagcagatgagttggaagatatgcaaagttttgccaaagattcgctccaatgggacgacgagaagtgcaaactattgctacgcgtatggacgagtattccgcaaggctatgccatgctaagtctcaaagccatccgcaacatcaatcgtatgctgtgccgcggactaaaatatagtgatgctgtaatgctcgcgaaagtgcctgagattgctggcatgaacgagaacgagattgacacactcatcgaaactttcagcaaagacctcaaaacagaagttgatcgcacgaaagacatttatatcatcacaaactcgctcatcgctgattataaatcactctccttcgaagatcgatttgcagaacacgatacaagctattgcttgcaggagagtgataaagaagacatcgttcaacatatcatcaaacattttggagaagtcacttgggggctcatggacgctgaagagcaggaaacgctgatgaacgaagtggaacagctctatcaaaactttttcagcaaaacgaagcgtaatttctatgatatcccaacctatgctagtacgctccgcacgttcctttgtgaaaagttccctcatgttgacgaacaggcatgggcaaggctctatcatccctcgcagattgcatcctatcatccagaacgcgataagaactgtcccgattcatggcgtttaggtacaccaaacattgaagccattcgcaatcctgttgctctacgcacactcaacatactgcgccgaaaaatcaacgcgttgttagatgccaatatgattgatcccctggagactcgcgttgtggtagagacaacacgaactctcaacgacgccaatatgcgctgggccatcaatcgtttccaaaaagagcgcgaagaacaaaataaaaccattcgtagtattcttgaaaaagaatacacaacacgcgctatcagtgagacagacatcaacactgctcgctatattctcgaacaacgcgaagaacatatctatcggacagaaaaaacaggagaacttcagcatggattcagcttcaacattgatgcaaagcgttataagctctggttggagcaaggcggaatctgtttctatacaggaaaagtcatcaacctcaccaacctcttcgatgataacgcctttgatatcgaacacaccctgccacgcagcaaatcgttcgacaactcagacgccaacctcaccatttgcgacgcacattataataggtacatcaagaagaacattctccccgcacatctgcccaacttcgagcatgaccagaccatcaatggtacactctacaccgccattaagccacgtttggaaatgtggagaaagcgtgttgaacgactcaaagttaatgtagatttttggaagaaccgtacacgccgtgcacaagacaaagatacacgcgactattgtatccgccaacgccacctctggcaaatggagctgaactattggcacgaaaaactatcccatttcgagatggaagaaatcaaagaaggtttccgcaatagtcagttagtggataccggtatcatcacacgccatgcagctctcttcctcaaaagcctcttcaaaaatgtggaggtacagaaaggaagtgtcacagctgatttccgaaaaatactgggaatccagagcgttgatgaagcaaagaatcgcgataagcactctcaccatgctatcgatgccactatccttacaactatacctattgctgctaaacgcgatcgtatgttagaaatctttcttagaattaaagaactcaagaagattctttgtttctctaaggacacaaataaacagcaagagattataagtctcaaccaaaaattacaatatgaaataaatagttgtcatttaggtaacgacatcgcatctcttccatcgtacattgaaaacaatattatcattcgacatcttcgcaaagaacagacacaacaaaacagccgtcgcactattcgtatcagaggaaagaaaatttatgtaaccgatcatcatggaaacaaacataaaaagtggagttctggtgactctataagaggagaactttcaggtcaatcattctatggtgctattactcaatggaaagaaaagacaaatcgtaacgaaacaactaatcacaaggaacagaacataattgatccaaccatctattatgtcatccgaaaaccattagttttcaaaaacaataccagtgctccaggcttctctagttgggaagatcttgaaaaacagattgtgaataaagcactcataccaatgatgaaaagtcagttttgcgaaggaacttcctttaaagaagcatgtggacagcctatatatatgcttaacagaaagggagaaaaaataaatgtattacgtcatattagatgctacgttcgcattaaaaatcctattgcagtaaagaagcacacctttctatcaagtaagccatataaacaaaatgtttatgctggtgttggaggtttatatgcagcagcagaatacacaaatgggaataaaagacaattcgtcatatattctttgaaagatattgcgcaaaacaagaaaaagaacaatgaaataattcctagcaaaattcttaatgggacgaaaacactaacacttcagcggctcttacacgctaaagactcaattttaatatatgaggaatctcctgaagaattaaagaaactttcaatgacagaactttcaaaacggctgtatgtaattaaaggttttgaagctgcaaaaacacgtattaaagcagttaatcatctttacaatatagacgaaataggagaaactataactgactatcaaaatttgcctatcacaatcagattaagtcttaataaactcaagttccttcttcatggttatgattttaaatttacaacaagtggtttagaattcttagataaatgatcaagaaaacgctctactttggaaatcctgcttacctcaacctccgcgacagacagcttgttctccgcctgcccgaggttgagcaggcttccaatctctctgccaccttcaagcaaaaagcggaaaggaccatcccgattgaagacatcggcatcgtcgtattagatcatcagcgcatcaccatcacacaaggcctattggcaaaacttctcgacaatgaatgcgccgtcatcacctgcgacgaacggcgtatgcctacaggactgcttcttcctctcactggcaacacactacaaagcgaacgcttccgccagcaaattgaatcatctctcccgctccgcaaacaattatggcaacaaaccatccagcagaaaatcctaaaccaagccgctgtcctgcaacgctgtagccactacgaaacacgatgtatgagagtttggagcgaagaagtaaagagcggcgacacgtccaacttagaagcccgtgctgctgtctactattggcaacacttcttccccactcatcctcttttcgttcgcgacagagaagcaacagatcctaaccaacttttcaattacggctacgccatcctgcgcgcagtcatagcccgcgctctcgtagtaagtggacttctccccactctcggccttcaccaccacaaccggtataatgcctactgcttggccgatgatatcatggaaccttaccgcccctttgtcgatgaattggtatttcagttagtagctcaatacgatttctgggcagaaaacgcaatactaacaacagaactcaaacgagagttgctctctatcccaacgctggatgtcatcatcggaggtaaacgcagcccactgatggtggcagctggcatcacgacagcctcactcgccaaatgctttgcaggagagcaacgcaaactgatctttccacaattcgcatgaaacgctttagtgaatatcgcattatgtgggtattagtattcttcgatctccctacgctgacaaaagaagaaaagaaagcatacaccgaattccgcaaaaatctccagcgggatggcttcataatgttccaattatccatctatgcccgccactgctccagcattgagaatgcaaaagttcacatcaaacgtgtcaaatctttcctccccgaatctggaaatgttggcattatgagtatcacagacaaacagtttggagctatcgaaattttccaaggagcacgctacaaagctccaaacgctccaggacagcaactcgaattattctaacaaaaaaggtctcacccaagtggtgagaccttttttgcatcatttttctttttctgcaactaacacttatttgattataaatcaaactcttgcaagcatccagttgtgaacgataatgcaaagatacgattctgaaagcaattcacaactctgcgtaagcctgctaattctcatcttagttgtgaacgataatgcaaagatacgattctgaaagcaattcacaacggacacaaaaaataatcataaaatggcaatgttgtgaacgataatgcaaagatacgattctgaaagcaattcacaacctttttgtaattctaatattgtcatatttagttgtgaacgataatgcaaagatacgattctgaaagcaattcacaacgatatgttatcggataaaatcaaacaagagttgtgaacgataatgcaaagatacgattctgaaagcaattcacaacagcatttcttttgcatgttcaaactcttcgttgtgaacgataatgcaaagatacgattctgaaggcaattcacaaccaaatcttttatgatcgtcatcgaaggaaagacaaaacctacacttacgatgagatttccacaaatggcttaaaaataagacaggcagacttgatataatcacgactgcctgaatgtagggtccaaacctcttacgaggaatgatccagtgcaaagataataacacttcttcaaaatcaagtaattatgaagaaatttatcgaaattttcaaagaatcaaatcactacaagcatcttttaggtggtttcgggatcggtctgtgctaaagttgtcctgattatggtctttctccatacgtccgataatgccagaaagttgatgccgcatgagttctctcagtctcctttgctcctactctatgagttttacgaaatcttttgcgtccacttatttttcaaaataaattgtatatttgcatgggatttacagagaattcattctcttgtacttccacctgcgccggggtgttccatgaaaaacccggctttttttattctttttgatagatgagactcatccatgatgaatagtactatgccccattctaaacaactgcatctggtattcattttcaaggtgatcgatgtaagccctccgaagaagcgttcggcattcggtccatcatgggattacttttctttagaaatgagagtattttgttcgtaacttgttatgttgcaaaatattgttatctttgcagcgtgtgaatgtcgaagattcggcgcgataacttcaagctttcctttcacactttcaaaggtggcttcggtcacctttttattttttctaattcagtccttattatttcattcgtttgcctcgcctctccagaaaagaaatcatagccttgtcagtgtatattacatagcactactcacttatgtatgatgcagcgtgcaaactcatacgccagcagcatacaggaagaagagaagaagaggaagcaagggaggaagaataaaacaccgacatgtgaaaatccgcatcgctctctctgcaaagagagcaataacttttcaaaacacaaaaagtcataaagtgcaacggaaacttcatgtacatctctacgaggatataaaaaaagaaaagcaatgatccgtcgccttcctcgtgtgtctcgcgataaacacgagacggaggataacttgatacattgctttagggcaaaagtagcaataacttttcaaaaacaataagttacgaataaaattctctcttttctaaagtgctaaacaataatgcactcaaagatacgtccccgaaagtagctcacaacaaaaaacccagcgatgaagctgggagttgagcgagggacggtctctgaaggttaaccgcacccctcgcactgcaaatatacggaaaaatctgtgtaatcttcttttttttgcaattttgattgtcttcagcagaaaaaggcgaaaaaaacatatcttttatttcatcgtccatagccttattgcgtttgagaacagaataaggctgtcagctgatagccttattctgtcagccgacgctcttattgtagcggagctgatgataaggaaagccgaagcgaagaggattcattctcctcctctgctttgttttcctgccgtcacgtcgtcacgttgtcacacttccattataacaaactggaaacatgcatgttgcgcgggtgacaacagcgtgacaacaaaatcaaaacacaaatcgttgccacacgtctaaactcctgtttatcaacccatcagcacctctgtgacaacgtgacaataaaaagagaactgtttcgctcgtggaggaaaaagcgacaatatcccatgcagcattctgtgtcctctccgcgctacacacatacggcgctaatgtaaatatatagggtgcaaaagagatgaaagagagaaaggaggagagaatgataaagttttttacgattttattgcagattttgttaactttacttggcataataaaatatagtatatatatttgcctatcccaactaaagttaacatctatacaactacttaaatcatgcaaacaacaccgatgctttcgtttccgaaagcaataaaaaaagcattccgcgactacgccgtcttcagtggacgctcgcgccggtcggaattctggtggttcgcactattcaacacggttgtgaccgtgggtttgcagtttgcatttttcacgatctctgttatcacgggacttgtttgggtaaaattccttgtttatctctatgctttggcaacactcattccgtccttcgccatcgcggtgcgacgcctacatgacacgggacggagcggcggttggactgtcgggcttttcttctcggcaattccaatgatacctactctccctttggccgtatggaatggctatatctgggcagtagtgattctctctctttgcgctctgatctgcttagctctcagcatcaccatcttggtgttctgcgccagcgattcgagtacatacagcaacaagtatgggccttcgcccaaatatatagactaatatctacaaaagtcaatcaacatttaattatttcggaggagcgctacattgcgaaatgtggcctcctctttttttctaagaaatggtacatattaggaaggaactgaaagagagaaaaaactgacaaaagagtctgagatactactttcttctgtgtcaaaatagttggagacatacgcttctgtaggaatccatgtgctctgcatctaaaattctttaattcctcaaagctaccgtttttttggtgtatttttgcgtaagacttaacgcacaaaaaatgtttcacagactttttctatatctccccgcccttctgctgctgctcgccagttgcagcagtggcaaaaatcagcacaatcattctaagcagcaaaaccctgccgataccgtgatggacgaggcgctccgccggcagctggcggactacatcaagcagaagccacaagccgaccatttggggctttatgtctacgacctcacggccgataagcccgtttttggctatcgcgaacaagccccgatgccaccggcttcgtgcatgaaactcatcagtggcgtggcggctatgcacctgctcacagacaaatacttctatcgcaccacgctctacacgaaagggcgcatcctcaacggcgtattgcaaggtgatgtagtgctacaaggcagtctcgacccgcaactctacgctcccgacctcgccatgttcaccaacgccttgaagcgtcgcggcatccaggaggtggagggcaatgtcttcttcgcgcccgttcacgatgaagtacccacgcccgaacagcattggggccctggcgatgtagtgctccctcagtacggactcttctaccaaccgcgccccaccatcttgcgcgccctccgcaacgcactgcagcgcgccggcatcaaagtggacgccgcacgagtgggcataggcacagtgccccacggagcgcgccgaatcttccgcttcagccgccaaatgggcctcgtccttgggcgagcatggcacaacagtagtaacacgcagagcaacggcctcctctacaccctcggcttagagtcggcacccagtgcatccgcaaatcccgaccgccacgacctgcgccagcgcggcgtggactatatccaccgctttgtgcgtgagcagctcgacagcactggaacaaataccatccacgacgcctgcggcctctgctccgaaaaccgcgtgacggccgaactcctcgttaagaccctgcgctacgcctatcagcggccccagatcttccgcatgatgcgcgcccacctccccattgcgggcaccaacggttctttccgccacatgatggaacgcagcacggcgcgcggtaagattcaggccaaaaccggcacactcactcgcccttacggtatctccacactgtcgggcttctgccgcggacgaaacggccatctcttggctttcgccattctcaacagccagatgtctatcctcgatgcccaccccattcagcaacgactctgtgaaatcatgattcagtagagagaagggaaacaatggaagaagcagaagggaaagcccaaaggctgtgcctaaaaatctgcccgctctgccgataggcttatttggcgtttttatcacaatatcgtatttttgcagtcaaaccaatcattatgttcgaaatagaaaaaatagagaaccgcgtagaaaaggcggtgctcgttgcgctcatcaccaaaacgcaggacgaacgccaagctaacgaatacctcgacgagctggcttttctggccgaaacggctggcgcggaatgcgtcaaacgcttcacgcagaagctcgatgggcccaattccgtcacttatgtgggcaaaggaaagctcgaagagatgcgcagctggatcgagtccgaactcgaagcggaacgggatgtagatatggtggtcttcgacgacgaactcagcgcgaagcagatccgcaacattgagaacgagctgaaagtgcgcgtcatcgaccgcacacaactcatcctcgacatcttcgccatgcgcgcccagacggcgaacgccaaaacgcaggtggagctggctcaatacaaatacatgctgccgcgcttgcaacgcatgtggacccacctcgaacgtcagggtggcggttctggctcgggcggtggtaaaggttcggtaggacttcgcgggccgggtgagacacagctcgagatggaccgccgaatcatcctcaaccgtatggcactgctcaaaagtcgcttggcggaaatcgacaaacaaaagcgcacgcagcgttccaaccgcggccgcatgattcgcgtggctcttgtgggctatacgaacgtgggaaaatccacgctcctcaacctcatggccaagacggaggtgttcgccgaaaacaaactcttcgccacgctcgacacgacggtccgaaaggtggttatcgacaatctgccgttcctcctctccgacaccgtgggcttcatccgcaagattcccaccgacctcgttgattcattcaaatccacccttgatgaggtgcgcgaggccgacctcctgctccacgttgtcgatatttcgcaccccgatttcgaggaacaaatcgaggtagtcaaccgcacgctggccgacttgggttgtgcggagaaacccgtcattattgtgttcaacaaagtagacgcttacacctggacggagaaggaggctgacgacctcacaccggcaggtaacgagaacgtaagcttggtggagcttcaacaaacttggatgaacaagatgggcgagaattgtattttcatctccgctcgagagcgcctcaacatcgacgaactccgcgatttgctctacaatcgtgtgcgtcagctccacgttcagaaatatccctacaacgattttcttttcaatcagtacgacagcgacggccgtccactctgatttattctctcatatccctaaaagccgagccagtttgcagcaccttctctcgtttccgtgctgccgcggctcggccttttcccacccattatgcaagaacaacattctcgaacccaactcctcttaggtcgtccggccatcgatacgctcgaaggtagcagcgtggcggttttcggcgtaggcggcgtaggcggctacgttgtggaagtactcgcccgcagcggcgtgggcgaactcgctcttttcgacaacgaccgcgtgtgtctctccaatctgaaccgacaaatcgtggcccttcattccacagtggggcaatataaagtggatgcggccgaggcgcgtatccacgacatcaacccgcattgcattgtccataaatatcccactttttatcttccctcaaatgccgacaactacgatttgagccagtacgactatgtggtggattgcatcgacacggtcacggcaaaaatcgaactcatcaagcgttgccaccagctccacgtgcctatcatttcaagcatgggagctgccaacaaaatggatgcaacggcctttcgcgtgacggatattaccaagacaacaatggaccctctggcgaaagttatacgcaagaaacttcgcactttgcgcatacctcatctcaaagtggtatatagcgaggagcagccgctccgtccgctcaccgaggagatgcctgccgaagctgtccaaagcgtttccgccgctgctcaggcttctgccacctcttcccccaacctctccgtcggtgctgatgtgcccaacggagcggggcggcgttccgttcccgccagcaacgctttcgtacctgctgctgcgggtctcatcgcaggcggcgaagtggtgaaggacctcctccgtttggccgatacctatcgcatcgcgcctgccgacatggccaacagtcctgccgcccaagctgcggccgaacgggccaaagcccaccgcgaacgtgtcagcaaaatccataacaaaggagaatgaaagaagctgcctgcttctccaactggtctgactaatccgacccgtcggacctatctgacccgtccgactcgtccgactcctccgacaagtccgattcttcaaagcaccagctattcaatagaaagccccgagcattcagcgaatgttcggggctaaaattatggagttgtcagggattacttgcagctgccgcaagtgggtttgatttgtttgaagaaatcgttgcccttatcgtcgacgaggataaaggcggggaaatcttccacgcgaatcttccacacagcttccataccgagttcgggatattccacacactcgatgctctttatattattataggagaggatagctgctggaccaccaatagaaccgaggtagaaaccgccgtgcttcttgcaggcatcggtcaccacttgcgtgcggttgcccttggcaatcatcaccatcgaaccgcccatactctggaagaggtctacataggggtccatgcggttggcagtagtcggacccatagatccgcaggccatacccttcggtgtctttgctggaccagcgtagagcacagggtggttcttcaaataatcagggataccttcaccggcatcaatgcgggctttgatcttagcgtgggcaatgtcgcgcgccacaatgatggtgccgctcatgctcaagcgcgtgctcacgggatacttagtgagttccttgagcacttcttccatcggttggtcgaggtcgattttcacaccgccgccttcgcctgcgttgcggagttcctctggaatccaacgcgtaggattatcgtcgagtttctctatccaaataccgtccttgttgatcttacacttaatgttgcggtcggccgagcaactcacgccgatgcctacaggcagacttgcgccgtggcggggcaaacgaaccacacgaatatcgtgggcaaaatatttaccgccaaactgagcaccaagtcctatcttataggcctcttcgagcaactgtttctccagttcgaggtcgcggaaagcgcggccagtctcgtcacccgtagtggggaggttatcgtagtaagtagaagccagtttcacggtcatcaagttcttctccgcactcgtaccaccgatgacgataccgatatggtaaggcgggcaggcagccgtaccgaggctcttcatcttttcaatgaggaacggaatgagcgtaggctcgttgagaatggctttcgtttcctggaagagatacgtcttattggccgaaccgccaccctttgccaccataataaaacgatattcatcgccttcggtagcttcgatatcaatttgcgcggggaggttacactttgtatttacctcgtcatacatattaagtggtgcgttctgcgaataacgaagattctcttctgtaaacgtattgtaaacaccacgactaagtgcttcctcgtcgtcaaaatcagtccagacgcgctgtcctttctctccgtgaatgattgcagtgcctgtatcttggcagaaagggagcacaccctttaccgatacttccgcattgcgcaggaattgtaaggctacatacttgtcgttttcggaagcttcggggtcacttaatatagcagctacctgcttattatgctcacgacgcaacataaattcgcaatcgtggaacgcctgttgtgccaaaagcgtgagggcttctttgctgactttgagaatctcttttccatcaaactcagccgtgctcacgccttccttggtgagcaaacgatactctgtgttgtctttgccgagctg

SEQ ID NO: 4167 - DNA, 15410 bp, synthetic construct
  misc_feature 1..15410: note = Synthetic
  source 1..15410: mol_type = other DNA
cgtcgaacttctgtttggttatgcgaaagtcttcatcgcgaagggctatttcacgattcatgtcgtagcctttatatgccttgcttgtgtaaccgccataaatggtcatagagttgtcgatggagcggttgttgttctgctcattggcattgataaggccgttgccggctccaagcagcacaataagcatgaatattccccatgccacagcaaaacccgtgagcgctgttcgcaatttgttgcgacgcgtggtagcccatatttcttctatcaaatctctcacgattatttcattatgccgttaataccaaatggagacgccttgtggtctttgttctcctcaatctcgccaatgataccgtctttgatgtgcacaatcttgtctgtttgattggcaacaccactctcgtgagtaaccacgattatagtcttaccctcatcgcggttcagcttggttagcagctgcatcacctcaacgctggtctttgagtcgagggctcccgtaggttcgtcggcaagaataatcttaggttgtgttatgagagcacgtgcaatggctacacgttgtttctgtccacccgaaagctcatttggatagtgttctgcccaaggcagcaatcccagcttgtcgagatattccatggcaagctgatgacgcttctttctgctcactccttgatagaaaagaggtagttccacattttcaacagctgttttgaaactgataagattgaaactttgaaaaataaaaccaatcattttgttgcgatactcggcagagcgtgtttcgctaaggtcttttattagggtgttgtcgagaatatactcgccatcgtcatagttgtcgagaataccaaggatattcagcagggttgactttcctgaccccgacgcacccataatagaaacaaactcaccctcttcaatatcgaggctgatgccttttagtacatgcagaggctgtgctccgaaatacgttttatttacgttatttagatgtaataagctcattttttttcgcttttatataacactttgacgctaatacatatgcaaaggttgcattagggtatgaaaaaaaacaacctcaccccgcccctctccaagaggagagggagaactaacagcttgcatttcttgctgtttttcggcagttgggactcctcccctctcgaggggaggctgggaagggtctttatcttttttctatttttaaggttttatcacaataatctataactgctttgcgatgtgtgataaagataatggtgtggcgtttttcagccagaaggttttttagcagctttctttctgtttcctcgtcgagggcacttgttgcctcgtcgaaaataagaatagagcggttgcgaagcagacagcgggcaatggctatgcgctgagcctgaccttcactcaatcctccgccttgctcggtacatttagtattcagtccttcaggaaggtcaaaaacaaagtcggcacaactacggtgaagagcctcgcgcatctcttcgtctgtagcgtcaagtttgcctattcgcaaattgtcacgaatagtaccactcataagggtgttgccttgcggaacataagatatgttgcaacgatgaagcggagtgagaacgttgaacgtattattatagatttcgatggttccgcttcgtggtttaagtaatgcgagtagcaagcgaatgagggttgtcttgccggcacctgtctctccgagtatggctgtgcaggtggcaggcttgaagtcaaagctcagatcatgaatcacatctccatcagtagcattatactgataactgatattggtaagacgaagtccgcatggtgcatcaagaattattggctctccttgttcctcaagagggttttcctcaagttccataagtcgctcggcagcagtaaacacaccaacgaaagcaggaaccagcttcatgaggttgcgtgctggagtttgaatcttgtttactaactgcaggaaggctgtcataccaccaaaggtgagggtgtgggcactcatgcgaagggctgcccataggaaagctatgagatagcctaatgcaaagccgaagttaatgataagattgctgaaaacgctgaacttggttctacgaacaacattctgtcggagttcgctttgggtgtcctctaacttaccaaccatagcatcgtcgctctccatggtttttatgagcatgcggtgttgtagagtttcttgcaacacactctgcaccttgctgtcgctgtctctaaccttacgtgtaagctttcgcatctgtccgatgtatatcttgctcactccaaggaatagtggcagcatggctactatcacgagcgagagtcgccagtccatagagaaaagatagaagaaagcaccaaagaacattgctaccacgctcaaggtgttgggtatggtttctgtgaggaagttcaccacatagttcacatcaaactccagtcggttgagcacatcgccagaatgatgtatttccttgccgtgccattcgctgcgcaacagtctgtcgagcatgcgctgctgcatacggttctgtgcctttatgccaagtatgttctttatccatacacttgaaatgttcaaggcaaaatcagcaagaataagaaatcccatgatgccaacagcccaatagatgttgccatctatgcttcctgctgccacgtctatggcgtgcttcacagcccacacttgtcctaagcttacagccacctgtagcaaaccaataacggcattgagaatagcttgtagcctgttaccacgccacacctgccaaagccatttcaataatgtcttggtgttgtatttgaaatttggtatgtgtaacaaactctttatgctcatggttaattcctttaggatgcgtttaggattcgtttaggatgaaactactttctgctgtcggctccccacatgagtttttcacgtagagatgagaaataacgacggttattctgtttgattatttttataacgaaaggcgccttgcgaatggtaatcttagtaccctcaagcatcttctcgcttctgccgtcgatagctacaagaaaactgtgacttcggctctccacatccatggtgataacgcttgtgtcgttgataacaatagggcgtatgttaaggctgtgaggagcaacaggtgtgaggcaaagactgctgctgtgcggcacaattattggacctccgttactgaggttataggcagtagaacccgtaggtgtggcaataacgagtccgtcggcctgatagttaacaagaaaatcattgtttatgtaagtgcgtacagaaatcatggaagccgagtcgcgtttcaaaatggcaacatcgttaagggcataaggactgccttctatctttgctccatcggtttcaacttctattaccgtgtgttcttcgatagagtagcgtttgttgaaaatattgtcgagagtgccttctatctcgcttggaagaacatcggcgaggaatccaaggcgtcccatgttaacacccacgataggaatctcgcggttgcccacctttgatgctgcacgcagaaacgtgccgtcacctcccatggagatgacataatcggcattgttgaagtcaacgggctcaaccatagcctctgcatcatgagcttcgagatatcttaatatgtgctcgatgtatggttcaacttcactcttcttgtattcatttccgaaaattgcgaatttcaacttgcgctctgacatatattttgccaattcaattaattttcttatttttgcaaaagtagcgatttatttcgtaataatcttgatttaaaccaacaatttatggcaaaaatatatgaatttcttgccaacggctttgaggacatcgaaggcttggcacctgttgatatcctgcgtcgtggcggtattgatgttgtaacggtaagcatcacaggctctgagtttgttgaaacagcacatggaattaccttgaaggccgatgccctgttcgaggatgttgaccttagtgatgccgatatgctgctgcttcctggcggtatgcctggtgcctcaaatctgaatgctcataagggggtgcgtgaggctctgctcaagcataacgaggcaggcaagcgaataggtgccatctgtgcagcaccaatggtgttgggaagtcttggacttcttgatggcaagaaagcaacatgttatcctggttttgaggactatcttacaggagccgaatatacagccacactctatcaagaggcagataatatcataacaggtgaaggtccggcagcagcatttccctatgcttataagattttgagctattttgttggcgaggaagcatccaagcagatgcaggagggaatgatgtatgcacatttaatgcagtcgaaataatgaattacactattattgttgcaggaggaaaaggacttcgcatgggaacagatattcccaagcagtttctgcctgttggtggaaagccagtcttgatgcgcacaatagaacgctttcacgaatatgatgaaaacatgaatatcatactcgtgttaccaaagcagcagcaagcttattggcatgaactctgtgagcagtatcatttcaccatagagcatcatattgccaatggcggagcatcgcgctttcagtcgtcaaaaaacggcttagctcttattcccgaagatgccgagggctttgtggctgttcacgatggcgtgcgtccttttgtttcattagatacaataaagcgctgtttcgaggctgccgaagagagctacgcagcaatccccgtaatgcccgttaccagcacattaagatatgttgatccacgaggtggaggcaacaccgttgatcgcagtatgtttcgcgaggtgcagacccctcaggtgtttgatattgccttgatgcgtcaggcattcaatcagcccgagcgcgacacctttaccgatgatgcaagcgtcgttgagagtttaggctgtcgtgtggttcttgtagagggcaatcgtgagaatataaagcttaccacgccgtttgacctgcgcatagcggaggagtgcgcgaagcagagcttcgctaaatgataaatgataaatttgcgcacgcaagcgtgctaaatgataaatgaaaaatgataaatgataaagaagcgcaaagcgcttttataatagattagtaactcatatttgagcttgcgaggctccctcccactcggggggttctgtcccccggaaacgggggagatttgtcgaagacccactgaccaaagggaagtaacgcgaagggggtgtaaagaccattgatggcggggggagaggtttaatattatgaatagtattttagaacaagacatcatgtatttgtctggggtgggccccaagcgcaaagacttgctgagtaaagaacttggcttgaacacttggcgtgacctattggaatactatccttataagtatgttgaccgtagtcgcatttacaccataaacgagatggacggcaacatgccctttgtgcagataaaaggtcgcattctcagttttgaagagtttgcacagggagcacgacgcaaacgagtggttgcccatttctccgatggcacaggtgttgttgaccttgtttggtttcgtggagcacagtatatctataaaaactataaggtaaacgaagaatatattatttttggaaaaccatcagtttttggcggacgctatcagtttgctcatccagagatagagaaggttgccgacttgcagctcaacgaaatggggatgcagccttattactctacaacagaaaagattcgtactgcaggtatcacatcacgaagcatagagaagctaacgaaaacacttatcagtaagcttccacagggcacacttaccgagaccctgcctcctttcatcacacaacgactgcatcttataagtcgtgatgatgcctatagattcattcattatccacatagtcttgacgaacttcagcatgctcaggtgcgcctaaagttcgaggaattgttctatgtgcagctcaatatccttagatacaccagcgatcatcgtcgaaaatacagaggatacatctttgaacacatcggacagattttcaactctttctacaaaaacaatcttccctttgcccttactggcgcacaaaagcgggtgatgcacgagataagagccgacatgaagagcgggcgtcagatgaaccgccttctgcaaggcgatgtaggctcgggaaaaactcttgtagcccttatgaccatgctcatagccctcgacaacggttttcaagcatgtataatggcacctaccgagattcttgccgagcagcatttctctactatcacggagttcctacatggtatgaacattcgggtggaactgctcacaggaattgtaaaaggaaagaagcgagaaaaaatacttgctgaccttcaaacgggcgatattcaaatacttgttggtactcatgccgttatagaagacagcgtgcagtttgcccgcttgggacttgctgttgttgatgagcagcatcgctttggtgttgcccagcgtgccaaactatggaaaaagagcgagaatccaccacacattcttgtgatgaccgccacacctattccacgcacccttgccatgaccatatatggtgaccttgatgtaagcgttatcgacgaacttccaccagggcgcaaaccaatcatgaccatccataaatacgacaagcagatgacaagcttgtataacggaatccgccagcaaataaatcaaggtcgtcaggtatatatcgtgttcccgcttatcaaagagagcgagaaaagcgatatgaagaaccttgaagaaggctttgaggtgttgcgcgaggtgttccccgaataccacatgagcaaggttcatggcaagatgaaacctaaggataaagaaatcgagatgcagaaatttgtatcaggcgaaacacagatacttgtggctacaaccgttatcgaggtgggtgttaacgtacctaatgcctcagtaatggtgattcttgatgcccagcgtttcggactcagtcagctgcaccagcttcgtggtagagtaggccgtggtgccaaacaatcatattgcatccttgtcaccaaggtagagctggctgaagaaacacgcaagcgcattgatataatgtgcgataccaacgacggtttcaagatagctgaggtcgatttaaaacttcgtggtccaggcgatctcgagggtacacaacagagtggaatagccttcgatttaaagattgccgatatagctcgcgacggacaaatagtacaacttgcccgcgaggaagcgcagaaaataatcgatgatgatcctgaatgtaaaaaggatatatattcaatattgtggaataggttaaaagagttaagaaaaactaatattaattggtctgcaatttcctgatatcccgtttgttgatgggaaatgccaacgctttaacctttagtcttgataatcttgctacccaataaaataagttaagaaagtaacaaaatcgatttttttttgctatctttgtaaacgttaatgtgtttttgaggaaaaaatgttcagtcctcggtagttcttcgctgaatattatcaaccggcggaaaactttaaacctaaaattgatatgaaatattttaatgcgattttaaagacgacgattatagtggcatattttgttctcgcggcaattcctgtctgcgcccaagacctattggcgcgtcaggctcctgttgaccgcaagatgcgagctcttgatacacttgctttgaagagtgtaaccgagagagagcaaatggaatcgccagcagcacaactatatgaagattggaacaaccagtatgctcataaagctaccgagttgcccgactcattccgaatagatctccgacacttctgcatgccaactccaagtagagtagttacaagtaacttcggtgcacgttggggacgcactcataaaggacttgatatcaaagtatatatcggagacactattcgcgcagccttctcaggaaaagttagaatagtacgctacgaaggcagaggatacggaaaatatatcgttatccgtcataacaacggtttggaaacaatttacggacacctctctaaacagattgtaaccgaaaaccaaatagtacgtgcaggcgaccctattggtctcggtggaaacacaggtcgaagcacaggttcacatctacattttgaaacacgtctttgtggtgtagccttaaatccagcgctattgttcgatttccgtaaccaggatgttacaggaaacttctatactttcaagaaagaaacctatgatgatgattcacgacttgcaacagctgagcgtggtaaggtaggtaatggtggttacacccgtgatcttgttcagggtggcacaccaggacatagcaagagtgctaatttcaattcaagcaacgaagaaatcctttatcataaggttaagaaaggcgaaaccctctattcaattgcagagcagagaggtgttagcgtagagatgatttgccgtttgaaccatatcaccaaccgttcaaaggttcgcccaggtcaaatcctcagatattcataagcaagactatccgataaaaagttttatacattgcccggaagttggttagttccagcttttgggcatttttttacctgcaaatctacacaatctgctcatataaaaaatctacattaagtaatcccgaaaacacacagaaacacgaaaaatattcgaaaagacaaacctaaaatttatgagaaaagtcttggctgtacattgcttttttacatttttagttgcaaatagaacaactatacaaaattatttgtatctttgctcacaaacaataaactcgtaacattatgacggctattactataaacattccaaataataaggttagcttctttaagaagttgatggctgagatggggtggacttatgaagtcaaagagaagagtaataaaaaagctcgtctctatgatcctgagtctggtgagaatctaaatgataagactatgaaagccatagaagatgtgcgtagtggtaaagaacctgtgtacgacataaaatctatggacgaatttaaatcatggtgtgaagccctctaaggtatggtaaagtatatcgttaagcctacaggtccatttcgtaaagacttaaaattagccaagcgtagaggacttcctttgaatgacttatttactgttgtagaaatgcttgagaatgacactcctttacctgcaaatctacacaatcatactcttgctggtgactacaaaggttattgggaatgtcatataaatcccgactggttactactatatgaaaaagacactgaaatacgtataatatcattgtatcgtactggtactcattctgatatttttggaaagggaaagaaaagataacggctcattttataatggaaatgcgtattcttctgctctctttcaattttaagtttatgtttcagcctttatgaaaacaagttttcaacagtcagtaacataaactcaacagactaaggcctttcatcttttttgaaaatagagtactgatgcactagtgtgcaaacaagcgtaaatgatatcaccccattatcaatgagcaaccaacggttattgaccgaagggagttgaattgaactgcaaaatataataggcgtttttgagaatttctttatcaatatgctggagtaataactgaatattactttttccctgcatgccatgtattaatgagcaaagggctattgaatatagcttgctttattttgcaaaagaatacaaaattaaaaacaaaaataatatttggagtattagccactattttgtatatttgctataacatagagaaaaaacaaagcctctacgttaaacgcagaggcaagatatcttcggcttatagccttgttgtgaaaagtcttcacgttgtatctttttgcaaagatatataaaataccaacaacttacaagaattaatacaaaaaaatatggcacagaaaattttaggaattgacttaggaacgaactctataggtttatcactacgtaatgttgatttggcagataacataaaagatcaacttatgtatttttcatcagaaatcttcaaatctggtattggtaaagataagcatggagaatactcctttgctgctgaaaggaccaaacataggcagcctagacgacttaaagaaactcgcagacgcagactttgggcaaccttacatttacttatagagcataaactttgcccattaaagatagactcgctccaccaatgggaaacatataacaaaagcgagggtctttttagaaaatatcctatcgacgatgaagcctttgcaaaatggataacattagattttgatgctgacggaaagccagattatagtagtccttatcaattaagaagagaactagtaactaaacaatttgattttaataatataatagatcgctataaactaggtcgcgcattatatcatattgcacaacgtcgcggttttaagagtagtaaaggcgaaacaatttctttgcaagaaaaagaagacattgatcttttgggaaatagcgacatagcgcaagaaatgaaaaaatcagaaagtaaactttctgaagatattgtgtcgtatatgaaagaaaaaggatgtaataccgttggtgaagcatttgcatatcttgaagacgaaggtattcgaattaggaatagccgatataaagctattcgttcgcaatacaaagaagaaatagaaaaaatatttgatttccaagaaggacttgatcccaaatcagaactctttataggcttaattagcaaacaaaaagacaaaggaactatattttaccaaaaaggacttaaatctcaaaagggattagttggtaaatgcacattagaaaatacaaagtcacgctgtccacaaagtcatcctgaatatgagaaattccgtgcacttagctttctaaacaacataaaatacaaaacttctgtagaagatgattggcataatttatcattagaagttagaaacaaacttttcgatgacttgtttttggcaagagtgaaaaatgattttccattttctgatattagaattaaattggaaaagattctaaatgttaagcttgttctaggcgaaaagcaacgacttattaactttaaagataatcaatgtgttgctggttgtccagttacagctcgtatggttaaaatgcttggagaagaatgggaatcatggaacttgaatgttgataagtggcatactggtagaaaagacaagagtaaagagaaacatgcggtctcttataatgcacttgatttgtggcatgtttgtttctctacaagtgacccggaaatattacaggaatttgctcataaatcattaggatgggacgatgaacaaacccaaaagttattacgcttatggtcttctataagcgttggttatgcaatgttaagtttaaaggctataagaaatataaataaattcttagaatatggtttaaaatattctgatgcagtaatgcttgccaagattcctgatattgtagatttagataaggctggcataatgcaacttatagccgactatacaggcatgataaagaataaaattaacgctacaaaggatatatttgtaataaccaatagcttaatagctaactataagtctacaattgtagaacatcgctatgccgatcataatacgtcctataaacttgatgattcagaccgcgaagatattatgaaacgtcttataggctattatggtcaatgtaaatgggagaaaatggatgctgataaaaaaataatgttattagaaaaagtaacagattattatcagcaatttttctcctcaactaagcgacaattctataaggttcctcgtgaaagtgatagtttattagattatttaattgaaaagttccctgccgttgatactaaaaaattgaaaaagttatatcatccttcacaaattggaatctatgatatagataataagacaggcgatcgaagtgaatggcgtcttggttcacctaatataggtgcaatgcgtaatcctgttgcacttcgcacactcaatgtgcttcgacgtaaaatcaattcaatgcttgatgatggtcttataagctatgacgatacaagaatagtaatagaaaccacaagagatttaaataacgcaaatatgcgttgggcaatagaaaaatatcaagaatcacgtcaagaagaaaacaaaaaaatcgaaaatgttctaaaggcatattatcctaaacgtataataaacgagaaggatgttgatatcgctcgttatgcattggagcaatctgatattgatttatataaacaaacaaaaggtaaaaattttagtaaagatatagaacgctataagctatggcttgaacaaggtggtgtctgtatatatacaggcagaataatcaaactttctaatttatttgatgaaaacgcttttgatatagaacatactataccaagaagtaaatcatttgatagctcagatatgaatctaacgctttgtgattcatattataatcaacatattaagaaaaatcaattaccctcatcattgcagaattatgacaaaactgtcattattgatggaaaagaatatacagctataaaacccagattacaaaaatgggaagaacgtgttgagagaattaaaaaaaatattgagttttggaaaactcaatcacatagagctcaagataaaaatagaaaagatatttgtattcgtcagcgtcatctgtgggctatggaactgaagtattggcaagagaaacttagccgctttaaaatgacagaagtaacagatggcttccgaaatagccagttagttgatacaggtattattactcgctatgctacacttttcttaaagtctattttcacaagtgtagaagttgaaaagggttctgtgacttctgatttcagaaagatgttaggtattcaaagtcttgaggagaaaaaaaatcgtgaccatcattctcatcatgctattgatgctactatgcttactgttattcctgttgctgcaaagcgtgatcgtatgttgcaattattctataaaatacaagaattagaaaaagcgattacatttatcaagaataaagacacctatagctcaatgctttatgagctagaagggttgaaattaaaacttgatcaggaaaagcgcgattgtcacattggtaaaaatgttggtgaattagtcgattttatagactcgaatatcattacaaatcatcatgttaaggataaagctcttgccttatctcgccgtagagttagggctagagggaaaatattgggtgacaaaaatcagcccagatggcatacaggtgattctatacgaggtaaaatatgtgaagcaagttattatggggctattacacaatacgagaaagatagtaacggaaaggttattgttaataacaaagtacctcagattaatccaaatctgaaatatgttattagacgagaactaaaatacaaaaaaagttcccaagatacaggcttttcatcatgggaagatttagaaaaagtcattgttaataaagaacttgttaatatgatgaaatctcagtttgatgcaagcatatcattcaaagatgcctgtgataagggaatatatatgcttgatcgtcataacaacaaaatcaatagaattcgtcatataagatgctatgcaagaataactggtcttaaaataaaagagcaggtatataaatcaaataaagaatataaaaattatgcctattctactgtaggtgatctctattgcatgtgtaaatatagtgatggtattaatacatcgtttgtaatttatagcttatatgatatatctgaaaaccgaaaacatggattagaagatattccaaattatataaatgataagaagaataataaattagaattaaaagatacgataaaaccaggtgatatgcttctgttatataaggattcacctaacgaattatataataaggaacataaaacacttctaaaaagattatataaagtctgtagttttgaaaacgatggattgcgaatcaagttgagtcatcatatttgtgcaaaagatgcgaagggtgaatcaattaaggattttaataatttacctattatcataagaagtgcaattgggaaattgaaatacttgaaaatgggtgaaaatgctgactttcaaattaaaaatggaaaaatagtatttaataaatagtcttacttatgatcaagaaaaccatatatttcggaaatcctgcttatctttccttaaaggataaacaattgattataaagttacctgaggtagagaaaagtaatctaacagatgagtttaaaaagaattctgtccattccattcctattgaagatataggtataatagttcttgatcatcagcaaataacaattacacaaggagttatggctgcattattgaatatgcagctataattacttgtgattcttcaaaagaatgcccatagggttaatgctacctcttacttgaaataaactatataatgaaagatttcgcaagcaaatagaagtttcattacctcttaaaaaacagctatggcagcagactgttaaagccaaattagaaaatcaaggtttttgtttactctttttatttatattttactgattatcaataaagtacaaatgtcgagatgttgattgtattgcaaagatacaacttttgaagcaattcacaactcatgggatgcacaaaccgattgatgttgattatattgcaaagatacaacttttgaagcaattcacaacgaggtttaggttgtttataagttgttttagatgttgattatattgcaaagatacaacttttgaagcaattcacaaccgcgcacaggatagccttgggcatcgagctgatgttgattatattgcaaaaatacaacttttgaagcaattcacaacagttggctatttcctgttgtatcttgtcgagatgttgattatattgcaaagatacaacttttgaagcaattcacaacggtacaaagtgacacgaacaaaaaagtaaagatgttgattatattgcaaagatacaacttttgaagcaattcacaacaaagctccgtattaatacgaacatgttcgtgatgttgattatattgcaaagatacaacttttgaagcaattcacaactttaaccaacatttcgcagaggagcaaatagatgttgattatattgcaaagatacaacttttgaagcaattcacaacactcttttttgtgggcttctgtgctgcttcgatgttgattatattgcaaagatacaacttttgaagcaattcacaacgaggtttaggttgtttataagttgttttagatgttgattatattgcaaagat

SEQ ID NO: 4168 - DNA, 6904 bp, synthetic construct
  source 1..6904: mol_type = other DNA
  misc_feature 1..6904: note = Synthetic
acccggggtgcgtggattgaaactgcatgggcatttggcacaatgagactggcggagtcgcaccccacccggggtgcatggattgaaacatccttaaaccatcgtctagaccatcaaagccatagtcgcaccccacccggggtgcgtggattgaaactccgtgctaactggtttgtaagaggtcagcctcaacgtcgcaccccacccagggggcgtggattgaaacttctgaactatatgcgatttggttgcgtggtgaaggtcgcaccccacccggggtgcgtggattgaaaccagtatctacaactcattcattgaaaaacaaggaagtcgcaccccgcccggggtgcgtgcattgaaactgaggttgaacagacactacagagccaggaaaagggcgcatcccgcgacaaagatattctcttattcaatttaatggggcttttcattatcggtattaataagcacaatttcccctttttctctttattagcaattttttacacaacgttttagaaatagcgttaactacttcacattctcaaattctcctttctcaaattccatattaattgaaaggtcgtgttataaaaattatacaccacaatacctattaagaagtttacaataaagtttaagctaagttaccttgacaacaacgccgatcaaaggagaaggaattttgtgtatgtgagcaataagttcaagtttatcattctcctcaactatgagatgaaactcaagaatgggaaaacaaaggtcctaaacttcatcactacacaaaaattgaacaagaataagaggtttgaagggagcaggtttgacagaatataaaactcagcatggcggggctatcgacaccctcataaggctcagcctcctacgttccaagctatcacgtctctaccatgctgaactttacattgcaaatgtaaagagaatattcgataaaagtaaattatagccgttggacgttatggcaaaaccaaactacatttacgacaatgatactttctatcagatggtacaagatagtgcagacagacattaccatccttgcagttttttgttttatttcgtatgtttgcaatagttatctaaaagaaataaaaaaactcccacgttaaaccgcgggagcaagaaatcttcggcttatagccttgttgtgaaaagtctttcacatcgtatctgccgcaaagatacagaataatttaaaatacaaacataaaaacctaaaaaatggaacaaaaaacactcggacttgatcttggtaccaactctataggcatttctctacgcaatcccgctcttggagagaatctcaaagagcaactagaatatttctcttcagacatctttgaagcaggtgtaggaacggacaaaagcggagaattctcctacgcagcacagcgcactacatttagaagtgctcgccgcctcaaactacatcgccgccgacgcctgcaggccacgttgcgcctattgatggaccacaagctgtgtccgctttcagaagattcctataaacaatggagcgtttatgataaaacacaaaatctgaaacgtgaatatcctattggagatgaaggcttcaatcgctggataaaacttgacttcaatgcagatggtaaacccgactacaccagtccgtaccaattgcgctgcgaattggctaccacgcaactcgacttctcctctcccgaaaacaaattcaaactcgggcgcgcactctatcatattgctcaacggagaggtttcaagagcagcaagggggagacgattgctgaacaggagaaaaacgagaagttcagcgctaatagcgacgatctcgaacaagaaatgaagaaatcggagatgaagcgctcaaaaggtcttcgagaactacttgaaacacaaggcttgaatactatcggccaagcatttgcctacttagaatcgcaaggtacgcgcatccgcaacaatgaagatatccaagcaacgcgcgatctctacgaaaaagagattacatacatttttaacttccagaaagaactcagcatagagagcgaactctacaaacgacttatcagcacaaagaagggtgaaggtaccatattctataaaaaccccttgcgttctcaaaagggactcgttggaaaatgtactctcgagccgaagaagggacgttgccccatcggccatcccgaatttgagaagttccgcgcgtgggcgtttatcaacaacatacgctatcgccgcactattgatagcgaatggcaagagcccacaatagaaatgaaagaaagactctatcgcgatgtcttcaccgcccgcgtcaaagcagatttcctcttctctgaaattcgtaagtggcttgaaaaagaacttgaagtccaactccattgggacaacaataagagcctcagcaccatcaactatgcagacaaacagaatgttgcaggatgccccgtcaccgctcgcctcgtcaaactcttaggtaccgattgggaaagattccaacaagaaggaaggaaagaacacaagacacacagcaaacaacatcccacaaaacacacggtttgctacagtgccttagatatttggcacgtctgtttccaggcagatgagttggaagatgttcaaagttttgccaaagattcgctccaatgggacgatgagaagtgcaaactattgctacgcgtatggacgagtattccgcaaggctatgccatgttaagtctcaaagccatccgcaacatcaatcgtatgctatgccgcggactaaaatatagtgatgctgtaatgctcgcgaaagtgcctgagattgctggcatgaacgagagcgatattgacacactcatcgaaactttcagcaaagacctcaaaacagaagttgatcgcacgaaagacatttatatcatcacaaactcgctcatcgctgattataaatcactctcctttgaagatcgatttgcagaacacgatacaagctattgcttgcaggagagtgataaagaagacatcgttcaacatatcatcaaacattttggagaaatcacttgggggctcatggacgctgaagagcaggaaacgctgatgaacgaagtggaacagctctatcaaaactttttcagcaaaacgaagcgtaatttctatgatatcccaacctatgctagtacgctccgcgcgttcctttgtgaaaagttccttcatgttgacgaacaggcatgggcaaagctctatcatccctcgcagattgcatcctatcatccagaacgcgataagaactgtcccgattcatggcgtttaggtacaccaaacattggggccattcgcaatcctgttgctctacgcacactcaacatactgcgccgaaaaatcaacgcgttgttagatgccaatatgattgatcccctggagactcgcgttgtggtagagacaacacgcactctcaacgacgccaatatgcgctgggccatcaatcgcttccaaaaagagcgcgaagaacaaaataaaaccattcgtagtattcttgaaaaagaatacacaacacgcgctatcagtgagacagacatcgacaccgctcgctacattcttgaacaacgcgaagagcatatctatcggacggaaaaaacaggagaacttcagcatggattcagcttcaacattgatgcaaagcgttataaactctggttggagcaaggcggaatctgtttctatacaggaaaagtcatcaacctcaccaacctcttcgatgataacgcctttgatatcgaacacaccctgccacgcagcaaatcgttcgacaattcagacgccaatctcaccatttgcgacgcacattataataggtacatcaagaagaacattctccccgcacatctgcccaacttcgagcatgaccaaaccatcaatggcacactctacaccgccattaagccacgtttggaaatgtggagaaagcgtgttgaacgactcaaagttaatgtagatttttggaagaaccgtacacgccgtgcacaagacaaagacacacgcgactattgtatccgccaacgccacctctggcaaatggaactaaactattggcacgaaaaactatcccatttcgagatggaagaaatcaaagaaggtttccgcaatagtcagttagtggacacaggcatcatcacacgccatgcagcacttttcctcaagagcctcttcaaaaatgtggaggtacagaaaggaagtgtcacagctgattttcgaaaaatactgggaatccagagcgttgatgaagcaaagaatcgcgacaaacactctcaccatgctattgatgccaccatcctaacaactatacctattgctgctaaacgcgatcgtatgttagaaatcttttatgagatagaagaaaagaaacacttaatgactagcgaaaatgcagaaagaatcaaacaagagctagaaggactcaaagaaagtttgaagagagaaattcgtgagtgccatatcggatataacataaaagacgtccccaacttcattgagactgaaatcctcatcaaccatcatagtaaggaccaaacacttaccaccgcccaccgcagggtacgtatccgtggaaaaaaagtttatacaaccaacagccagggagaaatcgttgagaaatggagttctggagattgcatacgtggacaactacacaatgaatcctactatggagcaatccgactcccccaagaaatagaaacagaaaacggaagaaagccccaaaccaaagatggccactttgtttacgatgagaagaacgaaaatatcactatggtaattcgtgttcctcttaattcgttcactgctatgaaggatgtcgataagattatcgatgcttctctacgggaagaaatacgcaccaccctcactaagcgtttggaggaaggcattaccttcaaggatgccatcgttcaagacttctggcgcatagataaagcaggacaagaaattcggaaagacaagaagggacgcccgatttgccctattcgacatgtccgctgcaaggtggccactgggcgaggcttcatgacctacgaaagttctctatccatccgaaggcacgctctaacatctcaaaaagcacttgtacatctacctaatcgcaactacaaacaaaacgtttatgcgcaaaacaacaccaattacctcttccttctctacgaaggaataaaacaaggaaaactggtcagacagagtcgcattctgaatctttatcaagttagcgaaatgctcaaagcaggatgttcaagaaatttagagcaaagtctgtggcatgaacctttctatgcatcgttcatcgagaaaaagattgagtataaactttctgctatcatcaaaactggtacaagagtgctcatgtggaacgaaacacccgatgaactacgagagctctccaaacaagacctactaaaaagactttttgttgttaagaattttaacaaaacgggggccaatttactttatattactcaccaccttaatgcaactggagcaattgatttaaaactagtttctaatagtctgaactgtctcattgaacaccgcgattttgagatagatcttttaggaaatatcacattaaaagattaaatcgtgatcaaaaaaactctctactttggaaatcctgcttatctcaacctccgcgacagacagcttgttctccgtctgcccgaggttgagcaagcttccaatctctctgccgacttcaagcaaaaagcagaaagaaccatcccgattgaagacatcggtattgtagtattagatcatcaacgcatcaccatcacacaaggcctattggctaaacttctcgacaacgaatgcgccgtcatcacctgcgatgagcgatgtatgcctacggggctactccttcctctcaccggtaacacactacaaagtgaacgcttccatcaacaaattgaatcatctctaccgctccgcaaacaattatggcaacaaaccattcagcagaaaatcctaaaccaagctgccgttctacaacgctgtagccactacgaaacacgatgtatgaaagtttggagcgaagaagtaaagagtggcgatacttccaacttagaagcccgcgccgctgtctactattggcaacacttcttccccactcatcctcttttcgttcgcgacagagaagcaacagatcctaaccaacttttcaattacggctatgccatcctgcgcgcagtcatagcccgcgctctcgtagtaagtggacttctccccactctcggccttcaccaccacaaccgctataacgcctactgcttggccgatgatatcatggaaccttatcgcccctttgtcgatgaattggtatttcagttagtagctcaatacgatttctgggcagaaaacgcaatactaacaactgaactcaaacgagagttgctctctatcccaacgctagatgtcatcatcggaggtaagcgcagcccactgatggtggcagctggcatcacgacagcctcactcgccaaatgctttgcaggagaacaacgcaaactgatctttccgcaattcacatgaaacgctttagtgaatatcgcattatgtgggtattagtattcttcgatctccctacgctgacaaaagaagaaaagaaagcatacaccgaattccgcaaaaatctccagcgggatggtttcataatgtttcaattatccatctacgcccgccactgctccagcattgagaatgcaaaagttcacatcaaacgtgtcaaatcttttctccccgaatctggaaatgttggcattatgagtatcacagataaacagtttggagctatcgaaattttccaaggagcacgctacaaagctccaaacactccaggacagcaactcgaattattctaacaaaaaaaggtctcaccacttgggtg

SEQ ID NO: 4169 - DNA, 5810 bp, synthetic construct
  misc_feature 1..5810: note = Synthetic
  source 1..5810: mol_type = other DNA
agtttgcatttgtagaataaactaagtaatgtaatgctgtaattaagaacctaaaagaagtctgagtagtaaacttgtagtgaatatataaaaaagcccctacggttgtccgcaggaggcaagaaaaatcttcggcttatagccttgttgtgaaaagtcttcactgtgtatctggttgcaaatttacaactattttttgaatatacaagtaaaaccataaaaatatgacacaaaaaattttaggcttggatcttggtactaattctattggctcttcggtaagaaatttggacctctcagatgatttgaaagggcagttagagtttttttcttctgatattttcagaagtagcgttaataaggaaagtaacggacgtgaatactctttggctgcacagcgttctgcacatagcagaagtcgaaggttgaatgaagcaagacggcgtaagttgtgggcaactttggatttactaattaagtatggtttttgcccgatgaatcctgagtctttaatacgttggcgtacttatgataaacagaaaggattttttagagaataccctgtagatgataaagaattcaatgcatggatacttttggattttgatggtgacggtaaacctgattattccagcccatatcaactacgtcgagaacttgttacacgccagtttgatttcgatcagcctattgaacgttacaaattgggacgagctttgtatcatattgctcagcatcgcgggtttaagagtagtaagggtgaaactatattacatcaggaaactaacagcaagcaatcacttacagatgaaactacagatgtagctggagaaatgaaagcttcggaagagaaattgtcaaagggtctgtctacctatatgaaggagaataatcttttgacagttggtgctgcttttgctcagttagaagatgaagatgttagagttcgaaacaataatgattatcgagctatacgttcacaatttcagcaagaaatagaaactatttttaagttccagcagggtttgtttacagaaaacgagttatatgaacgccttgttagtgagaagaaaaatattggtacaatcttttataaacgtccattacgctcacaacgtggtaatgtgggtaagtgtacacttgagcgtacaaagccacgctgcgctattgggcatccattgtttgagaagttccgtgcttggacattgattaataatattaaggtcagaatgtctgaagaggaacaagcagaacaacttcctatgaagttacggttcgaactttataatgactgctttttagcatttgtaagagcagaatttaagtttgaggatattcggaaatatcttgagaagcgtctgggtgttcatttctcttataatgacaagactattaattataaagatagtataagtgttgctggctgtcctataacagctcgattcagaaaacttttgggagaggattgggagtctttccgtgttgatgggcaaaaacagagactggcgcatggtaagaataacgcttcgttacatacagtttcttatactgttgaagatatatggcacttttgttatgatgcggaggaaccagaagtggtattgtcttttgcacaagatagtttaaagtgggagaagaaaaaagcagaagaactcgtccgtatctggtcagcaatacctcaaggctatgctatgttgagccaaaaggctatccgtaatatcaataagatgttgatattgggaatgaaatactctgatgcagtgttacttgctaaggtcccagagattgtagagataactgatgatgagattctttctgtaacagaagattatcattgtgtggaagcacaggttgggtatgagaaacagattaataatattgttaatgctctcatagccaagtataaatctgcgtcagaagaataccgttttgcagatcataactatgattatcaattagatgagtctgatgataaggatattattagacagatagaaaatagtttgggtgcaaaacgatggagtttgatggacgctgatgagcagactgatattttacaaaaagttcgtgatagatatcaggacttctttagaagtcacgatcgtaagtttatagagtcacctaagttgagggatagttttgaaaactatcttacaaagaaatttctaattgtcgatagagagcaatggaaaaagttatatcatccttcacaaatcgccatttatcgtccagttccagttggtaaggatcgctctgctttaagattgggtaatcctgatattggtgcaattaagaaccctacggtgttgagagtgcttaatactttacgaaagcgtgtgaataaacttttagatgatggggtcatatctccagatgatacaagagtggttgtagagacagctcgtgagttgaatgatgctaacagaaagtgggctctggatacttacgacagaatccgtcacgatgaaaatgagaagataaagaagattcttgaagagttttatccgaaacgtgatactataagtacagatgatatagataaggcacggtatgtaatagaccaacgtgaggttgattactttacagaatctaaaatctataataaggatataaagaagtataaattgtggttggagcagggaggacagtgtatgtatactggtcgtaccataaacctatcaaacctttttaatccaaatgcttttgatattgagcataccatcccagagagtctcagctttgacagttctgatatgaatcagactttgtgtgacgctcattacaaccgtttcataaagaaaaaccatattcctacagatatgccgaattatgataaggctgttacaatagatggcaaagagtatccagctataacatctcagttagaacgttggatagataggcttgagcgtcttaatcgcaatgttgaatattggagggggcaggcaagaagagctcagaataaagatcgtaaagaccaatgtatgcgtgaaatgcatctgtggggcatggagcaggaatattggaaaaagaagttggaacgcttcacagttactgaagttacagatggatttaagaatagtcagcttgttgatacacgagttataacacgtcatgctgttttatatctgaagagtattttctcacatgtagatgtgcaacgaggagatgtaactgctaaatttagaaaaatacttggtatacaaagtgtagaagaaaagaaggaccgtagtttacattcccatcatgctatagacgcaacaactttgacgataatcccagcttctgcaaagagagatcgtatgttggaattgtttgcaaagatagaggagataaataagatgttatctttctcaggaaacgaagataggataggattgaaacaagaacttgaagggttgaagattcagcttagtaaagaagttaaggcttgtaggataggaaataaagtttctgaaattggtatgtttattaatgataatatcattgttaatcaccatgttaagaatcaagctcttacaccagttcgtcgccgattaaggaagagaggacatttagttggaggagtggataatcctctatggcagactggtgatgccttgcgaggtgaaatacataaggcgagttattatggtgcgataacacagtttgcaaaggataaagaagggaaagttttgatgaaagagggacgtcctcaaatagaacctacgattaaatttgtaatacgtagagaattaaagtataaaaaatctgctgcagacagtggctttgcctcgtgggatgaccttggaaaagccattgttgataaggaactttttgctttgatgaaagggcaattcccagcagaaacatctttcaaggatgcttgtgagcagggaatctatatgataaagaaaggaaagaatggtgagggtgatattaaattgcatcatataagacatgtgaggtgtgaagcccctcaaagtggcttgaaaataaaagagcaaacttataaatctgagaaagaatacaagcgttatttctatgctgcagttggcgatttgtatgcaatgtgctgttatacaaatggtaagattcgtgagtttagaatatacagcttgtatgatgtttcttgtcatcgtaaatctgatatagaggatattccaaagtttatcactgataagaaaggtaatcgacttatgcttgattataagttgcgtactggcgatatgattttgctttataaggataatccaatggaattatatgatttagataatgtaaatttgagtcgtcgcctttataaaattaatcgttttgagtcgcagggcaatttagttttaatgactcatcatttgtctacatcgaaagaacgtggacgttctcttggtaagacagttgactatcaaaatcttccagagtcaattcgcagtagtgtaaaatctcttaattttcttattatgggcgagaatcgtgactttgttattaagaatggtaagataatcttcaatcaccgatgataaagaaaactttatattttgggaatcctgcttatctctcacttcgtaatgggcagttggttatccgacttccagaagtggaaaaagcagaacttcctgatatcgtaaaacaagagactgttagaacgattccaatagaagatattggtgtggtggtattggataataagcagataaccattacacaaggtgctttagcagagttagtagccaactctgctgcagtaataacctgtgataacaaatgtatgcccacgggaatgttgcttcccctttctggtaatacattatatcaggaacgttttcgtaatcagatagaagcctcaattccattgcgtaaacagctatggcaacaaacggtaaaagctaagatagagaatcaagcgtattgtttacagaagaatacttctaaatcatttgtccctcttcatgttcttgctcgtaaagttaggagtgatgatgctgataaccatgaagcgcaggctgcagcctattactggaagaatatcttctttgaaggtttcacgagagacaaggatggtgttccacctaacaatctgttgaattatgggtatgcaattcttcgtgctgtgatagctcgagcgttggtggggagcggattgttacctgtctatggaattcatcatcataaccgctataatgcatattgtttagcagatgatattatggaaccttatcgtccgtttgtggatgatatagtcctttcaacgatgaagaaaatggaggtttctgatgatttgacagtagaattaaagcgggaaatgttattaataccagttcttgatgtttttataggtggtaaacgtagtccgttgatgatagctgcaggcttaacagcagcaagtcttgcaaagtgttacaatggagatactcgtgaaatttcttatccttcttttatttgatgcagcgtcttagtgagtatagggttatgtgggtgatggtctttttcgatcttccaacgaatacaaataaggaaaaacgtgcttatactattttccgaaaagatttgatgaaagatggttttactatgtttcaattttcaatctatgttcgtcattgtgcaagcagagaaaatgcagatgttcatgtgaagcgtgtaaaatcgtttatgcctaattctggtaatgtctgtataatggtcatcactgataaacaatttggtgagatagaacttttttgtggaactcagcctcaagaacctaatgccccaggacagcaactagaattattctaaaaagagggtgtgtcaaaattgatacactctctttttttgcacaaagccccgacttt

SEQ ID NO: 4170 - DNA, 23279 bp, synthetic construct
  source 1..23279: mol_type = other DNA
  misc_feature 1..23279: note = Synthetic
gaatatataaagtagtttcagatctcctcttgggataacatcatctagggtcctttgtaccagtaatggaaataaaaggtcaagacctgccatggcaaaggcacaaataaagtccagtattactaatttaaaatgaggtttataatatcttgcaaaacaaagtagatccttcatatcaactacaccgcctgtttattttttgaaattataacgcaaaaatttatcttctgtaagtttatcttataaatgagcaagtattgaaattatcaataatatattttttgtacaaactattttagcatatattaagaataaatatgaaaataataattggaattttaaattattattgacttttaaggtttataatagtatattttttactgaaagtgaatacatttttaaggttttccaactttggaattaaaagggaagaggagtgaaagactcccgcggtcccgccactgtaatgcagacgaaggcaaattacccactggattaaaatctgggaagggtgctagtaggatgaagctgagccaggagacctgccttaaaaataatattgtcaatatcacttgcggggacgagagatgtagaggctttttttaggcttttaaaatttctctcctgagattactcaggatttttttatttcctgaaaaccattataaaaatcttaaggaggaaaaaatgaagaagtttagtattttggcaggagcattattattggcagggactctttttgcatcagaaggatatgaaaagaagcctatgtttgaaactatgagggcagcggacaaaggggcagttgtaatggttcactttggaagcagttatcctgaaacaagaaaattaacaatcgaagcgattaacgaaaaggcagaagaagaatttaaagatttagaggtgagagatgcctttacttctagaatcataatgaaaatactcaaaagaagaggaatagataaagataaccctaaagaggttttagaaaccttaaaggctgagggatatacacatgtgttagttcaggcgactcatgtaatcgacggtgtagaggctgaaaatctaaaaaaagagatagaagaatttgaggacgatttcaaagagataagattgggaacatcacttcttacaactccagaggactataaggaagtggctcatattttaggagataaaatcggtaaactgaaaagaaaagaagctgcagtatttgtaggacacgggactcacgaccctggaactgctgcctatcctatgatggactatgtcttcaaatctgaaggatataaaaatttttatgtagggactatagagggttatcctatatttgacaatgttgtttctagactaaaacaagcgaagataaaaaaagtaaagcttatgccatttatgtttgtagcaggagatcatgccaataatgatatcgctgtagactggaaagaaatgctagaggaaaaaggatttaaggtggaagttatcttagaagggctaggacagcaagctgaaatacaggatatctatatggagcacgctaagtttgcagccgaacatgaagcagaagatatggctaaaaagaaaaaagaatacgctgaaggtaaagaataatgattttatgcaggcagaaaatctgcctgcattttttgttcgtttaaggagatcttaaaaaaataatgaaaagccttatttctgcaaagtttttttcatttcgagtagggtcaatataaactatttgatatttttgaaataatagccgataattaattgaagagtctttgttgatattatattggttttacaccttaagattttcataaaagaataaaaaaggaggtagaggttggatggcaaataaaaattactcggataataatttaaatatttgtgaaaatgtgaaaaagggtattctgatggttcactttggtacagtaaaagcagaagtcagaaaaaatactttgggtttactaaataaaaacatagctgaaaagtttcaggaatttcagataagagaggcctatacttccagaatgataataaaaagaatatatacaaaatatgaagttagaaaaagtactccaaaagaagcccttaggatgatggcacaagatgggtttacccatgttatagttcaggctagccatgtgataaacggtctagagggagagtatctaaaggatgagataaaatattttaaagatgaatttcaggaaataagaatgggagacccacttctgactctgccagaggattatattcagatagccgatatttttaagaagaagtttgaaaatacagggggagcagttgttttggcaggtcacggaacaagacatcactctaactctgcctatggtatgcttcagacagtttttaatataagagagatggaggagttctatataagtactgtagaaggatatcctgccttagacgatctgataactcagctgaaaaaagacagggtgaaaaaggtgacccttgttccttttatgatagttgcaggaaatcatgtcaaagaggacatagacggagaatggcgggagactctcgaaaaagaaggattttctgtggaagttatcatgaggggaatgggagagatgcctgagatacatgagatatttgcgggacatatcaaaagatctataaattctaaagaaaaagatctgaaaaataaaaaagatacgatacttaaaagcatataaaattataaacttggctggggatattactgtaaatagccatagtgttgtgatataatatgcaaaagctctataggaagtgatgtttgaaatggaaaaaagaaggtttagaatatggcttatctctgggatagctatattctccgtagctcttttagtatatgccgggatgggatatatcaaaatccctgtaaaagatgtttttgaaatattatttaatctaaatcctgaaaaagttgggatgactgaatgggttatagtaagagaggtcaggctcccacggatagtagtatctatgatagcaggagcagctctaagtctcagtggtcttgtatttcagggagtactcttaaatccactggcagacccctatactctgggaatatcagcaggagcatccttcggagcagccctcgccataatattgaaactaagttttctaggtggctttacagttcagctaatggcctttgtttttgcaataatcagcctgagtatggttttaaaaatggctactttcggagggaaaataaattctgtatcacttatactttctggggtaataataggtgcatttttttctgctggactcacctttaccaagtatatagccggtgatgaagtggcttcaatagttttctggctcatgggaagtttttcatctaagacctggagcgaggctcttattatgggaatagttactttgctcggatttcttgtgtttatttattatggagaagagatgaatatattatctctaggtgaaaaaaatgccctttccatgggggttgaaacctctagagtcagaaaaatacttctggtaactgcttctataatatcggcagtttcagtatctgtatgcgggataatagggttcgtgggtctgatagtaccacatctaatgagatttcttgttggaactgacaataagaaacttatatttatatgtgccatctggggtgctataatattatctgctgcagacaaccttgtaagagctgtgctgccaaatgagattcccataggaataatgacctcacttttaggagcaccattctttgcctttatatttaggaaaaggctttcgggaggtagactctagatgataaaagctgagaatataaattattcggtacctggaaaaaatataataaaaggtgtggaccttcatataaaaaaagggcgattttatgggatactaggtcctaacggaagcgggaaaacaactcttatggacataatatgcggagtgatagccgattaccatggaagtatagaggtcatgggtaaagacctgaaaaagtatcataaaaaagatttggccaaagttttggctctagttccacaaaactttaatacttccttctcatttaatgtggaagagatccttgagatgggaagatatccacataagaaaaagtttagctttcttgggaaagaagacagagagataataaacgaagtggtaaaagaactagaactaggtagtataatagacaagaaaataactgatcttagtggtggagagagacagagggcgatttttgggaaggcactgatacaggaaacccctatacttttcctagatgaatctacatccaatctagatccctattatgcccactcccttctaaaaaaagtaagggacagggtagaggaaaaaagcctaactgtgatatctgtgtttcatgattttacccttgcttcactttactgtgacgagatcatctttttaaaagatggtaaagtggtgaagattggggaaacagagcatactctcacaccggagaatataaaaaatgtcttcaatattaacagtaaaatgatggaaagtgatgacaagaaatttgttatcccgtatatgtagggggtttttatgaaattcaaaatagctgtgatctggatgcttattactataaatgtttttgcatacgaggtcatggaaggcagtaagcctagaaaactagaaaaaagttatcagagaataatatctatctatcctgctcatacagaggttattttggatctgggcggcaagagcaaacttgtagggacagtaaaagaaaagggaatatcagaaagaacccaggggattaaagggttctcctataacgattccctggaaaaatatctttctgtaagacctgaccttgtcattataaggcctatgtacagagataagaacaaaaatttatttaaaagacttgaatctatgggaataacagtggtgtcacttcagcctgtcagctataacgacctagagaggtactggatggatataggtcgtctcatagggagagaaaatgccgggaaagagtatgtgaataagtaccgtaagggcctcgagagtataggggttcaagataggaaaagaaaaaaagtattttttgaagcaagaatgcaaaacggactctatactgcatcaaaagaatccatagctcattttataatagaaaaagccgggggagatattcttactggaaatgaagagcccttaagaaaaggaacttctaccatcacccctgtaaatatggagtatctaatatcccaggggtcagcaatagatacttaccttgtacagcagggtaggatgaactctagaaccaaagaagacataaagaaaacacctggttactcctctataaaggctgtaaaaaccggaagcatttatatgatagatgaaggggctctttctaggcccacaataaaaatattagacgctatgaaagaaatcaaaaaaatactttcaaaacagtcataaaaattttctcttttttgtactttcttgagtttggacaaatctcaagttataattacaatagataacaagatacaaagaggagggaaatttatggaaatcaaaaacatgaaatcaatggatccaaatcttttgttaagtattgtaaatatgaagctccgagacgagtttgagagtcttgatgatttgcttaggtattataatttgaaagagagtgatctcactgataaaataaaagagatcggctatcattattgtgaagaaaccaatcagtttataggatgttaaattacagtcccttaaaaaagggctgttttttattagttttaatatccttaatagatgttgcggctgtgattagtctaagtagttggatttatccaaagttccgttacttttctttcaagagaaaagtaacaggttcaaatatagtcagcaatttatgaactttttttcaattagcaactacaattaattattttacaaaaaaggagacagcatgaaaaaatttgacctggttatttttgaccttgacggtactctcactgattcccgagtggggataacaaaatcagttagttacgcccttgataaaatgggtataaaaccgacctctttaaaggagttagaacattttatagggcctcccctaatggacacatttatgggacattataaattttccaaatgtgattcagaaaaggcggtaaatctcttcagagaaagatattctgaaaaagggctctatgaaaatatcccatttcataatataaatactcttttgtccgatttaaaaaagtccgggatgaaacttgcagtggctacatctaaacctcagcatttttctgaaaaaatactagatcattttcttctgagtcaatattttgacgagataataggaagcagtctagacaacagcttttcccataaaaatgaaataatagctgaaaccttgaaaagatttcctgggatttcaaaggaaaaaactgttatggtaggggacagaaaatttgatatagagggagccagagaaaacggcatattatctataggggtaaaatacggttttgcagacccaggagagatagatgctgcctgtcctcagtttcaggcagataatgtagaagatctttttaagatattattgtagaaaatattcagggaggtttttatggaagtaaacgaaattcaaaaacttatgatctcatatttcgggaaggatgtaagaaggataaaccatgccctgaaagtctactgctttgccaaaagtataggggaatcggaaaatttagatagtgaaaagcagaaaattctggagatatcagctattctccatgacataggtataaaaattagtgaagaaaaatataattcctcagcgggaaagtaccaggagttagaaggcccagatgtagccagaaaactcataaaagatatagacttatctgaaaaaataaaggaaaggatatgctatctcatagggaatcatcacagttatgacaagatagatggaattgattttcagatacttgtagaggctgactttcttgtaaatatatacgaggataaattgaattcggaaactgctgctactgttaaaaagaaatattttgagacaaagacaggaagagaatatatcagttcactctacggagtgtaaaaaaaatcagtctataccgaatctattttcggcagagactgattttttaatttaacaaatatataatctattttacaaaattaatatcagaaaatttttctttggtaactaggataccgtcttcatctaggtaaagataggacccatgatcaactttgactccggcgatctcaagtgtatctcctattttcccttgggattttttgctgcttctgagaggataagttcccattgccagtactgtcattggcatagtttttagcatattggtatctctcacaaaaccatctataattattccaccccatccattgtctatggcaaatttacaaagattatctccaactactgcacaaaagtcccctgagaccttcgccactgcaatacgattatttcctggagtctgaagcagtgttttcagagtagaattgtcttcatataatgagactgtcacaatctcaccgctgcaacgtgtttttcccccgtaagatttgaaagacataggctggaacacctggatattttctctatggatatcacatatttctgctgttccgtgagtatctaatttttcagacataatttccccctttataatgaatctgaacttgcttaaaaaagccttcccctttcggctctttgaagcgtcctacaattctatcaactttgtaccaaaaaaacaagctttaaaaaaactgaaaattagttgactacccatctaaaatatgataaacttttaaaatagaaattagttgtgtagccaacaaaaaaaggaggacaagattatgaaagaacctttgggaagaactgtaaaatttttaaatatagagataagaaaatttttggattttcatctcaacgagtaccagctagggaatggtcagtttgcaattgttatagaagtaagtgaaaacaaaggaataaaccaggatgctctggctcaaaagatgggtgtggacaagacaaccattgccaagactgtaaaaaaacttgtggaaaatggatacatcataaaagaggaagatgaaaatgataggagatcgaaaaaactttacactactcataaggcagatcttatttttaaaaagattaagaaactgattaatttagagaagcaggtattgactcatgggatctctcaggaggagataaaaatatttttaaaagtagtagactgcatgaaatcaaatatttcggaatatttagaaagcggagggagttcagattggaaaaaataaaaagattaggtgaagaaaagataagcaaacttctcgtggaattttctttgacggcaataatttcaagtcttgtttttgcattatacaatgtagtggacaggatgtttatcgggaagtgtctgggaccctatgccatggcggggatcagtattacctttcctatatttaccatttatatagctgtgggaatgctagtaggccacggaggaggcagcatagtctctctaaggcttgggcagggaagaaaagaggaagccgatcgtgtactgggaaacgtgtttacgctatacggggtatttagtattattctcatgactttgggttatctgcttatggaccgacttatgataatatttggagccactgaaaataccattatatacgcaaaagactatctttatatcataaactttttggttttatttgattttatagccatgggtgtaaataatcttctgaggtcagaagggaatccaaagttctcgatgataataatgattgtaggggctttgactaatgtgtttttagattttatatttatatttgtccttgactacgggataaagggagctgccatggcaactgccattgcaaatatagtgggatcgataatggtcttataccattttatatacagcgacagaagtaatataaaactaaaactaaaatatctaaaacctgattttaaaataataaaagagatcttctcgatcgggatatctccatttacccttcagcttgccaatagtttggtggcggtttttgccaacagggctcttttgatctatggaggagatatggcagtaggagcgatgggagctataaacagtgtatttatgtttcttatgatgactctttcagggataatccagggggcacagccgctattgggatataactatggtgctcaaaaatatgatagagtaaaaaagatacttaatatggctcttttatacggggtaattatttcacttgttttgactgctttgattatgataaaacctgaattttttataaatctatttaataacggaaatgaagagttattggagatcggaaaaagtgggataagaatttttatggccttggttgtatttaacgccatttatgttgtaggtgccaattactttcaggctgtgggtcaggcgaataaatcattgtttttgaatatcttcaaacagctaggtttgtttattccacttattattattttgccaaaatattttggactgaacggtatttggttcgctgctccagttagtgatgttataatatttatgattacaggggtttttttgctgaagaacaataaaaaactgaaaaaactatcggttcaatatgcttagaaattatttttaggagcacttaaattggtttatctttaaaggctattccatgacaagctatatatatcaaaagaatatttctgtgaagatataaaaaaattgactttgaataaattttgtattaaaataaatatgacgaaagggaagtcgtcaacatagctaaaataatataggttagtacaataaaggtaaatacttttagtattaatcctgtaaggctctaaacctctagtctcttgactagaggtttatcctttttttggtgatagataattttatatcatggggggatatttatgaaatatagtatcggtctggacataggtatagcatcagtgggttggagtgttataaataaagataaagaacgtatagaagacatgggtgtaagaatatttcaaaaggctgaaaatccaaaagacggcagctccttggcatcttctagaagagaaaaaagaggttctagaagaagaaacaggaggaaaaaacatagattggataggataaaaaatattttatgtgaaagcggacttgtaaagaaaaatgagatagaaaaaatatataaaaatgcgtatttaaaatcaccatgggaactcagagcaaagtctttagaagctaaaatttcgaataaagaaatagctcaaatactccttcatatagctaaaagaagagggttcaaatcttttagaaaaactgatagaaacgcagatgatacaggaaaactgttaagcggaatacaggaaaataaaaagattatggaagagaaaggatatttaacaattggagacatggtagcgaaagatcctaaatttaatactcatgtaagaaataaagcaggaagttatcttttttctttttcaagaaaattattagaagatgaggttagaaaaatacaggctaagcaaaaggaacttggtaatactcactttactgatgatgttttggaaaaatatatagaggttttcaacagccaaaggaattttgatgaaggtccaagcaagccttctccttattatagtgaaatagggcagatagctaaaatgataggtaattgtaccttcgaatcctctgaaaaaagaactgcaaaaaacacttggagtggtgagaggtttgtatttctccaaaaactaaataattttaggatagtgggactgtcaggtaaaaggccattaacagaagaagaaagggacattgttgaaaaagaggtctatttaaaaaaagaggtaagatatgaaaagttaagaaaaatactgtatttaaaagaagaagaaaggtttggggatttaaattacagcaaggacgaaaagcaggataaaaaaactgaaaaaaccaaattcatatcattaattggaaattatacgattaaaaaacttaatttatcagaaaaactcaaaagtgaaatagaagaagacaaaagtaaactagataaaataatagaaatattaactttcaacaagagtgataaaactattgagtcaaatttgaaaaaactagaactaagtagagaagatattgaaatccttctttcggaggagttttctggaaccttaaatctgtctttgaaagcaataaaaaaaatactgccttatttagaaaaaggattgtcctataatgaggcttgtgaaaaggcagactacgattataagaataatggaataaagtttaaaagaggggagttacttcctgtggtagataaggatttgatagcaaatccagtcgtactaagagcaatatcccagacgaggaaagtggtaaatgccataataagaaaatacgggactccacatacaatccatgtagaagtggcaagagaccttgcaaaatcatatgacgacaggcaaaccattataaaagagaataaaaaaagagagcttgaaaatgagaaaactaaaaaatttatatctgaagaatttggaataaaaaatgtaaaaggaaagttactacttaaatacaggctgtatcaagaacaagagggaagatgtgcttattccagaaaagagttgagtttaagtgaagtaatattagacgaaagtatgacagatattgaccatataataccttacagtagaagtatggatgattcctatagtaataaagttttggtactttctggcgagaatcgaaaaaagagcaatctacttccaaaagagtatttcgatcgtcaaggaagagactgggatacttttgttctaaatgtaaaagcaatgaaaatccaccctcgaaagaaatcaaatcttttaaaggaaaaatttaccagggaggacaacaaagattggaaatcaagagctttgaatgacacaagatatatatccagatttgtagccaactatttagaaaacgctctagagtacagggatgattcccctaaaaaaagggtgtttatgataccaggacaattgacagcacagctgagagcaagatggaggcttaacaaagtcagagaaaatggagatttacatcatgcacttgacgcagctgtggttgctgtgacagatcaaaaggcaataaataatatatcaaacatttcaaggtacaaagaattaaaaaattgtaaagatgtaattccaagtatcgaataccacgcagatgaagagacaggagaagtttattttgaagaagtaaaagacacccgttttccaatgccttggagtggttttgatttggaactacaaaaaagacttgaaagtgaaaatcccagagaagaattttataatctgctctcagataagaggtatttgggatggtttaactacgaagaagggtttatagaaaaattaagacctgtgtttgtgtctaggatgcctaaccgtggggtaaagggccaggcccaccaagaaacaataagaagcagcaaaaaaataagtaatcagatagcagtatcaaagaaacccttaaattcaataaagttgaaagacttggaaaaaatgcaggggagagatacggatagaaaactctatgaagcactaaaaaatagactggaagaatatgatgacaaacctgaaaaagcctttgcggaacctttttataaaccgactaacagtggcaaaagaggaccacttgtcagaggaataaaagtagaggaaaaacaaaatgtcggagtttatgttaacggaggacaagcatctaatggaagcatggtcaggatagacgtttttaggaaaaacggaaaattttacacggttccaatttatgttcaccaaaccctgcttaaagaacttcccaatagggcaataaatggaaagccctataaagattgggatttgatagacggtagctttgagtttttatattcattctatccaaatgatttgattgaaattgaatttggtaaaagtaaatctataaaaaatgataataaacttactaaaactgaaattcctgaagttaatttaagtgaagttttggggtactatcggggaatggatacatctacaggtgcggctactatagacactcaggatgggaaaattcaaatgagaatcgggataaaaactgtcaagaacataaaaaaataccaagtggatgtattggggaatgtatacaaggtgaaaagagaaaaacgtcagactttttagaaaggagaagattatgggatggagaaacatctttataacgagctctactaaaatttctactagggacagcggactgctgatcacaaaagagggaggtgaagtaaatatccctttggaagatatatccagtataatactggataataattccgttacaataacatctagggttttagaagaaatagctagcagagatatagttttactgacaagcgatgaaaaacacttgccaaacggtatatttcagggttacggaagacactcgagacaacttgccgtggcaaaagcacagatcaacatgagtgtacccagaaaaaaaagactgtggcaggagattgtaactaaaaaattggaaaatcagggtagagtattagaattgatgaggtgtgaaggaagtaagtatttatacgacctttcaaaacgtgtaaaatctggtgatgacggaaaccttgaagccttgggggctaaatattattttcagaaattattcggagatgattttacaagaagggatcacgatataaaaaattttgcgctgaattatggttatgcagtaataagggggagaattgcgaggagccttacaagttatgggtatatatgttctctggggatacagcataaaaatgaatataatgcatttaatctggcagatgatataatagagccctacaggtcagttgtagacctttgggttgcaaataatatagataaactttctgatgaactgactactgataataaagtgtctcttgtagaaatattaaatgcagatgttaagctgacaggtaagaaatattctgtaaatatctctatagatgaggtgataaagagatatacaaaatgtataaggggaaagggtggaaatttaatcttgccctcaataataccaatacaagagcatcggtatgtataagtttatgaggataatagtgtttttcgacttacctacggctaaaaaaagagacagaaaaaactatgctatattcagaaggtttttgctaaatgatggttatcatatgcttcagttttccgtttattccagaatctgcaacgggtacgacagcgttaaaaagcatattaaaaaattaaataataatttacccccaaatggttctataagggtacttacactcacagaaaagcaatatgtggggatggagttgctggtatcaaaagagaggtccccggaagaaaaaataggtactagtaaaactataataatataaaaaaatggctggtttcagccatttttcttttgggaaggatgtttttttagtgaaaacaccttagaaaccctagtaatatatagggatttaaaaacacgtattgtaacatagctaaaataattagggaagtacaacataacccattgtataatctaattcttttgaattgtaacatagctaaaataattagggaagtacaacccttctacatgccatgaaccatccgattttattgtaacatagctaaaataattagggaagtacaaccccttgctgatatgtaatatcgcttgatacattgtaacatagctaaaataattagggaagtacaacttatcaaaggtagatagtaaaaattataatattgtaacatagctaaaataattagggaagtacaacttatattgtgaatactgtaaggcggtacttattgtaacatagctaaaataattagggaagtacaactcctacaccgaacatttatacctcctctagattgtaacatagctaaaataattagggaagtacaacctctttgacagcgtgtataacattcactttattgtaacatagctaaaataattagggaagtacaaccggctgtaagctttgtagcgttatttttaattgtaacatagctaaaataattagggaagtacaacggaaaatgtggagtagttgagacaaagtgaattgtaacatagctaaaataattagggaagtacaacgaagcaggccaaaagccaaatgcaggcaggattgtaacatagctaaaataattagggaagtacaactataaactctctgtcatatacaaccccaccattgtaacatagctaaaataattagggaagtacaacgctttatctgtctgaagccttttctcttctattgtaacatagctaaaataattagggaagtacaacctatatctttgactatgtaatcctctctattgtaacatagctaaaataattagggaagtacaacattgcaaactgtattaagtttttagattttattgtaacatagctaaaataattagggaagtacaacaagtctatccaagctttactttcttctagtattgtaacatagctaaaataattagggaagtacaacacaaaaagagaggttagtttttcccctcttattgtaacatagctaaaataattagggaagtacaacctaatcactttaggtttctaataaatcaaaattgtaacatagctaaaataattagggaagtacaactcctattgcagataaaatctcttccaagtcattgtaacatagctaaaataattagggaagtacaacaaataaaactaagggtatcacatttagaatattgtaacatagctaaaataattagggaagtacaaccaccgctttttctatactcaagtataacttattgtaacatagctaaaataattagggaagtacgagtacgaccatttaattttaagattattctacatattctgactgaaaaactgatataatgaagttgtccgaagaatttactttggaaaatttaaatagatgacagagggatgaaatgttaaaaagtatagatatattctgtgatataatagataatttcggtgatataggctttgtctacaggctggcaaaggagataaaaagaaaagagaaagatgccagggtgagggttttttttaatgatgcagagactttttcaaaaataaataaaaacatcattgtaggggaaaaaatccagataatagaagatataacatattatgatatgacaataatgagttcagaggactacaaaaaggctgggaactcagaggtggctatagaggcctatggatgtgacataccagaagtttatcttgaaaattcttctgaagaattaaagatagtcataaatattgaatatctaacagcagaagagtgggcaaaagagtaccatcttcaaagctcttatatcaatgtaaaaggtgtaaaaaaatatttttatatgcctggatttgaaaattggagtggcggcttaattatagataatcaggttcctgtcatagatagagtcgagttttttaataaggtgatatctagtcattcagaaaaattttttccagtcaattctgatttggtggtagataaggatacgttcgtagggactattttctcatatgaatacaattttcaaaactttctagatacccttgaaaattttgacaaaaaaataattcttttgatatttggagatatgagtaaaaatggttttttaatcacaaaaaatattaaagctcttaaaaatacaaaaataatatttatggattatgtagaacaaaacctttatgatgaaattttgaataactcagatttcaactttgtcagaggtgaggagagtttctctagagcaatagtttcacgagtcccatttctatggcatgcctactgtcaggaagaaaaagagcatttaaataaggtaaaaggttttttatcatttttaaaggataaaaccccggtagatttttatgaaaagtattcaaagataacctataactataactgcagaaccgaaaatcattataatcttgaagaagaagatttttctgatttttttgaaaattttgaaaaagagaaaaaagcctttgaatacatatcagattatgtcaaaaaaaacggaaacttagcagataaacttctttgttttttgaaggaaaagctttctgaaaatgatttttaaaattaaaagtatctgtctaaaagaactgttatcactgaaattttcaatgaaatattcactttgccaatcttttaagactgtgatacaatatagaaaaaggaactaggaggatataacattgaaaacagcacaagaaatttcatctggaaatatcatcaaaataggtgaagaagtatttataattcaaaaggctacttacaacaaatcagggagaaactctgcagttgtaaaattcaaaatgaaaaatcttattacaggtcaggtaaaagaagacgttatgaaagcagcagataagcttgaagatatcagacttgacaaaaaaacaatgcaattcttatatgaagttggaggagactacaactttatggatcaggaaacttttgagcagatagctcttacagctgatgatttaggagacgctacgaattacctaaaagaagaaatgttcatagatatcctgttatatgaagagagacctgtaggtgtagaacttccaaactctgtagagagagaagttacttacacagagccaggactaagaggagatactactggaaaggttctaaagcctgctactatagagactggatatgagttaagtgtaccactttttgtaaatatcggagatgttatcagaatcgatacaagaaatggtgagtacttagagagagtaaacaataaataaaatatctttttaatataaacaaggcgtctttaaggcgtcttgtttatatttatactaaaaaatttgcaaaaaaataaaaaatcccaggtatatctgagattttattttaaatatttattaaatcaccaattagactgcaacaccatcatatacatagtggtttgtatcttctataagatcttttatctcttggaaaacctctggttcttcaaatctatagatctcttcctttgcatcacagtaaagaacagaatcagaaacaccgtcatatacattgtggtttgtgtcctctataagatttttcatatcttcaaaagcatctgtttttggttcaaatctgtaaatttcttcaattatttcacagttttcactagatcctgcaccatcatatacattgtggtttgtgtccattattaattccttatattcgtaaaatacctcggtatccattgtgtttaagtttttcataaaaatcaccctcctactttgcgatttcagtatcaaccattttggttgacaattacaacgctacaaacgcataatgagtttttcattatgctagtactactagaagtacttcccccattttttacttaagtttaattatttcctcatatttttgagtatcttccaaatccaggtaatgaggtaatcttatgcaaattaaccacctcctgtaatttatacaaatgtttaaattgatttagttgatgtaaaaatatttttttatttattctatatatgaagtatagctgtttttaaaaataaatgcaattatataatatatagcctacctatatatttgatatatgcaaaaggggattatgatgatttctgttgataagttgggcattatggcccaaaataaaataattatgtgggtaaaataagaggaatcgtatataatataaaaagaaatacattgcatctgcatttggaggcacattatgaatagaaaacaacctgttttatttataggtcacggcaatcccatgaatgccatttcatacaataacttcacaaaatcactgaagaaaatatctgaaactatagaaaaacctgacgccattgtcgtaatatccgcacactggcagacaaagggaacaagtataactttatctgatgatcccaagcaaatatatgacttttacggttttccaagggaactttataatgttatatatcagcctaaaggaaatgagaaactgtcaaactatataatagagactttaaatgcagaaggcgccatagtaactggagtagattactggggcctagatcatggttcgtggggaattctgattcatatcttcccagatggagatattcctgtactgcagttgagtttggatgtagatttagacgtagattctcattatcagcttggtaaaaaactttcttttctgagagacatgggagtgttggtaataggaagcggcaatatcgtacataatctaaagaatatagggaaggaaactttatcagaaccgtattcctgggctgtggaatttgacagatatatagcagactctgtaagtagtgataaacataataatcttattgattataaaaatgcaggagaatgtgcagaactttcccttcctacagatgaacactatcttcctttgatttatgttgcagctatgcagacaccgggagaaaaaactgagtttttctatgatgaaatacaccactcatctctttctatgaggtgtctgaaaataggataggatgataaggtgagagcagtagttttgtcgtaaagatttatgttaaatagatatacatatagttagaatagtatagggggcagtatgaatagtaaatatataggatacacaatggcatttataacgatatttgtatggggtacaacttatgcaatcaccaaaaatttgttaaattattttacaccgttcgaagtgctttttctgagatttttgatagcttatttatttttgttgattgtaaagccaacatttaattttaaatttaattttaaatttaattttcaggaagagaagttgtttttgttattaggacttacaggaggaatgctttactttctagtggaaaatatggcactaaaatatacttcggcttctaatgtggggcttatagtatcctctataccgatattctcatcgataatagctcattttaccactgaggacgaaaagtttgataaaaaccttattttgggctttgccctggccataacagggatattcctaatactttataatggaaacaaagttttgaaaattaatcctataggggatattttggccgtagtatgctccattatttgggctatctactccaaccttctgagaaaggtggataaaagctactcaggactattagttgtcagaaagacatttttttacggccttatgtttatgttacctggactttacttactcaaggtaaaaatacattttgagtatttgtttaataaagatgtttcgtttagcatattttatcttgctttagtggcttcttccatctgctttataatgtggagcaggtcaataaacataatagggataataaagacaacgaactttatctatttgataccgcttgtggctatgatatcttctgtggttattttagatgagaaaattactccgctcatgattacaggaggtcttcttatcctttctggtgtccttattaatgacaagaaaatatcctttgaaaaattatttaagccaaaaacgactaccctataaaaaagttccctgtactctgcattttacaacagagtctcagggaactttttaatataaatttactaattaagttttttactcatgatatcgcagatgatctctcctacctgactagtagaacctttaccacccatatcgggagtaagcttctctctcatctctagagatccctctatacccttcatcacagtatctgcaagtgactcgtgtcctaggaaatctagcataatttttattgtccatatcattgctataggattggctaggccttttccagcaatctcaggggcagaaccgtgtactggttcaaacatagaaggatactttccatcaggattgatgttggctcctgctgcaaatccaagaccaccctgtaaggcagctcctaggtcagtaaggatatctccaaataagtttgaggctacaacaacatcaaaagattcaggtctttgtatcatatacatggcagcggcatctacatggtattctgctgtttttatctctggatagttagctttcttttctttgaaaatcttgtcccagaaaaccatgctgtggtttagggcgttggattttgttatacttgtaaggtggtttagcttgtttctctttttagcaaggtcaaaggcgtagtccattaccttttctgtagttttacgggtaaagacacttgtctgaagagctatttcttcttctttgccttctctttctattcccccgatacctgcatactccccttcagtattttctcttataaagatcatgtctatgtccccaggtttttttccttttattggacaatccaattccgaaagaagttttacaggtctgtagttgatatattggtcgaatccctgtcttatttttaaaagcagatcccttagagaaacgtggtctggaactcctgggaatccaactgcccctaataatatggcatcaaagtttttaagtttttcgaggccgtcatcgtccatcattttaccattttctagatagtattcacatccccagtcaaaccatgtgaaatcaaaggcaacttctcctgtgagttttgacaaggtctctaggacttttactccctctttcattacttctactccgataccatctcctggaattacagcgattttgtattttttcattttgtcccccctgtattttatattaaaagcacaattacccataattatgctttttttaactttatttcagtttaaaaaagaatctctgcaaggaaagcataaactggtatagtcaccacaacaagtatggtggaaagcccaactacttttgaggcgtcttctggatttttattgtagtatccgctcaaaatggccacattggtcattataggcatggtagtctgtatgaaatatacctttttcaaaagaaccggaagagttaaaaaaccatcggcaatttttataagcaccagggctattataggagctatgataaacttggatataagatctagcagaccttcaaaatctggttttaaagattttattccgagactgtatatggccgttcccaagtagagcatggccagaggtgttgtcattcctcctagatatttcatataagttgccagaaacggagggacttttaagtctaaaagaatcataataatacctacgaaaaaggatatggtagcaggagtcataagctttttaaatccgtcttttatgcttcctcctccacggacacaatagacaccataggtccaaaagaaacaagtgttggcaaaatagtataggaatatataaggtatgctttcgtctccaaataaggctatattcaccggtagacctataaataccgtattggcaaagacaaaggaaagttggaaaagttcctttctttttatgaaagagctgaaactaaagatcttggctgccaatataagtgctaatagtattacaaaagaaagtccgagccactctgtggattgcatcaatccctctcttgtaaaacggcttgtaagccctaaaattataaggcaaggcaggcatagattcagcactaaataggaaaaaagtttattgctgtgctctcctaaaatattttttctagcaaaaaaacaacctgttcccatgagaaacattatcaaggtaacactgtttattattctctccaaaattattcccccctaaaatcacttttggatattatactataaaaatctgttagtcgtaattttttttataaaaacggtcaattttagcttgctctatgtttttgcaataatccttttaattaatatttataggcactaaaaaaagccgccatttgcagcttttctatttaaaagtctatatttatataatttctcgaagcatcaaggctatactataaacaagtcttgtgttaagctgagacagatcacaagataggatctcctgtatttttgataatttataattaattgaatttctatgatagaagagttgtgcagcgacctctttaacgctgcaattattttttaaataagtatctaatactatcatatagtctgttccattaattttatcatattcggctaaaggttctaaggtttcttggtagtaattactcatagcctctttgttttccatagataaaagtaatttatataggccta

SEQ ID NO: 4171 - DNA, 8968 bp, synthetic construct
  misc_feature 1..8968: note = Synthetic
  source 1..8968: mol_type = other DNA
acgcggggagattttcggcctcctcgggcctaacggcgcagggaagtccaccactattgacgtgctttgtacgctacttcagtacgataccggcgaaataattattgacggatataaggttggggcggatgacggtaaaatacgcgaaataatcggcgttgtattccaagacagcgtattggataagctgctgacggttagagagaatcttgctacccgagcgaagttttacggaaaaggcaaagatattgcttcggcggtagaatacgcggcaaaagccgcaggagtcacagagtttattgaccgcccttacggcaaattgtcgggcggacagcgaagaagggcagatattgcgagggcgcttgtcaatactcccaagatacttttccttgacgaacccacaacagggcttgatcctaatactcgcaaaatggtatgggatacgatagcctctctgcagtcagaggtcggcatgacggtattcttgaccacgcattatatggaagaggcagccgcagcggactatataataataatagacaaaggcgagatttcggcaaagggcacaacctatgagcttaaagaaaaatacagtaccgatatgctaaagattaaacctacagacaaagacaaggcaattgaattaatcaattcgcttggtgtagaatatatttgcaacggtgagcttattctagtaagccttagcgataccaaagccgcaataccgataattaagcggcttgaaaaatttatcgatacttttgaggtagtgctcggtacaatggatgatgtgtttattaacatcacgggaggcgcgatacatggttaacctcgctatacgtaattttaagatgtttttccgcaacaaaagctcagttttcttttccttgctaggagctattataattatacttctatatgttttattccttggcgatatggtctcgggagaggttggcggagtacagctcgaccgctcgatattagacagctggattatggcaggactaatggcagtatcttcaatcaccacgacgatgggtgcgttcagcattatcgttgaagataaggaaggcgggaagattaaggacttttacgctgctccgctcaaaaaaagcacaattgtcggcggatatctcttgagctctgttgctgttggtattattatgacgctgataacgctagtgcttgcagagatatacattgtggcgtacggcggcgcaattatatcggcgctgacgctactaaaggttcttggcataatactattatcagttgtatcctctagcgccatggtgctttttgtacttacctttattaacagcagcaatactttcggtacggcaagtacaatactaggtacgcttattgggtttttgacgggaatatatattcccaccggtatattgcccgtccccgtgcaatgggtaatcaaggtgttcccggtatcgcacgccggcgcgcttttccgtcagcttatgatggagcaacctattaattccacccttcagggcgcgcctgccgaggcgattgaaggctttaaggagcatatgggagtaatatttaagtacggcgactatactgcacctttctggctgcacatattagtccttgtcgggactgcggtgcttttctatgcgctcgcagtactaagattgtcggtaaagagcagggataaaaatttctagaatatgtgaagcgagcaaagcgcgtggttttagcccatacttagaatatgcctcaaggagacataatgaaaaaaatatttattgtattattgataataacgggaatagcgaccggcgtaacaagcttagccgcttgtgcaaaatataccgagtacaaggttaccgttgtagcggacggtaccaataccgttgcgtacagttattcgcaaaatgttgccgctttcatcatatcctctgaagacgaggagatactagcaagagtaattttcaattcgggcaatgctggcggcgttacggttaacgattcgggtatctgtgaattttatgtaagaatacctgcaaaatatacggcgaataacttggtggtaaaactaaataatcagacaataatgccatctgacgcagtgcttatagatagcgaaacacgggacacaacctatattttttacggacccgttcccagtcaggatatgataataagtgtagagggcttagacggagaaataaagcgatatacttattctatacctgtagttagccattgtccggttttgatacagcgcggcaacgactatgtgcagctaaagcccgagagcgcggcgctcttaaatacgctaagctacgaaattgcttttgaaactgtcgaggacgtaatatgggcagtctttaccgctgagcacggcgacattatcgaatattatgtcaacaaaaattttgttgaactgctatcctacacaagagagggttacagcaatagcgcaatatataattcggcggacttcggcggagaagaggaaggatacagcgcggcggataagatgcggcttgaaaaggacgggtacgcaatgtactcggcaaccgtcggaaactactactataaggttacgcagacggttatcgacgatattacctatataattgctgacgataattgagacctgattaaatgaaataaaatgcgaataatattgattttaattaatccaaaaggaaatagcagattaatattgcaacagaagcaaagatgatttttaagataaagagtttaataggcaaatccccgagatgcagttagcgtctcggagatttttgtatagaagtaatctaataatctaatatttcattattatttattggtatgacaaaatcaaaatcgtcaataattattggtgtaatgaaaacaataattaaagaggtggacaatgagtaatttgaaagaaagtaaaacctatatcaatctagccaaggcgtacgcaggcgaatgtcaggctcgggtgcgctacgaattcttagaatatggcgcgcgccaaggcggacttgtcgcaatggcgaatcttgtcgctaaggtggtattcaacgaattcaaccacgcgcgcatgctctatacctttatacagaccgcaacggatgcaacaatcagcaatattgatattgctacaggatacccattcaaggaaaaatggaatattctcgacaacctaagacttgccacagagaatgaaaaggacgaagccgagcttatctatcccgaatacgcaaaaatcgccgaaaaggaaggttttaaggatatcgcaggattattcaagaatctcgcggcagtcgagacctcgcacaaactgctgtttcaagacctatacgagcagttgaaaagcggcgcaatgtataaaaagacaaagaaaacgctgtggcgctgcggtgattgcggacatgaatccaatctggagcaagcccccgcaatatgtccgttgtgtcaggcaaagcaaggtacagtattgataaaaactgatgtaatggtataagcctaaagtaaataaagcaaggtcaaactccaaatatcaaaatgcagaaaaatctataaaataaagccaaataatgttttaagggtcaattacagcatttttttggtaatatttagaaaaaattagaatttggtattgaatttgataaaatactatggtaaaataaaaaagcaacttatttaccataccaaacagttttaggttgctataataatgggtgtatccctatatggggtacaatcccgaaaagctctgtccgggtatgtagttatatcgcggacatcttttttttaattgagaaaacattaggaggaaaattatgaagtacaggttggggcttgatattggcattgcatcagtcggttggagcgtaatggaggttaattatgacggcgagcctataaaaattggcggtcttggttcgcgcatatttgaaaaagcggagacagcggataagggcgagtctcctgcaatggcgaggcggttggcgcgcggagcaaggcgtagattaaggcgcagagcattaaggcttgtaactgcaaaaaaactaattatgcgatcgttggaattggacaacatagcacttgattcatgcgtggatatgtatgagcttaggctggaagccttagacaaggcaattaccggaaaggaatttgctctcgttttattaagtattctaaaacatagaggattcaagtccaatagaaaatcagaaagcacaaaggaagaaactggcgcactacttagcgcaataagtaataacgaaaaatacagaaaagaaaaaggttaccggaccgttggcgagatgtatgcaaaggacgaacgcttcgttagtattcgtgacggagtgaaattatatgcaatccgtaacaagtccgagcaatatagtaaaacgatagctcaagacgagcttttggaggaaattaagattctattcgccgcgcaaagagcttttggcaacgaattagctgctgaggagttcgaagaaaagtttataaaaatatttactgcgcggcgcgaatttgatgaaggaccgggcgaacctagtccatatagaaatagttttaatgtaggcaagtgcgtatttgaaaatcaggaattaagagcgccaaaggcaagttttacctttgaatataccaatgtacttataaaattaaacaatctgcgtatcaaatacgccggcgaagaaagaatcttgactgtggatgaaaaagaaaaaatactacttaatttgaaaagcggcaaaaagggagagatgacctttgaacagttaaaaaagctattaaaaatcgagcgcgaggcaaagtttaacgcgctcacctattcggacgcaaaaaacgacgcttttaagcaaattcgcggaataaaacttaattgcggcggtacggagagatatctttcacccgaggaaaagggagtactgctcaatgagctgacggaaaagggcgagttaaacagcggagagattatagacgcgcttaatattgaagattcttttattgcagtcaaaggcaaaaaagagggagaatttaaactgaaactaaagaatattgaaggtgtaaagtttatatctatgagcgcgagcagtaaaataattgcggagctttcgcccgaacacaaagtcgatattgaccttattgacgaaatagcattgctgttatcaatgaataaaagcgatgcaaagttattaaaaagtattgcagataatccgttattatcttcgctttcgcaatccgagatagaaggattgatgaagttatcatttagcaaatttggtagcgtaagcgtaaaagctctaaaaaaaattcagccttatgtcgcgcagggtatgcgctatgacgaggcgtgcagtgccgcaggctataactttagggcgcatagcaacggcttgaagctaaagttgcttaactcacaggaaattaacgatataataaggtatattaacgttcctgtagtacggcgtgctgtatctcaaacaataaaagtaattaacgcgataataagaaattatggcagtcctatagctgtcaatgtagagcttgcgcgggagctttctaagacatacggcgagcgtatgcggataaaaagggacaacgatgtacgcgccgaggagaaccaaaagataatggattatataagggatacttttcatattgcgccgcgtgggcttgaccttgtcaaatacagactgtatgaagaacaattcggcaaatgcgcctatagccagactcctattgacgccaatagactattcgaacccacatatttacagattgaccatataataccttatagccgtagctttaatgatagctataacaataaggtactagtgttattagaagagaaccaagccaaaaagaatatgttgccttatgagtatatgggcaaagacgaaaatcgttggaaaacattcgaggcatatgtcaaggcaacctataaaagtaatccgaataaaacggaaatgttgttaagaaaaacttttactaaggagaatgaaaaggaatggcaggagcgttctcttaatgatacaaaatatatatcccgttttatgttcaatctgattaatgattatcttttgttggacgataatatcaacattggtaaaaagcgggtaaccgcagttaacggcgctattacctcatatctaagaaaaatgtggggaatagagaaaattcgaacagacggtgaccttcatcacgcaaaagacgcggcaattatagcttgcgtaaccgatcgtatgataaaagcggtaaccgacttcaacaagggcaaggagacaatgtttaaggggcaaagcacttataccgatatgtatactggcgaaataataacacgtgaagagtacgataagtcttacggcggcggagataagctgaaggcgccgtataacggcttcccgagagagctcaaactaagactcatgccatctgttgaagattatagggaaaaatattacaaactaggctacgaggaagaagaaatcgactccctaaaacccgtctttgtcagccgtatgccgacccgtaaggcaaagggcagaatgcacaaggatactataaggagcgcaaagtgtctggacgatggactggttatctcaaaaacagatataaaaaagctgaagctaaataaggacggagagatagataactattatattaaagataagcaggacgacaagcttctttatgaggcgttgcgcgcccagttagcggcttacggcggcgacggcgccgcggcgttcaaagatgtattttacaagccgaagagtgacggcacttcgggcaatcctgtccgtaaggtaagattgaccgaaaagtccaccctagaggtgcgactcagtaagattgaaggcgcggcaggtaatacgagcattgtccgcaccgatatattctacaaggacaagaagtattacagcgtacccgtatatgtgtccgatgtctacaagagtgttttgccgaataaagcaattgaagcaggtaagccatatcgcgaatggcccgatatgaacgagggttatgaattcttattcagtctctatcccaacgacttggtctatgtggaacataaaaaaggcattaatcttgtaaagaacgatgaaacaaagcaaaaattaatagataataacggatatttttattttggcggtatcgatatttcttcaggagcggctatatttgataatcacgatcaatcttattttactcgtctcggcttgaaaactttgcccgtgttgaaaaaatgtacggtagatgtacttggcaatataactttcgtcggcaaggaaaagaggctggctctcggaagctgatatggcttatattaacatatatattgcgaatccctgtaagatatccgtaaaagacagtcaattagtattagatggagataggcaaatgagctttcccgtagaggatatcaacagcgtaatgatagagagcagacagattatgttgaccgcctatacgctaaccgcgctaaccgatagcggcgcagtcgtatatatctgcgacggttgtcacctgccgcatacattaatattgccttgcaacactcattcgcggcaacgcaagcaactgatgctgcagcttgcgttgcccaaaccggttacaaaacagctttggcagactataataaaacaaaagattattaatcaggcaaagtgtctggagctgtgcggcaaaagatataacaccgtgcttgattatgcgggcaaggtattaagcggagacagtaccaatcaggagagcgcagcggcaagagaatatttccgtattctcttcggcgaggattttaagcggcaggaggacaatgcgcttaacggcgcccttaactacggctatgcgatagttagagggataatagcacgaagcatagttgctcatggcttcgagccgtcctttggcatatggcattgcagcgagcttaacaactttaaccttgctgacgatattatagaacctttccgtcccttagtggatatgttgatatatgagggtgtcaacccagatattacaaagctaactacggaaataaaaaagacaatatataatgtagttaattgcgatgtgctgattaagggagagcggcacagtgtgagtaatgcggtggatattgcggtagagggttaccttaacagttgcgaaaataaaagttgttgcatcgcgcttcccgaacttgtcaatatagctatgcacgaatatgaataaatttatgagagtcattgtattttttgatctgccggtcggcacaaaacccgaaaggtatcacgcaacaaaatttcgcaactatctgttatccgagggttattatatgattcagttctcggtatacggcagattgtgcaacggcatagacgccgcctataaacacgaaaaaagactgttggacaatgtaccgtccttaggctcggtacgcgtgctgacaataacagaaaaacagtatacagccatgaagatactatcgggtgagaaaaaagaaaaggaaaagccgcaagaatcatatcagctgtcatttttttgaaaaaagggtaaaaagctgaataaaacaagtaatataaaagtatttttttgataatttaagcaaaaagaaaaatgcggaaatacctaagtttccgcatttttcttgctccgttatagcagcctattataccataccaaacatttttagggaactataacgacataatggtagttgtgcaatctgattgcattataccataccaaacatttttagggaactataacgggtattgagtgctgtaatattatttaatgattataccataccaaacatttttagggaactataacgtgagattatggcgctaggacttattatagattataccataccaaacatttttagggaactataactagtaatttatttttttgacaaaattttacattataccataccaaacatttttagggaactataactttgctacctactgcaattaatgctatatcattatac

SEQ ID NO: 4172 - DNA, 4511 bp, synthetic construct
  misc_feature 1..4511: note = Synthetic
  source 1..4511: mol_type = other DNA
ctccataacctcgtcaaccgtctcgccttgggaaaagcatcccgacaccgccggcacttccgcccaatacccgccttcttcagccttgtgaatgaccactttgtatttcatcgcgaagccctccttccgtggaccgatcctgagaatatcacatgcggcaacgcgcggcaagtgccttcaagttgttttccacgcctgcgagaagcagcccaacagggcgcggcaagatgcgctcctgcgcgtcgcgaacgcctcttgacaatcccgctgcgggcggatagagtccgcctgggcaagatgggagggacatgtccagcgcaacgccgagtacccggcttggcacacgagtgcagaaaaagcagcagcccgtgagttacacgggctgcccatggtcgcggttcccgaaggaagcgcggtgcctgcaaattccttttgtctgctggaaactcgcaggccgagatcggttattctagtaccgattatacattcttccggctcgaagtcaagtcagaatcgccaggaaagaaagagaggatgtcatgcctgtctatcttggcttggacgtaggctcgaactccgtcggcagcgcttgggtggacaccgaaaagcgcgtcatcacggcgggcgttagcgtctttccggctggggtcgaggacagcgacaccaagcggggcgcgccgaaaaaccaggctcgccggcagaagcgctcttcacgccactctatccgccaccggtctgagcgaaaggctcttctgcgttggcttctcacgcaggccggcctgttgcccaaagaaaaggcggcgctcgacgcgttgtttcagcaagacccatgggcgctccgccgcgacggtcttcgccgcccgctgacagcccacgaattcggtcgcgtactggtgcacttgggacagcgtcgcggcgcgttgggaatcgaggccgacgacgagaaggaagcaggcaaggtcaaggacgcgatccgtcggacaagcgactcccttgctgacgggaaaaccttcggcgaaatgatggcgctaaagcgagaagaagggaggcagccccttctggacaagaactcgcagccagtccccgaaaagttcttcgcgctcccgattcgcaaccgggccggtgtgttcgcgtttcacgccacccgcgcgatgatccgtgacgagttcaataggctctggaacaaacagcgggaatttggcggcgaactcggcaagctcttgaccgacgagttgcggcgtaaacttgaagacgacaacgacgacgaaaactggcgatgtaagggcgcgctcttcggccagcggcgaacctggtgggacaccggcactatcgggcgttgcgacctggagccgaccgaccacaaatgccctatcggcgaccgccacgcgcaggcgtttctcgttcttgaaaccgtcaataacattcgaatccaggaaagaggccagcccgaacgtcccctgaacgaggaggaacgccgcaaggtcgtcgcaaaattgcgggaacagaagagcgccacgcctgcgaccgtgcgcgccgcgctcggcctcaaaagtaagaacctcaaggctttctacgcgctcaacatcgagcgcgatccggaccgcaaggtgaacacggactggttctacagccaaatcgttcacggctcattcggcgaaaaaagttgggccggcctcgacgagagcaagcgcgagtcggtgaaccgcgctctcctgaaactcgatcccgaaagccctgagaacgtgaacaaactgcggaaaggcgcggtcgaatggtggggaatggacgcgcagggcgcagagaaaatcatcaatgcctggaagtcccgcttcaacacaagcaagcgcgtcaacctctcgcgccgcgcgattataaatctgctgccctatctggaaaatggcgcgaccgtcaccgaagccagacagcaattcgcccaagacccgtcatccaaggccactcccgaacagcgcgcgcgttacgcgttcacgttcaacaaggccgtcatggatgccattgcaaggcaagccggccgcgaacgcgccgaacaactcctgggacagcgtggactcaactatgacgcgcggcacttcctcgaaatgcatccggacacgcttccgctgccgccgatgctggcaaacccggttgcgcggcaggcgatttacgaagtccgccgccacgtcaacgcctatctccgccgtttcggccgcaagcccgatcgcgtcgtcatcgaattggcgcgcgaagcgtatcagaccgcaagagtgcgcgacgacatcctgaaaagcaacagaaggcgcgattcaatacgaaagaagatcatcgccgagtttcaactagaaaggttgtctcctaaccagcagcgcgccgcggtcgagcgggtgctgctgtgccgtcagcagaaaggtgcgcgcccttatacggacacaaatctgatcttcactgaggcacaagccgcccagggagaggaatgcgaggttgaccacatcgtcccccgaagcaaaggcggcgacagcggactcagtaacctgctcctcgttgaacgaggcgcgaaccgaaataaggggaatcgcacgcccaaagagtggctcgcgcctgcggaattccaggggcttctccagaagctcgcccatatcgaaaagtcgcagggtgatgaatacttccgcgagaccgacttcaagcgcaagtgggacaacctgaacgccgcggtcacacccgatggcgaacgaaggtggcgcgaatcgcagttgacgtcaacggcctacgccgctcgccaggtcgccgaatacctccaaagtgccctgtatcgcgatgacccccccgacaagcgctgtatcttcttcagcaacggacgctatacctccatgctccgtcgagactggcaactttacgaaaccggcgccatcgaagtcggcgaagagtccggcgagtcgcgcgcgggacgcgttgaaaaagacaggaccgaccaccgcaatcacgccgttgacgccgccgtcattgcgctcacaggaccgaaaatcgtcgagcaggccgccagcggctacgcctggcaggaagagcacaaggcgctgaccggccagtggcctccgcgtccgccgatttcgccgcccgcgccctggaccggcgttgaggaacttcgcgcggcgatcatgcgcccgatctttggctcgccgcaaggagacggcggattggtcgtctcgcaccggcccatcaagcgaagaatcgtcggcgcgcttcacgaggacacgatgtacggctgcgtgaatgccgagcggaacctctacacggtccgtatcgaaatcggaaaattgaccgccaagatgctccgaatgcccgttcaggaaaaggacgaaagagggcgcacgatttctaaagacccgccactgggcaaaggcggattggttcgagaccgcgacctgcgccgtcggcttcgtgagtgcatcttggcaaataagctcgacccggatgcgttcttgccaaagcaaatcaaagcgctcgccaaaggatcgatgctgcggctgcccagcggcgttccgatccgtttcgtcaaggttatccggaagatctacgatcccgtcaccattaaagtgaaaggggttgaaaaaccgcgcgtgtacattgccggcaacaaccatcacatggaaatcctgcaagacgaaaaaaccgccgattggatgggcatctgcatttccaacttggaagccgcccgccgcgtgcgccagcgccagcgcaaaggcgagccgcagatgagtatggtccgcaagaatcatggcgccggcaagacttttatactttccctcgccaaaggagagaccatcttttcaaggcgacaggacagacccgccgaaccggcgcgctactacgtcgtctcgaagctgaataaaaaagtcatccactttcaaccggtcaacgacgcgcgccctgtgaaggacaagaaaaatcccgcgaattgccaggatcgctggagcgtggctccggccggacttaaggcgcttggcccggaaccgaacacgccgccgtataaggttcgcgtcagtccgctcggcgaggtggaaccattgcacgatgattaagaaagtcttcgagctttcacagcaggctgctgacctgtcggctcacgacggccaattggacgtgcgctttcacgacgccggccggggcctcgtgacggttccctgcgaagacctcggcttcctggtcgtggacaatcccggcgtcaattacagccatcacgccctttgcgagttgctttcgaacggcgcggcagtggtcctgtgcgggcgcaaccatttgccggcgggcttgttgctgccgctctccaaccacacggaagtgaccgcgaggctacgcgagcagatttccgtccgcgcgccgctgaggaaacgactctggcaacaactcgtcatcgccaagattcgcgctcaggcgatgaatctgacctcaacggaagccgccggtcatctgcgcgccctggcgcggaaggtccgctcgggcgacccgaagaacgtcgaggc

SEQ ID NO: 4173 - DNA, 23042 bp, synthetic construct
  misc_feature 1..23042: note = Synthetic
  source 1..23042: mol_type = other DNA
cgtcgattgcgtggtggatgcctgcgtgcggtcgatgatggcgctggatgacggtgcgagcgccttctgcctgatgggtcacggcacgtatgtggaggccgaccgtctgtatgaccgggttgccgctgcgctgtgctgcgagggaaggcgcgactgcttcctggggacggtggagggccgcatcacgcttcgcgatgcggcggacgccatctggcgcgcggggtaccgtcgtgcggtcctgcggccgctgatgctggtggcgggcgaccatgctcacaacgacatggccgatgcgtccgatccggagtcgctggcgggtcttctggcggcgcggggcatcgagcccgtgtgcgtggtggagggcctgggccagctgcccgccgtgcgcgcccggtacgtggggcatgcgcacgcggcccttgcgggggcgtaggcgccccgcctgctttctgcccctggtctcgcctcgttagccgaggcggcgccgtgcggcctgaatcacgtgctgcgccagcacgctggtggtgacggcgcctacgcctcccggcacgggcgtgatggctcccaccaacggctccacctcgtcgaagcgcacgtcgcctgtcagctttccggcctcggcgttccagttggtgcccacgtcgatcaccacctgtccctcgctgaagtacgaggcgccgatggactcgccgcgacccacggccacgatcacgatgtcgcaggtgcgcgtgatcaggtgcgcgtcaaccgagcgcgagtggcagatcgtgggggtggcatgctcgtgcatcagcatcagggccacgggacggccgatcaccaggcttcggcccagcacgcccacgtgcttgccctccaccgcgatatcgtagtggcgcagaatctccaggcacgcctgagcggtgcagggcgcgaagcccgcgccctctccggcgaacacacgggccagcgagctggccgtagccgagtccacgtccttttcgggatcaagggcggccgcggcctccttcaggttcaggtgggcgggaagcgggctgagcagcagcacgccgtgcacgccctcgtcgtcgttcagcgtgcggatggccgccagcagctcgacttgggtcgcctcctcggccagcgtcatcgagcgcacgcccacgccgatgccctcgcagcgtttgatggcgccgcgttcgtaggcgatctggtcgcccttctcgcccacgcgcagaatcgcgagggtggggcggacgccttttgccttcaggtcggccacgtcggcgctcaggcgctccttcatggcggcggccacgtccttgccggaaagaatctgtgccatgcgaatgcctttctaccgagcgggacgcacggtctgcgccacggcgtcgaatgtctggtctgcgcgggaaacgtaggttgccagcagctcgtcggcctcggcctcgatctgcgcggcgcgactgcggtcggtcatcgacttcgtgttgatgaacacgctgagactggcggcctgcagggccgcgcggcacagcgccacgccggctcccgcgtcggacacaacgaggcgcgagccgatctgcgccagacgtgcgtgagcgtcgatgccgcgggccgccgtgcgcatgatctgcagcgggggctcgcatgcggtgttcagggccgcttccatcacgtcgccgcgctcagggctgtccttgggaatcgagtaggcgcgggccaggggtgcgaaggcctcggcgtcgctgtcgacaagagcggtcagctcggcggagaggcgggcgcactcatcggtcagagcgcgcacctcgtcctcgacatcggcgtagcgcttcttgcccacggtgaggttgcccaccatgctgcccaggtcgcagcctagggcgcctgcgtaggccgcggctccgccgccgccgggcacgggttcggcggacgccagcttctcagagaagtccctcaggctcaagtcggtaaggctcattgcggctcctttgaggcggtcgggttcgttcggtgcgttcaaggtgcccagcgcaaggcggcgacactgggtggcgtgcggtgtgtcgccacgttgggcgggtgccccgtgtccggtgtgccgtgcgcctggtgtccttggtgcgcgatgggcgcatgcaggccatcctacccgaggaggcccttgcgcgcaccctgcatcggcggacgggcgaacgggtgggagaagcgacggtggtcgcccgcgcaggcacgggcgaggcgactgcgctcggcggtcctcacaggtcagggtggtggcgtgacctatggtgcagtcgcgttgccggctcgatccatggcgcggcacatggcgcgattcgcgttcagcgtcgggcgagcgccgcatgcgcctgcccgacgcttcggtaggatgcggcgctcgtcgcgccatggccctcagctgaacggcgaagggggttgcgtgcgtggtttcccccttcgcttgggaatcggcgggtcaaacgctagaacaggccgcttatcctgcccgtctcgtccacgtcgatgcgctcggcagccgggctctttcccaggccgggcatggtcatgatgctgccggtcagcaccaccacgaagcctgcgcccgcgctgacgcgcacgtcgcgtacggtcacgctgaacccgcgcggggctcccacgcgtgatgcgtcgtcggtgaagctggccggagtcttggccatgcatatgggaaggtgcccgaagcccagctgctccagcttgtccagctccttggcggcgcgcgcctcgaaggtcacgccgtcggcgcggtagatgcgcttcgccacggcctcgatcttctggcgcagcggctggtcaagctcgtagctgaagctcagctcgggtgcatcctcgccctcgcacaggcgaatgacctcggcggccagcgcggccccgcccgcgccgccctcggcccatacgttcgacagggccacgttcacacccagctcgcgacagcgttcggcgatcagggccacctcggcgtcggtgtcggtggggaagcggttgatcgccaccacgcagggaaggccgaacacaccggtgacgttctccacgtgctgcagcaggttgggcaggcccgcctccagggctgccaggtcctcctgacccaagctggccttgtcggcgccgccgtgcatcttcagcgcccgcacggtggccaccaccaccacggcgtgggggcgcaccccggtcaggcggcacttgatgtccaggaacttctcggcgcccaggtcggcgccgaagcccgcctcggtgaccgcgtagtcgcccagggccagcgccatgcgcgtggccatgatcgagttgcagccgtgggcgatgttggcgaaggggcccccgtgcacgaaggcgggggtgccttccagggtttgcaccaggttgggcttgagggcgtccttcagcagggcgcacatggcaccttcggccttcagctggcctgcggtgatcggctcgtccgcggcggtgtagcccaccaccatgcgcgccaggcgctccttcaggtcgttgatgtcggtggccaggcagaacacggccatcacctcgctggccacggtgatgtcgaagccgtcttggcgcgggaagccgttcaccttgccgcccaggcccaccacgatgtcgcgcagcgcgcggtcgttcatgtccacgacgcgcttccagctgaccttgcgcacgtcgaagcccagcgcgtttccctgatggatgtggttgtcgatcagggcggccagcaggttgttggccgcgctgatggcatggaagtcgcccgtgaagtgcaggttgatgtcctccatgggaaccacctgcgcatatccgccgcctgcagcgccgcccttgatgccgaacaccggacccagcgagggctcgcgcagcgcgatcacagtcttcttgccggcgcgcgccagggcatcgcccaggcccacggtggtggtggttttgccttcgcccgcgggcgtgggattgatcgcggttaccagcaccagcttgcccggcttgtgggcatggtcgcgcagcaggttgtagtcaaccttggccttgcgcgtgccgtactgctcaaggtacgcgtcgggaacgcccgcgcgcttcgccacctcggcgatggggagggtctgcgcctcctgggcgatttcgatgtcggacttcgtcacgtcgctcctccttctgggcatttctcccgtgctgccgtgcgctccctgaggcgggcgcggctgccggcagtcagggcggaaccgtctcgctgtcagtgtaggcccttggttttcgcgcggctgggagaatcggcatcctgcgtgcaatcgaccttcagcggcttgggcgcggctttcagcgctgtgcggtcgcgcacgcggcgctttcagggcgcgaggcggtcttggggcaggtttcgcatcgcaggccggtatgcagcctgcctatcgttttggcggcaaccgctcatcgcagacgcggtcaggtggaatcggtagtatcgttgagagacgggtatgcgcccaggcgcaagcgcgtcgcccagggaggggagacgcgccaatggcattaaggaggattcatatgtccgagaacaagacccagacccccggcatcgacgcgattaccgacggcctgaaaaacgtgtttcttgccggcatcggcgccatctcgctgggtgccgagaagagcaaggagatcgccgagaccctggtgaagcagggcgagtcaaccttcgagcagagcaaggagctgaattccgagctgcagcgcaaggtggttgacgcatcgaccacggcgcgcgagaccgcggtggaggtggccatgaaggctatgagccccgagcagcgcgcggccttcgccgagaaggtggccgccatcgctgagaagcagaatgctcaggccgtggaggtggaggctgaggtggaggacgtgatcgagccggtggccgaagctgccgccgaggccgttgacgccgccgccgaggctgctgacgaggccgtggatgccgttgccgaggccgtgaacgccgacggcgagggcgctcagtcgtagccgcatggtagccaaccagatcctgcgccacctgttctcgtccggacgcgatgtgtccggcgaggggcggttccagttcaactcgcgttcgcgggcaagccgcatgcgcgagatctcgggcatcgtgctgaagcacaacgcgctgcggggcttcactccggtggagttccgccgcgcccttgaacagctgggccccagcttcgtgaagatcggccagacgctgtccatgcgctccgagatcctgcccaaggtgtactgcgacgagctgaccaagctgcaggccgactgcgacccgcttcccttcgatcagatccaaagccagctgagactgttttacggcgagcgctacgacgaggtgttcgcatcgatcgaccccaagcccttgggctcggcctcgcttgcccaggtgcaccgcgcccagctgcagtccggccaaaccgtggccgtgaaggtgcagcgcccgggtgtgaaggagacgatggcgcaggacatcgacatcatgcgcatgctggccaggaaggccacgctgctgatgaaggacgagcagatgctcgatttccaggacgtggtggaggagatgtgggacaccttcctggaggagaccgacttcgagcgcgaggcgcgcaatctgatccagttccgtcagctgaatcaggacgtggcctacatcgactgcccgcaggtgcatcctgagctgtcaggcgagtacgtgctggtgatggagtacgtggagggcattcccatccgcgatgccgaccgcctgcgcgaggcaggctacgacctggccgagatcggccgcaagatcctcgacaactacgccacgcaggtgcttgagcacgggttcttccatgccgacccgcatccgggcaacatcatcatccgcgagggcaaggtggtgtacatcgacctgggcattatgggtcgcatgactccctcgcagtgcgccggcttcgcgcggatcatcaagggcgtgggcatgggcaacacggccaagctgaaggaggctctgctgtccttcgcggtggcgaaggacaacgcgaaggtcgatcatgcgcgcttcctggccgacctcgatctgctgctgggcgattacgggtcgtgcgacatgggcgacctggatatcggcctcatgctcagcgacatcctggcgttgacgcgcatgagccgcgtcaccctgccttcggcgatcaccaacgtgtcgcgcgggttcgtcaccatcgagggcacggttgccagctacattcccaacgacaacatcgtgaacatcatcaaccagcacttgcttcgggtggagaagaagcgatcggtgctggaggagctggagagcgcgggccttgcgatgaggcaggcgggggagggcctggtggacgcctcgcagctgtcgggtgagacgctgcggatgctgacgcgcggccagctgaagctgaacatggagatgctggggtccgaggcgcccatggcctcgttgggccgaatcatgaaccgactgtcgatggcgatcatcatcgccggcctgttcatcgggtcgagcctgttcgcgccgtacggcggcgatccgagggccttcggcatgccgttgctgtcgttcttcggctacgcgggcgccatggcgttgtcggtgtgggtggtgtacgacatctggcggcatcggtaaggattcgctgagaagaacggcatgaggcgcgcgccgcgcgaggtggggccgatcgggcgcagcgccgcgcttgccgccggcgactgcagggaggatgacgggcgcccgaggcttccgtcatcctcgcctcgcgatcccttcccttgcggaaaagaacgacccctgctgcgtgatgcggcaggggtcgtttctcgcatgagcgcaggctgctagtcgcgcgccttcggcttcttggcgaagcggtcgtagaacccgccgtccaccggggccttgcgggcgccctcggtggcgcgagggcccgatcccttgcgatggttcttcccgccagcgctgggcttgccgcccttgcgcgcgggcttcacgaagccgtaggcgtcggcctgtccgcgctcgcccttccatcccgtgccggtgccgggcttgcgctcgaagcggccgggcttgcgggagccggcggcctcgcggccttcggggcgcccgcctcgcgcgtcgcggccgtcgcggtcgctgcgtgcgggacgatcgaagcggtcggagcgctcgaagcggttgtcgcgcccgctgccgaagcggtcgctgcgcgcggcgccgcgacgaccatgggtgtcgcgcgaatcgcgctcgtcacgtccgtagcgtccgccgtcacccggcttgcgtccggcagccgcactgcggcccgcggcgggcgaggcgccgtcgcctgcggagcggtagggcttgccctggccgcgcgcgattccacggaactcgcggggaccgtcgcccgcgcgaccgcgcttgtgggcctgggcgcgctccacgtcgcgggcgcgagagggcttcttcttggccttcttctgcttggcggcaagcacgctttcgtcaagctggtaggtttccagcggcatggtgggcagctcgcgctcgatcaggcgctcaatgtccttcaggccggtgcggctctcacgactgacgaacgagatggcgtagcccacctcgcccgcgcgtccggtgcgcccgatgcgatgcacgtagtcctcggccatgtcgggcaggtcgtagttcaccacgtagctgacgctgggcacgtcgatgccgcgggcaagcacgtcggtggccaccagcacgttcgttctgcctttggcgaagccctcaagggcgcgcttgcgcttgtgctgcgttttgtcggagtggatcgactcggccgagaatccggcggcgcgcagctgctcgcagcagtcctcggcgcggttcttggtgcgcgtgaacacgatcacgcggtcgaagcccttctcctgcagcacggcctgcagcagctcctgcttcttgcggtgctcgatgggcatgacgtactggtcaaccgtgcgggcggtctcgccgctgcgggccacctccacggtggcggggttgcgcaggatgggggccacgctgcgcatgaccttgcggtcgagggtggccgagaacagcagggtctggcgggtggtgggcgtttcggcgatgatcgactccatcgagggccagaatcccatgtcaagcatgcggtcagcctcgtcgatcaccagaacgtcaatgtcgcgcaggttcaccacgccgcgctcgcgcaggtcgttcaggcgcccgggggtggcgatcaggatgtccacgccgcgcttgagcttggtgatctgcgggccgtacttcgtgccgccgtacacggtgcactggaagtggcgggtgctgcggctgatggcgaagcacacgtcgccgatctgctgagccagctcgcgggtgggggtgactaccagcatgcgcgggccgcctcccttgcgggcgcgaggcaggcggctcatggtgggcagcaggaaggcggccgtcttgccggtgccggtggcggcggcggcgcagaggtcggagcccttcagcaccagcgggatggcctgggcctgaacgggggtgggggtttcgtagcccagggacttcacggccttcaggacgttctcggacagccccaggtcggagaagcgaatgccgtccgccgtggcgatggcgggcgcggcggcaggggcgacgggctcgcttgcgggccggggggttgccgcctgctcggttgcgcgtgcggagtcgctgcgggcggtcgcggtggtcgcggtggtcgtgcaggcgtcttcgatcgagccgctgttcgcggcttcggtcttgggcgcggcggtggcttcgggcgcggcggcggtggggttcgcggcctgtgcctgcgatgcctcttcggtcgcggccttgacggcgcttgcttccagggtgttctcggcggtttcgttggtgctggtggtcatgctgttccttcgcttgtcgtgcgacgccgtgcacgcgcacgtacggggcctccggcggagggccgttcatgctgcggctgagcgctgccgtgggtaaccgcgcgtgaacgcggtcgcacccgcctcatgcggggtgccttgcgcttgacgcgagccgctttcttgttggtgtgggtgcgaaggcacggggccttcggacgcggcgatgccgtctgcggtcgatcgaggcgatgcctcgaagccgcggcgatccaccgcgggcaggggctgcgctcatcgggcgctgcccgaatggcgtgcgggcgttggcccgcgccgacaaacgaagaaagaatttcgtgtgaagctgctggctagtatggggcccggtaggagctgtgtcgatgacaggccggcgccctcctcaaaacgccataagttcggttgtgggattgcagagaggcgagctgtgctggtttccgtgtggtgcgtcgcagttacgttttgtcgacagggatttaatctacgcccctcgctgttgcgttggcgctatcagatatggataccattgtgtaattgtcagcgaaccagcctcgatcttcatgtgcagttacgcacaactagcttcactcagaatgctcgttaaaggaagcgctgtctaggagaagcggtgtacacgaatgattaacgtaggcgatatacgtatgcgacgcctatttattaacgcgctctcagatccttttatgctggcgttttgaaaacagagttcaactgcacttattttggtacaccgaaaactgaatttagcaccatcatacagctaatcatgtggtgcattgcgatggggccgatgttttatttaaagcagattgatcatggatttcaataggattgatggcggattttgacaagaggcatgtgaccccaagccatcaatgcataatcggattcggtactgcaagatctgggggaaagggttgtattgttaggctagttgttttgggtcaagcgttattgattccttgagcctgcgcctggatacaaaaaggagtttgttatgagtgaagttctagcgggaaacgagaagggtgaaatcgacctgtctttcaggtccccgtatctagttttggggcttgatattggtattgccagtgtggggtgggcaatccttgatctagctaacagccatatcgttgccgtcggcgtaagggtatgggataagtccgagcatccaagggatggtaggagctacgcgaaaatcaggaggctgcaacgcgccactcggaataataccgcgcgccgcaaaaacagagcgaagcattgcctcaagattatgaagaagcacggattgctgtcatcggaagtcgatgcagactggcttcaaacgcgcaagggagataagccaactggtaagcttagagttaagggtctcgactttctgcttacagaacgacaatgggcgcaggtgctctatagcctagtgaagagccgtgggtacattgatcacagtactgatgccgatcttgctgcaaagatggcacggcagggaagctcgtctgtcaacgaggggtcttctgattcaggtgtttctgatgaagaaaaggacgacaagaaaacactcgatgcgattttgcgcaatcaagagcttatgagtttgtcgggcagtcgcactgtcggggagttgtttgcgcaaagcgggcgttttcgtaatcgggcgaaagaatacagtcatagcaagtcgattgagcagatcaagcaagagattaggactcttttcaagtcgcaacgaagtttagggaatgcttatgcaagcgaaggcttcgaatcggagtatcttgattgcttgacttggcagaaagaggtcacaggtaaagacgaggcgaattaccgtaaggtgggtgggtgcatttaccaccctttgcaacgcagggcgcctcgtgcctccctttcatcggagatgtgcaatcttcacgaacgaatttccaatctagtaatcgttgctccagacggcacggaatcagcagtgaatcctgaggtgcgcaatgcgtttgtgagcactatgtttcagcctgtaaagacaaagggcgtggtagattcctgtacgtataaagctcttaggaaattcattcctgggatgaagtccgatatgaagtttaagggcattgacgaatcctcgaagttggtaatcgcgggtggttgggcgaagctgcgaagtgttttgtctgaggagcttatgattcggttgtcggcaaaccgtcgcttgaccgatcaggtgttgtcggcgattgcaatttcttcaagtatcccgagtttggagaagcgtttgaggagcctgtgtttgtcggagagtgatttggtcgaattgaagagagttccgatcaacagcaaggttttcagcgggcgctcttcaagaagcgcctcgtcacttcgctcaattgttcgggcgtttgagagaggcgctcgaagccttgccgaggctgagcaaatcgcgggattgaaattggcaaaatgcgcttcacagaagagcgaaaaacttcctccctacagtgatttcgatcccgtctgcacgaatcccgttgttttgacggctatgagggaggttagaaaggtagtcaatgagctctctgactattatgggctgatgaacgaagttcatatcgagctttcaagggatttgcgcaactcgagaaagattcgcgctgaaatagaaagcaagctgcggaaacggacgaaagcacgagctgcgaatgcgaagagattagaggaggaaattgagaatcttgtcgcagagggtcgcttggctggacccgttgaaatcgattgtaagcttttggtgaagtacgagttatggaaagagcagggcgagcgcgacatctatacaggtcgggggattgacctcgaaacgctgctaacacctaatgcctgtcaggttgatcacatccttccgtattctcgaacggctattgatgggttggtaaacaaggttctggtgcttgcgagctccaatcaggataaggggaatcgcaccccttatgagtggttcagtcatacagaggccatgaactgggatgacttcgttcatagagtgagctcttcgaagctcagcaaaggaaagaaggcctatcttacaagaacggagctgtcggaggctgatgagcgcggttttctcaatcgcaatttgaatgatacgaagtatgcttctcttcgcgccaaggcatacatagaggaacaccttttgatgggggaacccaagggtaaagtgtccgtactggcggtaaagggtggtgcgacggcagctctgagaggtgcgtgggggataaagaagaatcgcgcggagggcgatctgcaccatgcggtcgatgcggcggtcattgccgcatgcgatgcagctgcggtgcagcgtatcgctcaggcacacaagaagaagcagcttgtgaagaaggaagagaagagggagctttttataaggtctgagccttgggatggctttgtgtcggaactgtataaggcggttgagctgtgcgtgccttcccgaagggtgcgtcataagctgaacggaagtgcgttcaaggacacaaggtatcgttttcttggggtgagcgaggacagcggtcttggactctatctgtcttcaaagggtaaggtcgaaggaacccaaacataccatctgtccaaagataataaaacagttttgctcatcgatagacaggcttttgtaagactatggtgggatgatggtgcagatgcaaagaaaaaagcttcgtttttaatcgaaccggtttactactatgaccttcctgcaatgagaaagggtacatatcggccgaggtttgtcccaccaaagtcgtcaaagcggccaatccatctttgggatccagtgccagactactgcttgttgaggaagcctatcatgctgtttccaggcgacactatccttgtgaaaggaaggcccgccgtatttcggagtattcatcttgacaaccgaaattgggagctagaatcggtcttttctagaaagggaaaagccgaaggaatctgcactatcgctcaatgccgaccagaagatatctcgatcatatcaagggattgcataatctaaatcatcaatgtaagctgcgctccaaatccgtttgcatggtcatgtgtgggtttctctccgcgcatgaccatgcggtctgcaaactgcttgtcggtcatcgtaatggtggtgacggacccttctttcggaaggtttttctttagtcggtcaaggtgtgcgttcatgttgtcacggccgattgcgattcgcgtgtatacgctgaattgaagcatgctgtatccatcatcaataaggaacttcctaaactgggtgtaatcttttctatgtgcactcgatgatgcagggaggtcgaatagcacaaggattcgcatcggtctcatcctctctccgtttctgcaattttcaggtcgatgagtgcggggagttcgagtgcgcccgcgcatctagtttcaacggctatggagagcgtatcgattgtgcgttgaatggctgattgaatgctatataacttgccagatagcagaacctcatattcgagcgcgcgataaattgcttttctgtctatcgaattatctccagcagggagctcgtctcggtttttcatgacgagaagatcaatgcagggccggaagggttcgatcaaatcgtctgcgagattaaagggattttgcatgctgcaatggtgaattccgcgaaaagggagccagccgcttgcgactatgcagcgcgcgattgctgatctgacaatggagtacccgaagtcgagggatggcgagaagtcgctgttccgccggccgccaagaggaagcagcttctgaaaatagagtgaggcccctacagcctcccgattagttgagtcgcccgagtgaatctcttttgcccaagcacgaattaagtcgctgccaggtatctcaagcagttctaggcagcgagcttggttcacgagtttttgctgcacaattcgcgcccaaagctgcttgcgaagcggcttagatattcctagctgtcgctcagctattttggtgtgctgccagtgcgcatgcaggggaagctgtattgagcaaggcatgtgggtgttatcgcaaacaacgagggcgatgccgtgttctgatagtgcggccaacaagggtgaggtcagggttgcttggtgtgattccaccacaatcaacatgatgtcttctaggggaagttcgcatgggcccttgtcggaacaaacaacgagagctctgtgccgcaatgccaacttgcacgcggactgaatgtagaccgtacgttttggcatgggacctccgcatcacgattgcgtttatggtgtatgatgcattacgtctagataagtatatcaactggggagttggaaggacaacgtctagacaagagacccgaaagggtactcgcaaggcaatgtccagcatgctggacaaccttagttggccaaccccaaaggggttggccaacgtctttttttcgaaaagctccgtggtttggttgatgggcggatgtagggcgtgttttgtagtttagttcttcaggaaacagcctgttcaaaggctatttcctgagtccctattataccaactggggaattggaagggcgtcaagacctgtacgagctcatgccgcacgcggagcgcattataccaactggggaattggaagggcgtcaagaccagggcgggccgcagttcctttgcccacaattataccaactggggaattggaagggcgtcaagacattgaactcggtcagctgacgaaccgtgttattataccaactggggaattggaagggcgtcaagacaatcccagcggcgatcggcgggctcttcgaattataccaactggggaattggaagggcgtcaagacgaggaacgcgcacgagtggcgaagcgccgcattataccaactggggaattggaagggcgtcaagacgccaccctgtcccacctcgtcgggcacggcattataccaactggggaattggaagggcgtcaagacttgtacccgtaatacgtccgctgcgacgaattataccaactggggaattggaagggcgtcaagacttgaaggcaacgcacgccgacgtgaggtctattataccaactggggaattggaagggcgtcaagaccctcggcacgcgcaactcccagacgctcatattataccaactggggaattggaagggcgtcaagacgcagcgggcgcagtagtgctcgccctcgcgattataccaactggggaattggaagggcgtcaagactactacgtcggcgacgccatgtggaaccgcattataccaactggggaattggaagggcgtcaagacgtgaacggacgcgttgtctcgttcctgtcgattataccaactggggaattggaagggcgtcaagaccatgatgtaggcggccagcagcatgacctcattataccaactggggaattggaagggcgtcaagacgtagtcgccgagaagcagggagcacgcctcattataccaactggggaattggaagggcgtcaagacgtagtcgccgagaagcagggagcacgcctcattataccaactggggaattggaaggtcgtcaagactccttgctgggcgcggtcgtcgatgcccagctgcctgttgagcgcgcgtatctcggcgctggcctgcttcatggtggacagctgcggcatggcgcgcaggtcgcccatgtcgttctggtaggccacggcgggaagctccccgcccacgtccaggtcgtccatgcaccgggcgatcaccgcgtgccactggcacagcagcgccagcgtcggcgcgtcggactcggcgaagtcgcgccccgccgtcagctcgtcccacttggcggacctgaacgcgtcggacgcgatcgcgtcgggcttggtcaggggcatcccgtccacctcctttttttgcgtcagggcatgagaaagccgccccgtagggcggcgcgagccagcttggtggcgttagtagatcggctggatgtcggaatatcttagaaacttcttcttctctccgtcaacctcggcatggaccgtcccgccccagttgaagtgagtgattctcccctcgccgtagggggtcatgacgcgcgcgccctcatccaggctcttgatctcgttgcgatgtcggacgaccttcgtcgcctccgccgccttcctgctcaggaactccttgcggtgggcctcgaacgtcggggccttcaccttcgccgccttgagctccttcacgttcgatgcgcccgaaacgtcaacgcccttcttcttcgccatgtccatcagagtgtagtagtacgagcggttcaggctgagcggcgcgatctcgccgctcttgatcttgctgaagatctccttgttggacatcatcgaccggttcggcgtccagaccttccgctcctgcccgccaagctccttgatgagcagggtggcccgccccgtgtcatgctcgaagcgggccggctccccgtggtcccactcgtcgcgccacggcttgaccttctcctctagcacccactcggggacgcggtcgtgcgggaggaacgccatctcctcgtatacctcgtcgctgagttccttctgggccagcgctcccgcagacgtggcgcttcccttcggcttcgccatgttgcccctttcaaaaaagaaagccgcccagatggcggcttaactgtatgcaggaaacagaatattctataaatatgattcaagcggagagaggcagacgacctcttcattttcgctgcctgtgagcatttcttcgatctcttcaagagagaggtttcgcgggtcaatcgaatccgcaacggcattcagctcatccatctcagcccccctccgcctagcgctttcttcggtagtaaacaacccctagagattcaaggggcttcatcccttcggctatcctaccatgaactatgccagtcgtcacttgccacgcagcgcgattcgatcgctcacgcgagaacccgctcttgtcaaatcgcttcttattctgattgaaatttgatttgagcagcccgccttcgccgcagaagcgattgatgtcagaagcgagctcggtgatctttttctttgccgccaagacggatgggctgtgaacacctctcgtgaccgatagggcataggtcgtcctctccccagaaagcacggctctgacgctcttcacgttcttatgggcaaatgcctctatgtcactcggcgaaaaagtaccgccccatccgtatctaccgctgggatgattgtgggttatcgtgattccttgaaatccgaacacatggcccggaacgctcacgctgtgcgaaccccttccattttcgcctgagtaagctgcgataactctcatattttgatcgaggatcacagcttcctcatgcccctccaccttacgaagcttctcctctacctcggacaaagaaagacctttataccgcttagttactaaaagaggttcgttggccctcctcgactcagacatcagagcggacatgctaagttttggcttagccactcttccccctgaaagccttcggcttgtagctcacgacctcgcacttcccgaagtcgaacccgaacgtcctgccgtacatcaggacccgcgtcggcgcggccttgtccatcatccggcgcatgccctcggttatcgcgtctcggtactcgtcgccctgcacgccgacggtggacacgaacaccgtgccgcccctcgggagcccgtcgaagcagtagtcgaacgaatcggggccgctccacgtgacgttgggcgcgacgacgaggcccttcctctgccaccagttggccagcgcccgcgagcggtagacgttccagagcttcatcgggaacggcatgtccaggtacacgctgaagtcgggagccacgacgcactggaacctccccagcagctcgatgtagcgctcggggctgttccatacgcaaaggctttctgggccgttattgggcggcggcgatcttgcggcaggctctagaccttgatgattgcatgtcgatagactgaggtgtttggtggtatcggttaactgattatcaagtttgggtaaagcagcatcgaactgaccggcatcccaaccggcgaagccttaagccctcgccgcgtttgctcgggcttgcgacgtatgcctgatcagcgtggcataccccaatcgcttgcgcgccttgaggcccgtgtgcgcgccgtcacgggttacgtccggtgcgcggttcctcccagctttccgcttaatagcccgcccgtctttaccgacgccctgcatgcggacggcgccccggtggccgtggcgctggaggacccgaagcccgcggaggcaaggcggatgatgaactgcgtcgattgcctggtgtcgagtgtgaccccagcgaagatcgcgcaggaggaccccgctggcgcggtcgagcaggcggcggaccacgcggccgcggtggtcgccgtcgtgcacgagaagcgacgggcctaggcgcacttaggcacacggacggcctgtgggatggccgcggtagcttccggtcggctgctgcggtcatccggcgggttgcccgcggctccctcatcgctcaccgcacgtcatttgccttaccatcctttcgcccgtgagcctttcgggtggtcgcggagccgccgtcccaggccgtggcccccatgttagaatccaacgagccgagccctgcgctcggctcttcagcgttgccctgtgcacgcgaccatcttcgtcccgacacctgaaaggcatcgcgcatgagcgactacatcgagggaaaacgaccgatcatcgaggccctgcggatcggcgtgcccctgcggcgcatcttcctggccgacaatgccaagcgcgatcctttggtggaagacatcatgcgcaaggcgcgtcggtgcgacgtggacgtgaagctggtggctcgcgccaagctggacgagctgtcagcccatggcagccatcagggcgtgatcgccgagtccaagcgcttcggctacgtgggcgtaggcgacctgatcgatgcagctcaggcttatgccgaggccaacgacggccgcgcgttgatcgtgctgctggaccacatcaccgatgccggcaacctgggcgcgatcatccgcagcgccgagagcgcgggcgccgtgggcgtggtgattcccaacaagcgcagcgcgcacgtgaacgccaccacctacaaaacctccgctggcgcggtcgcccacctggccgtggcccaaacctccaacatggtgcaggccatcaagcgcctgcaggaggccggcttctggatcgccgcagcctccgagcacgcctccgactatctgtgggatgtgaacctgaagggcaagatcggcctggtgatgggcaacgagcacgacggtgtgtcgcgcctggtgctggagcgatgcgaccttgccggcaagctgcccatgatgggcgaggtgtcgtcgctgaacgtggctcaggcctccacggcgctgatgtacgagtggctgcgccagaaccgcccggcatccacgctgcgtggcgccgagcaggcgggcgcagcgaaggggtgctagcctatggcgcgcgaccgcaggcgcatgctggtggtggacggctacaacgtgctgcgctcgggtagccgctaccagcgcatctcgcagcctgactacaccgacgacgccttcaaccgggcacgtgaggccctgatcaacgacgtggtgcacttcgccggccgcgagtggcgggccaccgtggtgttcgatggcggcggcaacgccttctccaccggcgaccccaccagcgtgggcggggtgcgcgtgcagttctcgcccgcaggcttctcggctgacaagctgatcgagaagctggcgcgcgagggtcgcgagaacggcttcgaggtgctggtggtcaccagcgacgctaccatacaggacaccgtgtttggcctgggcgtggatcgcatgagcgccgagggcttctgtcgcgacatggcgcgctactacgaggaggcgcgcctggacgacagcccgcgcgtggcgccgaagaccacggtggccggacgcatcgacgccgacaccctggcgaagctgcgtgccctgcgcgacggtcggtaaagcttccctccccgcatccggccttcgaggccttccgttcctggccatcgaggcacgcgtcgcgccgcccgccacggcatgcttggtgcggccggcgctcatgcccgctcgcgctaccgcgccgggttcggctctctcgcgcttgatccttgggatgagctggctagggcagcggtcccagatcggcaccgctcatgcccatgaagcgcgggtcgatgggcacgcgcatgcgcggcgcgggggagtcgccggcggggccgatggcctgtgcgtccgcgcctgcggattcgctgtcgaagggcaggcgcccgtactgcgccacgtacgcgaacagcaggttgatcgcgctggagggagtgtgccccagcgccttcagcgcctctgtggcccgcgccttgcgctctgctggcatccggacggtcaccatcgtgcttcccatgggctcctcctttgatttgtgtaatacgaagtatagcggctgcggcttcgccgtgctctgccgccatgcatcgcatgtgtcatcgattcgtcaagaaaagccaggtagatggcaataaaagacagcaaacttccatacttgctgaaaaaaatccttgaccttctctttcgttcatcatactttgtaaaactgtacttttttgcagttctgtaggtgtcgcctagggaggagcagcctcgtggctcaaggaaaaaatcctgataccaccagccgttacagggatcgccgaagcttcgcgaagattcaggacgtgatggacgtccccaatctgatcgccattcaaaccgagagcttccagtggttcatgaccgagggcctggagaaggcgttcgccagcatcagccccatcgagaattccaccaagaccctgcgtcttgagttcctgggccatcgcttcggcgagcccaagtactccgttgacgagtgcaaggagaaggacgtctcgtaccaggctcagctgtatgtcagcatgcgcctgatcaacatggagacgggcgagccccaggagatggaagtgttcatgggcgatttcccgctcatgaccccgcgcggcaccttcatcatcaacggcaccgagcgcgtcgtggtgtcccagctcgtgcgctcgccgggcgtgtacttctccaccgaggccgacaagacctccgcgcgcaccatctacaacgcgaaggtgatccccagccgcggtgcctggcttgagttcgaaaccgacaagcgcgacgtgctgcacgtgcgcatcgaccgcaagcgcaagcagcccgccaccctgctggtgcgcgccctgggcctggctgagacgcgcgagcagatcatcgagctgctgggtccgtccgagatggtgctgcgcacccttgagcgcgaccccgccagcacgcgcgaggagtcgctgatcgagctgtaccgccgcttccgtccgggcgagccgcctaccatcgattcggcgcgcaccctgctcgacggcctgttcttcaacccgcagcgctacgacctggcgtcggtgggccgctacaagatgaacaagaagctgggcatcgaccccgaggttgacgcgcccacgctgaccgaagaggacatcgtgcgcacgatgcagtacatcctggccctgcacaacggccaggagggcttctccatcgacgacatcgaccacttcggcaaccgtcgtatccgcaccgtgggcgagctgattcagaaccagttccgcatcggcctgtcgcgcatggagcgcgtggtgcgcgagcgcatgggcatgcaggaccccgagggcatcacgccccagtcgctggtgaacattcgtccgatcgtggccgccatcaaggagttcttcggctcctcgcagctgtcgcagttcatggaccagaccaatcccgccgccggcatcacgcacaagcgccgtctgtcggccctgggccccggcggcctgtcgcgcgagcgcgcgggcttcgaggtgcgcgacgtccacaactcgcactacgggcgcatgtgccccatcgagacgcccgaaggccccaacatcggcctgatcggctcgctggcaacctatgcgcgcatcaacccctacggcttcatcgagaccccgtaccgccgcgtggtggacggcaaggtgaccgacgacatcgactacctcacggccgatgaggaggagaacttcatcatcgctcaggccaacgaggcgttcgatcccgacactcgcgtgttcggccgcaccggcgacaacggcgagttcgtgccctccaagcgcgtggtgtgccgcatgaaggacgccgccggcatgttcggcgagcccggcgaggtaacgcccgagcaggtgcagtacatggacgtgtcgccgcgccagatcacctcggtggccacgtcgctgattccgttcctcgagcacgacgacgccaaccgcgccctcatgggctcgaacatgcagcgtcaggccgtgcccctgcttcgtcctaccgcgcccctggtgggcacgggcatcgagcaccgcatcgccgtggactcgggcgagatcctggtggcccagaaccccggcgtggtggactacgtggacggccagaccatcatcatcctgaacaacgacggcgagtacgacgagtacctggtgccgaagttccagcgctccaaccagagcggctgcatcaaccatcgtcccatcgtgcgcaagggcgacgagctgcaggccggcgacgtgctggccgacggcccctcgtgcgatggcggcgagctggcgctgggccagaacctcatggtggcctacatgccctgggagggctacaactacgaggacgccatcatcgtgtccgagcgcgtggtgtctgaggacctgctgacctccatccacatcgccgagtacgagatcgacgcccgcgacaccaagctgggcgccgaggagatcacccgcgagatccccaacatctccgacgagatgaccgccgacctcgacgccgacggcatcgtgcgcgtgggcgccgaggtggagc

SEQ ID NO: 4174 - DNA, 23966 bp, synthetic construct
  misc_feature 1..23966: note = Synthetic
  source 1..23966: mol_type = other DNA
cgcgcgtcttcgagcgtctgcagaaggtgaaggcccaccaccgtcccctcaccgccgaggaggagacgctgctgcgcgagagctacgaggccttcgtccgcagtggcgcgctgctcgacgaggcaggcaaggaccgcttccgccagttgacggaggaggccagccgtctgtcgctgcagttctctcaaaacctgcgcaaggccaccaaggccttcaagctccacctcagcgacgaggccgacctcagcggactgcccgagaccgtgcgcgaggctgctgccacggctgcccgcgaggagggcaaggagggctggatcatcaccctcgacgccccgagctacggtcccttcatgatgtacgccgaccgccgcgaccttcgccagcaggtcttcatggcccacggcacgctctgcaccgagggcgaggagtgcaacctcgacatctgcaagcggctggtcaacctgcggcgcgagctggcccagctcctgggctacgagacctacgccgactacgtgatggaatatcgcatggcctcctcggcccagaacgtctatcgcttgctcgacgacctcatcgaggcctacaagcccacggccgtccaggagcgcgccgaggtcgtggccctggccaaggagctggagggcgacgacttcgacttccagccctgggacacggcctactactccttcaagttgcagatgcgccgctacaacctcgaccccgagatgctccgcccctattttgaggtgaaaaacgtcatcaagggcgtcttcgggctggccacgcgcctctacggcatcaccttccgcgagaacaaggagatccccgtctatcaccccgacgtgcgcccctacgaggtctatgaccgcgacggcagctacctggccgtgctcttcgtcgatttctatccgcgcaagggcaagcgcggcggcgcctggatgacggagtaccagggccagtggatcgagaaggacggcaccaacgtgcgcccccacgtctcgctggtgatgaacctcagcaagcccaccgacgaccgacccgccctgctgcgcctgggcgaggtggagaccttcctccacgagtttggccacgccctccacggcatgttcgccaacacgcgcttcgagtcgctctccggcaccaacgtctggtgggacttcgtcgaactgccctcgcagtttatggaaaactacgccacggagcgcgactttctccgcaccttcgccttccactacgagacgggcgagcccatccccgacgacctcatcgaccgcatccgccagagccgcaattacaatgtggcctcggcctgtctgcgccaggtgagtttcggcctgctcgacatggcctactacacgcagaaggatcccttcgaggccgacatcatcccctttgagaaggcggcctggcagaaggccatcatcggccagcaactgccgcagacctgcatgacgacgcagttctcccacatcatggcgggaggctacgccgcgggctactacagctacaagtgggccgaggtgctggagaccgacgccttcggagccttccaggagcacggcatcttcgaccaggccacggcgcagcgcttccgcgactgcgtgctctccaagggcggcacggagcaccccatgacgctctacaagcgcttccgcggccacgagccgaccatcgacgccatgctgcgccgcgacggcatcaagaagcaataacattccccctatgccgaggaaccatttccccgcgcaatcagagagatttccaaaatatagacagagaaaaagcaagacaagatgaaagatacgggcaagcaacggcttctcgacctgcgctacctgcgcatggcagccatctgggccgaaaactcctactgccagcgccgcaaggtgggtgcgctggtggtgaaggagaagatgatcatcagcgacggctacaacggcacgccgagcggatttgagaacgtctgcgaagatgcccacggcgtgacccacccctacgtgctccacgccgaggccaacgccatcaccaaactggcgcgcagcggcaacaacagcgaccaggccacgctctacgtcaccgcctcgccctgcatcgagtgtgccaaactcatcatccaggctggcatacggcgcgtggtctatgccgagcagtaccggctcaccgacggcatcgacctgctgcggcgcgccggcgtggaggtggagcacctgcccctcgacctccctgtctaatcatcataatattgtagtatatagcattccaagcgctgcaagcacccaggcgcccgtccgtccggacaccccggtcggcgcggctcctgtcatcgatcgttatgtcaaagaaaaaatccaaccggtttacccccttgctcatggccgtaagcgtcgttttcggcatccttgtcggcacgttctacgccaaccacttctcgggcaaccgcctcagcatcatcaacaacggcagcaaccgcctcaacaacctgctgcgcatcatcgacgaccagtatgtcgattcggtcaatatcgacgacctcgtggacaaggccatcccccagatccttgcccagctcgacccccactccacctacatctccgccgaggacgtgcagaaggtcaacagcgagctcaagggctcgttctccggcgtgggcatcgagtttaccatccagcgcgacaccatcaacgtgggcaacgtcatcaagggcggtcccgccgagaagatgggcctgctggccggcgacaagatcgtcgaggtcgatggcaagcccttcgtcggccaggtcgtcaccgacaccgaggcgcgccgccgcctgatgggccccaagggcacgaaggtggaggtgggcgtggtgcgctatggcacgaaggccgtgaagcgcttcaccatcacccgcgccgacatcgtcacgccgagcatcgccgccacctacatgctcaacgacagcacgggctacatccgcatcaagtccttcggccagaagacctacatggagatgctggcctcgctggcctcgctttcgcagcagggcttctcgaacctcatcatcgacctgcgcgacaacaacggcggctaccttgagagcgccatacagatggccgacgagtttctgcccaaggaccgtctcatcgtctatacgcagggccgcaagagtccccgccgcgactaccgcagcagcgggcgcggcgcctatcagaccatcccgctggtcgtcctcatcaacgaggcctcggcctcctcggccgagatcttcgccggtgccatccaggacaacgaccgcggcaccatcgtcggccgccgatccttcggcaagggcctcgtgcagcagcagatcggattccccgacggcagcgagatccgcctcaccatcgcccgctactacacgccctcgggccgctgcatacagaagccctacaagctcggcgacgaggccgactacgaccaggacctcctccagcgctacgagcggggcgagctcttctccggcgacagcatccaccatacgggtcccgcctaccacaccacgctcggacgccccgtctatggcggtggcggcatcacgcccgacatcttcgtggccgaggacacgaccgacatcacctcctactacaagcaggccgtcatgagcggactgatcctccagtttgccttcaactacaccgacgccaaccgcccccacctgcgcacgctcaccgaggtcatcgacctggccaagtatctgcagggccagggcctcgtcgatcagtttgccaccttcggcacccacaacggcctgccgcggcgcaacctcatgatccgtcgctcctaccacctgctcgaccgcttcatcagcagccgcgtcatctacaacatgctcgacgagcaggccctcatggagtatctcaaccaggacgaccccgtggtcgaggccgccatcggcgtcatcaagcgccacgaggccttccccaagaaggccgccgcggccaagccccgccgcgtcaccagcgagatggagcccaggagatagaaggtgtgtaggactgaaaaacagaggataaaagcacagattacaaaaagcatggaagatcaaaacatagagggaaaagacagggagaccagcgcgctgtccaagaagtcgctgcgccagcacatccgccagcgcaaggcgcgccataccgacgaggaactggtggccctgtcgcaacccatcgtcgaggccgtactggccgacccccgtttccagaaggcacagaccgtgctactctaccactcgctgcccgacgaggtctataccccgggcctcatcgccgccgcgctgaggatgggcaagcgcgtgctgctgcccgtggtcatcagcaggacggagatggagatcagggagtatctgcccaccacggagatggcgctcagcgacgacttccacatccttgagccccagggcgccgccttcaccgactacgcctccgtcgattgtgccatcatccccggcatggccttcgacgcccagggccaccgcctcgggcgcggccgtggctactacgaccgcttcctcgcccaggccgccgatgtctacaaggtgggcctctgcttccccttccagctggtcgaggccgtgccctgcgaagccaccgacgtggcgatggaccgcgtggagtgcggccccgtgcagtcgtagcgcccccgtcctcagaaaagcccttttaagtcgccacatcatcaaaaagccacccgacctccgctcctttgagcagcgatcgggtggcttgcttttttctctgtcctcagcccctttgccgaggcccagggcctttgcggccccagacggggagcttgcggattagttgagcgtgccggcctcggccttcttgatcatcgcctcgctggcgtagagatagacctccacacggcggttggcagcatccttcacgttgttctcgtggcccggcacaggctgcgagctacccacgccctggatggagcggatctgaccgtaggagacaccctgcgccttcaggtagttggccacgctttctgcacggcgctgcgacagcgggatgttaatgttgtcgttgcccgacttgtcggtgtggccgatgatcgccacgtcgcagtcggtgttgcccttcagcacggtggcagtgcgcgagaggtcgctcatggcacccgacgagaggtcagacttgttggtggcgaagagcagacccgaggcgaaggtcattttcacacaaggcagtccgttggcgtccgtcacggtctccaccttggcgttgttcacgttcgaagctgcctcctcggccaccttgtccatgtggcgaccgatcagcgtgccggcaccagcacccacggcggcacccacggcggcaccgatggccgtgcccttggtgttcttgccgatcaggttgccgacaatgccgccgatgacggcgccagcacccgttcctaccaacgtacccgtgccctgcttcgtttggcaactcactacggtgagcaggcaaaggcctgccgtaaacatctgtaacttcttcataatcgttctatttgtattgttctttatattgttttcacattcgtttcttcacgcaaagttataacaatttccccaaaaaggggcccattgcgagttattttttgtacttttgcggcaaaattagaaatttgcacccatccgggcaagggatttctcctatttcattataggaataatactaatcgcgatggggatttcggaagacaacaacaaaattcgactaaagaatatggcaaaagaacttaagaatctcaccaagcgcagcgagaactactctcagtggttcaacgacttggtgatgaaggccgacctggccgagcagtccgccgtgagaggctgcatgacgatcaagccctacggctatgctatctgggagaagatgcagcatcagctcgacacgatgttcaaggagacgggtgtgcagaacgcctacttccccctgctcattcccaaaaacttcttcgcccgcgaggccgagcatgtcaagggcttcgccaaggagtgtgccgtcgtcacccactaccgcctccgtaccaccgaggacggcagcgacatcgaggtggaccccgccgccaaactcgaggaggagctgatcatccgccccacctccgagaccatcatctggaatacctataagaactggatccactcctaccgcgacctgcccctgatgtgcaaccagtggtgcaacgtgatgcgctgggagatgcgcacgcgccccttcctgcgcacgagcgagtttctgtggcaggagggccataccgcccacgccaccaaggaggaggccgaggaggaggccaagaagatgctccacgtctatgcggagttttgcgagaagtggctcgccatccccgtcgtccagggcgtgaagagcgagacggagcgcttcgccggcgccctcaacacctacaccatcgaggccatgatgcaggacggcaaggcgctgcagagcggcacgtcccactttctcggacaaaacttcgccaagagcttcggcgtcaccttcctcaacaaggacaacaagcccgagtatgtctgggccacgtcctggggtgtgagcacccgcctcatcggcgccctcatcatgacccactccgacgacaacggcctcgtgctgccgccccatatcgccccgatccaggtggtcatcatcccgatcaaccgcggcaaggagcagctcgacgccatcacggccaagatgcagcccgtcatcgaccagctccgccagatgggcatctccgtgaagtatgacgacgccgacaacaagcgccccggcttcaagtttgccgactacgagctgcgcggtgtgcctgtgcgcctcgtcatgggtggccgcgacctcgagaacaacaccgtggagctgatgcgccgcgacacgctggagaaggaggaggtaagcttcgacggcatcgccgaccgcgtcaagcgccttctggaggagatccaggagaacatctaccgcaaggcggtggccttccgcgacgcccacatctacgagtgcgacaactacgacgagttcaaggagcgcatcaaggacggcggcttcttcctctgccactgggacggcacgcctgagaccgaggccaagatcaaggaggacacccaggccacgatccgctgcgtgccctacatgttcgagcagaccccgggcgtcgatatggtgagcggcaagcccgccacacagcgcgtcatcatcgccaaggcttactaagccctcggccgccctgtccatagaggccagtccctcgccgctccatccctctcccgctgagaagggcgtggcgcccgcggaggactggcctccgtcgttctatcggcttgatccatcggtcgttagccttccccgtcccctatcctacccgctttcaaagcgcaatgctgctgcttcgcacggcaaggggaaaacaaaaaaagtgcagaaaaaccaaaaaaagttggccaaatatttggtggggtctaagaaagttgctacctttgcacccgcaaaacagaaatgcaggcacccttagctcagttggtagagcaactgactcttaatcagtgggtctagggttcgaatccctaagggtgtacacggtctgtttttgcgatcatacgccaacaatgcacccttagctcagttggtagagcaactgactcttaatcagtgggtctagggttcgagcccctaagggtgtacaaaaagtccagtcattcgtgattggacttttttgtatctcaatcccaaggtggagcctatggtttgatccaaaagaacatcaaattgctccatgatcggaaatattcctccaaaaggagtgagtttctcggattttatttgtacatttgccatgtcattcggagattttgctatacttgtttgcagcactaaggtaggtgaaaaatctgacatggcataatcccgagcaccctatagttgctcaggtacttataaaaacaactaactcatagtactgcggaaattagagtataaaaagaatcacatcgaattatgaaatccgcaaataaagaaataggatttggcaaacaaactattgctaaggttttcgaggagtggtacactgttccttcatatcaaagacattacgtatgggaaagcgacaatgtgaatgacatgttggatgactttgcgtctaattatatagaacatgccaaggaggaatatttcctcggctcctacattattcaaagtaaaagcaacaacaatgacctgcttgacggacagcagcgtatcactaccttgtttctcttgtttgctttcttgcgcgactatgctggttcttcagaggatatcaaggtcaactgcgttgatttgatattccaaaaggccaataagattaagcaaattcccgaacggatacgcctttcttatgagattcgtggcaatgtgaggaagttcattgaggaatacttaatgacgcctggaagtattacgcagcattgggacgatattgtcaagaaagccaatgacaaaaaagaatgcacgtctattcaaagaatgtgcaatgcattggtttgctacaacgagttttttaccaatcataaagaaatagatttagattcctttctcatgttcatcctcaacaatgttgtgatgatctatatatcggcagactcgttagaggatgcatttcgcctcttctccgtgatgaatgatcgtggccaaaaactgagcaatgctgatattctaaaatcatccaatcttgaaaaaatcgaggatggcagcgaaatgaacgagtatgcgcgcgaatgggaaaacatgcaagaggatttgggtaatgattttgaccgtttcctcgcctatgtacgaacgatgctgctcaaaaagcgccaaaagacgaatctgcttgacgaatatgagaaacagatttttaaagcaggaaaaatcaaacagggaaaagattttttcaactatgtctttagggcgtatgaggattataacaagttgatcaacttggccggcaatgaagataccgagtattgttcgttgataagaatcctcatcgagtgtatgccttcgaccgattggattcctgtcattttggcgtatggaagaaaatttggagacaatgggcttcttgaattttcacagaaggtagcctgtaaaaacattgcagatgcagtatgtggcaaaagcccatcgtatcgcatcgaccacttgaatagtatcatccacttgatagaagagtctggaaaaccctccgatgtacttgacgctcaaggatattattcatttaatgaacatgtatttatggcaaatatccaatcagagatatacggcagacgatacacctacgcgctcctgatgcttcttgaatacaaatacaaggacaagtctgaatggaaagatttcggaacgacatccattgagcatattcttccacagaatcctaaagctaccagccagtgggtgaaggactttagcgaggaacagagaagctactatacacataggataggaaacctgtgcctgattggacgcagaaagaattcttcccttggcaatcttgattatcaggagaaactaaaaaaatatttcgagaagaatatcggatcctttgcaagctcacaaaaaatataccaaacatatccgaacgcatggacacctgaaaccgtgaaggaaaatcaagaaagagtcatacaggatctgatggaaatatttggtatcaagagtccaagtaccatcatagacgactctacatacatggagcagcaaagatccgtttaccctaatgcttataagccatggacagaatcagatgacgagagattagttgccctatacaacgaaggcaaatctattagcgaactcgcacaaatgtttcttagaaatcgtggcgctataaaatccaggattctcaaattaaccggagaacggttctaataagcaacgacgcaatgcaggatatcagccttcgtatcggatcaatccatttggtctgatgactcatttgccgtcatcttttcgccccaaatcccaacgactttagggaaattttgaaagaaaaactccatcaagtagccaacacggcgacctgcaaaagggttgccacattagatagtttaagcctatctacaattgggacgcctgaaagtggagagccttaccttttattagctcaaataaacaaaacagccctctcggcaagctataaaaaaagaaaactcccaccgaagcgggagtataggttttacccttcggccattgctggccttattgtgataagatgtaggaaatcttattctggatgcaaaaataccactttatttttgtttaaacaaattttttattgtaattttaccgaaaaatttaaaaccgcatcaaaaatgactaaaatacttggcattgacacaggcacgaacagccttggatgggctatcgtagaaaagaaggcagagcaatactgcctgcttgataagggagtgaatattttccaagagggagtcaacatcgacaaggacaacgagtcttccaaagcggcagaaaggacgggctaccgtgctatccgagtacgctactatcgcataaagctacgcaaaatcaggcttctgcacatcttgacccagcaccacctttgtcccccactcacctcctgggagctgcgccaatggcgactaaagagcatatacccaaccgatgagttgttcatgcaatggcagcgcacggacgaggagaaagggcaaaacccatacgcctatcgacatctatgcctgcatgagaaactggatttgacccaggttgcgaaccgctacatcctcggtcgcgttttctatcactttgcccagcgccgtggctttctcagcaaccgcaaggatcagagtggtgaggacgtgggcgtcgtgaatgacggtatcagtgccctctccgaagaaatgcgggaagcgggatgcgaataccttggcgattatttctaccagctctatgagaaaggcaaaaagatacgcaaacactacaccgcacgcaacgaacactacctcaaagagtttcatgccatctgcgaaaagcagcaattggacgcctcgctcgtgtcggagttggagaaggccatttttacccagcggcctttgaaatctcaaaaaagacaagtgggcaagtgcgtatttgagaaaaacaaagccaaatgtcctgcctcccaccccttgtacgaggagtttaggatgttgtctttcatcaaccatatcaaaataaaaacaccaaaggaagatgagctccgaccgttgaaccacgaggagcgcgagaagattcttccgcttttctttaggaagaccaagaaaacctttaatttcgaggatattgctaagaagttggctcctaaaaagctctacggattctacaagaaggccgctgatacggaaatgccgtatctcttcaactatccgatggatacttccgtctctggttgtcccgtcacagcggcgctacaagatattttcggtgacgattggctcgactccatctgcgaggtctatacgctggccgatggtaaaagccggcttgagatcctcaacgacatctggcatgcacttttcttctattccgaccaagacaagctggctgagtttgccaaggtgcgcctacagcttgacgacgaacaagcccaggccttcagcaacatcaaccttccctccgcctatgcttcgctaagcctcaaggcaatttgcaagatcctcccctgcctcagaagaggacttgtctattcccatgcggtttttttaggcaatctttgcgaagtgatgcctgactatgaatggggaatcgaggaaatgcgccaagctgccattgactgcgtcatcaaagagataaacagctatgaccccaaaacagacggacgcactctagagacgtgcatcaaagagtatctaaaagaaaggtatcatgtctcagacgaaaatctcaaaaagctctaccatccctcgatgttagagacttaccctcgtgtgcgccctggtcaagacggaatatatcaactcggatctccacgcaccgacagcgttcgcaacccgatggccatgcggtcccttttctgtcttcggaagcttgtcaaccgtctcttgaaagagggaaagatagaccaagagacggagattcacatcgagttttcgcgtgagctgaacgatgccaacaagcggagcgccctcaagcggtatggcagggacaaccaaaaggcacacgacacagcccgaaagcacatcgtcgaggattacaaggcagaaacaggcaaagcaatagaaccgacacccacggacattttaaaatatgaactatgggaagagcagcagcatatttgcttatacacaggtcagcagattcgcatatctgactttgtcggccccaatccgaaatttgacatcgagcacaccttgccccgaagcagaggcggagacagcaccaagatgaacctgactctttgtgacagccgcttcaaccgcgatgtgaaaaagacacatctgcctaccgaacttgccaaccacgatgaaatcatggcccgcatagctatatggcaggaaaaatacgaggagctgagccaacagattcgcaaacagaaacgcaaatcacaggctgcgacaaccaaggagcaaaaagacaaagccatcagctaccgccattacctggaactccagcgtgactatttgcgcggaaaacatgaacgtttcacgatggaaagcgtgcccgaaggattcaacaggcgacagggtgtggatatcggcatcatctcaaaatacgcccggctctatctgaagtcggtcttcaagcgagtgtatcctgtaaagggcctcgccacatctgatttccgaaagatatggggacttcaggacatttatagcgccaaggagcgcgtgaaccatgtccaccattgcatagacgccatcgtcgtagcctgtatcggactggacgaatatggcaaactggccgagtactatcacgatgaggaaaagcatgagtggtacggtgcgtccaaagccacttttgccaagccctggccgacattcgtcgaggacgtgaggcggatgcaaaacgaactgctcgtttatcaccacactcccgacaacatggccaagcagggccgtcgcagaatcatcatcaatgggaaaaaggtcctggcaaagggagacgccgtgcgtggctcactccacaaggagacttactatggcgcaatagagcgcgaaggtgaggtcaaatatgtgaaacgtgtagagctgtcacaactggaagaaaagaacatcaagtatatcgtggatgacaccgtgaggcaaatcgtccaagaagccgtcgatcgcttgggcttcacagaagccatggcttccaccatttggatgaacgaggagaagcagatacccatcaaaaaggtacgctgctatacgccccaagtcacccaaccacttcatatccgctaccagcgggatgtctctgacaaagagcacaagcgcaaatatcatgtggtaaatgacaaaaactatctcctcgccatctatataggggctgacaagaaaggaaaagagaaacgagactttgagttggtcaacaacctccaggcggccaaatactaccggacgagcaacgataggacgggctctggcgatccgatagtccccgtcaagagtagccatgactatccgttggcctatacattgaagatcggcacgatggtcttgctttacgagaactcacctgccgagctttacgaagcctctcaagcagaactgaacaggcgcctgtataaggtgacagggctctcttccaagaacgttagtggctacaagtatggggaaattgcaatgaaataccacacggaagcccgacaaagcaagaacctgaaaagcaagaacggcgtctatcaaactggtgaggagctgcgtcctgtcattagaatgcttcacacccagataaaagcggcggtacaaggcgttcacttccgtatcaacgagttaggtgagatcaaatggcttgcgcggtatgattaagcagaccctcttcttctccacaccagtgtcgctttccttaaagaactaccaaatggtcatttcctggaaagacagagcagacaaggtgacgcgccccatagaggacatgggatgcgtcgtgttggaaaaccaacaaattagcgtcaccttgccgctcttaaacgaactggtgaaaaacaacgtggccgtcgtcctgtgcgacaacaagcagatgccgacggccatgcttcaatgtttggacggaaatacgacacaagcggaaagcctcaaatatcaactggccgtcggagaagcaacaaagaaacaggcttggaagcaaatcatcgaggctaaaatcaagaatcaggcagttgtacttcgccattgcggaaaacggagcgagctactaacaccatattataaaaacgtgaagagtggcgacacggacaaccgcgagggtcttgcggccaaacagtattggacagaactgttcggtggatgcttcaggcgggatcgggaaggaggttcccccaacgacttgctcaattatggctacgctattttgcgagcggcaaccacccgtgcgttgataggctcaggactgctacctaacttgggtatcttccacaaaagcagatacaacgcctttccattggccgacgacgtgatggaaccctatcgtccttatgtggacgaaattgtctattcgctttacgaaggtggagtttacgagctcaacaaagagtccaaatccgccatactccgcttgttgacgtgcgacgtggacatgggaaaagtcacgcgtcccctacaaattgccttgactttcaccactgcttctttggccaaactgtatgctggagaaatcaaaaagctaactcttcctatcatgacatgaccgaataccgtctcaatgcctaccatataatgtggatgtttgtatttttcgacttacccgtcacaacaaaaaaagagagaaaagccgctgcgctctttcgtaagaacttggagaaagatggattctccatgatgcagttttctgtctatatccgccattgcgcgtcgcgagagagccttgcggttcaccttaagcgtgtcaggtccttgcttcccgcgactggcaaagtctccatcttgtccgtaactgacaaacaatttggagacatctacaacttttgggggaaaccaaaaaacgccaatcaaagtaaaatccacaataaagtcatcagtgagcctatccaattagaatttttttaataaatttgcagtaggaatcgtcctgcacggccatttcttataagctcaaaacgaagtatcttactgattaccagcagatttgtagctataggttgtggtttgatgtaggaacaagatgataaacaactgtgcctttagattgcgcttagcatttccgttgtggtttgatgtaggaacaagatgataaacaacttgggcctttaaattacgctttgaattgccgttgtggtttgatgtaggaacaagatgataaacaactccatcaacattgatttggattggcacattgttgtggtttgatgtaggaacaagatgataaacaacgcacgaagaagaaatgtacatactgtttgagttgtggtttgatgtaggaacaagatgataaacaacaactcaggtacaaaaaagtcctcaggcaacgttgtggtttgatgtaggaacaagatgataaacaactgggcctttagattgcgttttgcatttccgttgtggtttgatgtaggaacaagatgataaacaacgtatagtcagtaactttataaatgtcctgggttgtggtttgatgtaggaacaagatgataaacaacctcattaacggaatagcgagtgccatctatgttgtggtttgatgtaggaacaagatgataaacaacgtcctcgtatctgtccctgtgcccacgcaagttgtggtttgatgtaggaacaagatgataaacaactaaaagccatagcgggagaagtacccataagttgtggtttgatgtaggaacaagatgataaacaacaatagtttaacccgtgcccgcttcttgtggttgtggtttgatgtaggaacaagatgataaacaacgcttacgctgggatttatcccaacctacagttgtggtttgatgtaggaacaagatgataaacaaccattcctaacacacagaaggaatcggcgagttgtggtttgatgtaggaacaagatgataaacaacaaaacccctcaaaaagatttggaagggcaagttgtggtttgatgtaggaacaagatgataaacaacaattgctggtgctatcgcaaaggcgcagggttgtggtttgatgtaggaacaagatgataaacaacccaaggatggcaagggattgggaagcgatggttgtggtttgatgtaggaacaagatgataaacaactaccaagaccaccgaggacccaaggtaatagttgtggtttgatgtaggaacaagatgataaacaaccatcctccataaagttagtagcagcgggaagttgtggtttgatgtaggaacaagatgataaacaacgtgaacaaatcctcatcctcgagacctctgttgtggtttgatgtaggaacaagatgataaacaacctaattgggtatcagtatatttttatttggttgtggtttgatgtaggaacaagatgataaacaaccttgtcccctcatgtgctgggagtttgctagttgtggtttgatgtaggaacaagatgataaacaacggattgacccaataagacaggggcagagagttgtggtttgatgtaggaacaagatgataaacaaccttatcgttcttgtaaggaatcgtattcagttgtggtttgatgtaggaacaagatgataaacaacgtaggcgacttccgcggcgatggtgtggatgttgtggtttgatgtaggaacaagatgataaacaactaccatcccgttctcataaggaatcggcgagttgtggtttgatgtaggaacaagatgataaacaacaaaatctgtgagtatttcaacatagcgggagttgtggtttgatgtaggaacaagatgataaacaacaggccgaatttacacacgaagaaatttcaggttgtggtttgatgtaggaacaagatgataaacaactgggccttaagattgcgtttagaattgccgttgtggtttgatgtaggaacaagatgataaacaactgccattctgctaatatcttcgtcggaacgttgtggtttgatgtaggaacaagatgataaacaacagtatgttttgccgcttgatgtgcctccttgttgtggtttgatgtaggaacaagatgataaacaaccggaccatcagtaccgaaataagcagcacgttgtggtttgatgtaggaacaagatgataaacaactggtcgttctgttggcagcgcatcgtataggttgtggtttgatgtaggaacaagatgataaacaacggagggcctcacggcagtccccagaaatggttgtggtttgatgtaggaacaagatgataaacaaccatcgtcaaaatgaaagagaagtgcgcatgttgtggtttgatgtaggaacaagatgataaacaactcacgagaaaggacgggaacactaacaacgttgtggtttgatgtaggaacaagatgataaacaacagctgataatcgtcactctgaccgagcttagttgtggtttgatgtaggaacaagatgataaacaacgacattcaaagcaagggcactacgctcaacgttgtggtttgatgtaggaacaagatgataaacaacggtcttttaggccgatgtcgaatctttaaggttgtggtttgatgtaggaacaagatgataaacaacaaacaaaataggaattgcaaaaccaggcgtgttgtggtttgatgtaggaacaagatgataaacaactgagcctgcgaagcggaggaaatagcctgagttgtggtttgatgtaggaacaagatgataaacaacggaaagtattatcaaggccaccaccaagggttgtggtttgatgtaggaacaagatgataaacaacccaacagatgatggaaacattcgctggtagttgtggtttgatgtaggaacaagatgataaacaactattagaagattacaccatcggaggacatgttgtggtttgatgtaggaacaagatgataaacaacaacacgaccacgataaacggaaggtccgtgttgtggtttgatgtaggaacaagatgataaacaacttaaatgatcaatcgggcaatatctcccggttgtggtttgatgtaggaacaagatgataaacaaccaacttgcccgcaaggtcatcttcatgccagttgtggtttgatgtaggaacaagatgataaacaacaaccaaaaatcaataggtaagtcttgggaagttgtggtttgatgtaggaacaagatgataaacaaccggaagacggatggaaaagacaactcaccagttgtggtttgatgtaggaacaagatgataaacaacaaaatttccgcaaactcgttggggtagcgagttgtggtttgatgtaggaacaagatgataaacaacattatggaaatcaagtttaagaaaatccggttgtggtttgatgtaggaacaagatgataaacaactacggctatcgccgtgtgaggttgacgagtgttgtggtttgatgtaggaacaagatgataaacaaccagtagcacggcaagagttcaccagcggagttgtggtttgatgtaggaacaagatgataaacaactcatcttggtatatttttttctaatatttagttgtggtttgatgtaggaacaagatgataaacaacaagattacaggaggtttacaatgaagagtagttgtggtttgatgtaggaacaagatgataaacaaccgataccctgcgtagtccaaccgtactttgttgtggtttgatgtaggaacaagatgataaacaacaggagagtaccttcaatgtctatgacaaacgcatcgatcgcgccaactcggaactgtaaaagctcatcatcggacagacgatgaccatcgaggacggcagcagcctctcacaatcagaaacacacctcgaggtattcgagaacctggttgaaagcgactgcaccatgctgcgcgacatcgtgaacaaccagcttatcccgcgcatggtaaagcacggcttccctatcaagggaatgcgcttcaaatgggatgatgctgtcgattacacaccagagcagcaggtggcatacgagaccatggttgccgaccgctacgaagtggacccgtcctactttgcagagaaatacattatgcctgtaggcgaacgacgcaatgcacagcccatgttaccgacaggaggggataataacgatgagggagacgatggcaacagcgagccacaagacgagaagaagaaacagcagcaaaacgcacacagttcttttttcgattgagccccagcaaatcatcgtgcaaggcgaatgcagaagaatcaaattcttatgctgagccgaagccgatgtcccatcttactaaagatgattacctggggctgcaccaacgctacgcccgactgttaggcgatgatccacaaaccttgtcgctgtcgaaagagcaggagtaggtacgcaagcagctctctgaactgttcgacggcatgatgcacacgctctattcccagaaaggttcggagttccgcatcgaggtgttggcagagccgaaggttcaggagtttatcaacgcccatgccggcgctttggattcctctttcaagcaagtggagatgtctgatgtcatgcgcaagcgcctccagcggtctgactatatcttctctggcatgaaaacgttccacgaactcaacgaggcgttcccgtccttgctggattctaacggcaacagaaagacgttcgaagcctttttgaatgatgttcgtaagatcgacaagacctacaactccaactatctccgtgcggagtacaacttcgtacaatcgtctgcggagatggcggccaagtgggaacggttctcggaggacggcgaccgctacaacctccagtaccgcacggcaaacgatagcaaggtgcgtccggagcatgctgcgcttaatggcgtgacgcttccgccgtcagacccgttttaggaggaatactatccacccaacggatggaactgccgttgcaccgtagtgcaggttcgcaagtctaaataccctgccacaccacatgaggaggcgatggcgctgggcgaagaagctcttcaacgtgacacaaagggcatcttccatttcaatccaggaaaggaagacaagaccgtacccgactacaacccctataccatccggcgatgccgtgactgcgacatcgcaaagggaaagttgaaactggcattcgcaccagacaatgaagtatgtgctgcgtgcaagttgctgcataaatgtgtcggggacaaggaaaagtctgaacgtgccattgagcgcacccactatctacatgaaatggaaccactgttgaaaaaatcagaaactctcaagacagagaataaggaaattaaggtcggtttcactaaagaaggaaacaagcatctcttcagtgacacatacgggcggtcatcggttctcacaaaagagaatttggcttcgcttgagaaagcactacagaatgcgacatttatagagtctgccggcctgacacacccaagaaaagacgacatagaccgcttcttttattacgaggcaaatataagaggacacaaagtaaaactgaacgtggcaagaaaagtaaaaagagggagaatggcaaaatacaagtatatcacttcctgtattcaataaatgacatataaacaaaaaagcatatcaggcggcggttaggactcaattgccaggttacccttccttcaatgctttgctgcaaaggtaataacaaattttcaaaacacatcaagttatggaagaaaaaaaacatgatgataaaaaagagaacaatctcaatgccgcagtagagcacatactgcgcttgccgatagaagtaaaatcccaatgcacaacaaccacgggaagattctggcaagccatgaagcgattggtgaggaaacctgtcccacaacatccaaagagtcttcttgatattgccgtaagcaattcgagagtgctctcaactttagtttgtactgcaaaaagcaatacaacacacccgcaaggacagtcagtaacagaaataacacactcgctactgtcaagcagcgaagaagaatactcccttgtgacatatcgccaaaaacagcgattatgcctattaaagttgcggctatgcctgactgatggcgtattaacgattcatgctgaagctccactttctctttggcttcaaacagctcttgaacaaagccattccagccttctgtatcatatagtactgtcatcttttttagatgcaaaggtataacgtttcattcaaaactttcaacgatgaacaaaattttctcatttctaaagaaaagcaaccgctacaagcatctaatcggcggtttgctggtcggtctgtgtgcattgtcgccatgggcagccatctattctgccatcgtcgcagcctcatgcctcgaactcaaagacaagctccacggctgtcaatgggactggatagactggggctgcacagtgctcggaggcatcattgcgatgtcgctttggctcattgtgtagcgcccgggcattttttacaccgaaaatgagtaactttgcagcctggtagagtttcccataggccgcgtggtctatcgcgggtacaacaatgcgaacgcgaatggcggtgtctcgtttgcgaatgcgaacaacgatgcctcgaatgcgaacacgaatgtcggctcgcgcctggaaatctagctaatcggcgtacaacgatggggacgtgtccccgatgcagtgccgagggaaacgagccacagcaaaagcacctcgacgaggtggaaagctgaaacatcaagtgtcgggcaatggagtttggtaggtcggcaacgattcgaagaagtctggcccgggaaaggaaggcccttatcttccatacagaaaagaccatgcacagagaaggctatatcatgcaagaggtgacgtcctacggcaatatgtcggaggcgtttgtaacgatataagttttttacgaaatccatccactttttcaaaaaatagtcttatatttgcatattggaataaaaacatagagaaacgatgaacagaatagaccttcgtaaagcaatgttggacgacaataatttccgtatgaaaaagatggtcattttccttatgttgctctgcatacagatttctgcttctgtatgtcacgcacaggtgaacgattggaagaattatctttcaaaggcatgggtcagaaacattgttgtagatggcgacaaactttatctgggaacggatggcggtctggctatttacgacaaaaacactggtcgatgccaattccttgatagaacaaatggattggcagacaacaatatcgttggactggctcaccacaatggcaagtggtggataggtggccaatacacaggcatgagcatttatgatgaaaactcatttcagaattggcagttcccttttgcacttcaaagctgtttcgcctttgatgatgcattagataaggtgtatattggagcaatacacgatatctatatcttgaaagataattactatacggtttacactcccgaccccaaagcagacatacattcctatcctgctatccattctcttgttcttgataaaaacggtacactgtggtttggtggctttacgtttggtttcctttcctccaatggaaataccacgcttctaaactgtggcgcaagtgaagttaacaatataataatcgacgataaagacaacaaatggttggcaactaacagagggttaatcaagtatgacggcacatctttcacttcgtacaacaattcaggcggacaactgtcaagtaacaatgttcaaggattagctttcgacacgaatcgtaatttatggatgggaaattggaacgtacttgtcaaatatgacggaaaacaattctcctcttacccgcttccttcaaactacagcaacgactggatatgcgacattgcacccgatggtaacgatgtatgggtagcaacacgatttcatggattgctcagattctatgacggcacgtttgaacagacagaactggagaagaatatattgacgcagaacctaatgcacgaggtttccacagtcgacgagaaaggcaacgtgtgctttgcatccaatgattatcttgcccaatacacagagaaaggggaatggaaacacctgtttcctaatgcgaaggactattaccctgctattaacgcagctgcatacgataagcgaggacgtttgtgggttgcacccaataatagcgataccatactggctgttatagaaaatgccgatacaactgttttcaaacgagataacacgccatttcaaacagggcagttaaaacaactggaattcgatagcaaaaaccatttatgggttggagcatcaaatggcttatataaatacgacggcgtacaatggtctcaatacaactcttcaaattcgccaatgccaggcgacatgataacatccctcgcttttgataagagcgacaggctatgggttggaatcgcggaccttggagtgtgctcttttgatgggcataattgggtgtgtcatgatacgataaattcccctattccatataattatgttgactgtatcgctgttgattcgcataacagagtatggatgaatagtagatatagtaggaatggaatgcctgtaatgggtaaagattatggtggtggattggtttgctacgatggcacgaattggaaaatctataaccaatataactccaacataggcggcaactgcatcgtggatattgcaatagacaagcatgatgccctatggatggcagtatctgatataggtcttgtacg

SEQ ID NO: 4175 - DNA, 23717 bp, synthetic construct
  misc_feature 1..23717: note = Synthetic
  source 1..23717: mol_type = other DNA
ccgcagtcgttctatcaggaggtagtaggcggtcctatcaacggcacatttgttatggcgatgaacgatccccgtcgtccttattacaagacctatgaggtagagtacgaccgtcacacctacgacggccacaactggaaatacatcaatctgccgatggacgatatcgagcagatggcgattgcctcattgaaggacggacgcaaactatatagttcctacgatgtgggtaagttcttagatcgcaagcgtggctatgccgatacggagaacttcgattatgaatcgctcttcggtacgacctttggtatggataaggctcagcgcatctcgactttcgacagcggttccacccatgctatgaccctgactgccgttgacctcgatggtaagggcaaagccacgaagtggaaggtggagaactcctggggtgcctcgtggggtcagcagggctatctgatcatgaccgaccgttggttccgtgagtatatgttccgtcttgtggtcgacaagaaatatgtacctgagaagatcctccaggccgctgaggcagagcctgtcatggtcatgcctgaggatcctctcttcctgcccgacgagtgataagccactccaaatcggagtgaccttcattagatgctcaattcatcgagcacggtaatcaggcgtttgtcgaagcgcttgtcggtgcggatgcactcggtgaagggcacatagacgatatcgttgttgcgatagccgatcatgacattgcgctggccctgtatgatggcttcgacggcaccgacaccggtgcagctggccaggatgcggtcgcgggctgaagggcttcctccgcgctgcagatggccgaggatggacacacgcacgtcgaactcgggaaactcgtgcttcacacggtcgtgggactctcggagacgatgacgatgcacgacttcttggactttcggatgccacgttccatgaactgtgccaactggtcgacatcggtcgcctcctcagggacgatagcagcctcggcaccacaggcgatagcgcagttctgtgccaggaaaccggcatcgcggcccatcacctcgacgaagaagatgcgctcgtgggaattggcggtgtcgcggatacggtcgacgcattccatgatggtgttcatcgtggtgtcgtagccgatggtggcgtcggtaccgtagaggtcgttgtcgatggtgccgggcagaccgatgacggggaagtcgaactccatgccgaagttccaggcacctgtcagcgagccgttgccgccgatgaccacgagggcgtcgatctcctccttctggcaggtctcgtaggcaatctggcgcccttcaggagtcatgaactccttgctgcgggctgttttgaggatggtgccgccccgggtgatgatgccgctgacatcctcggtggtaaactccttcacctcatcattgatgagtccgtcgtagccacgatagatacctttgattttaaaaccgttgtaaatacctgcacgtgtcacggcacggatggctgcattcatgccaggggaatcgccgcctgacgtcagaataccaattgtcttaattttactcatagttcttatatttaatgtttgtgatttaatgtatgcaaattagaactcatatccgagattgatgaagaaatagcctttcttggtatggttactatagcccaaggttgcaccgacaggaccaaagatcgtattgtaatagtaagcgatctggccacctatgagggtgtgatggtcaaagatttccttcaacttttctgcctgttggccaccggccacacgcagtagtacgtaattgtttttgcctattcgctgttgcgcctgaagttgggcggccacgaattgacggtttacatactccatgttgccgatgccagcgaatggcatctgctgctcgatgtagtgaccgaaccattcgccgccgatggtgttgctgaatccgacaggaacgactgaaccaaagagcaggcgaccatagagcataggctggatggtaaaacggctgccgatggtaaacgatatacgccagtcggcgctgacatcactcatacccatagtcttaccctgtttgttgccgttgtcatcaaggatgttaagtttggcgaagtcgttggtgagataagcgtattcagcgttgaagcgggcaccacgtgtggggaagtaccagttgttctcactgctaaaggccaaacgggcatggtaactgatgaaatattcattttcgagtgttcccagtttaaccgattccgatccgagtgtgttgcggtagtggaagaagtcccagcgcagccccatctgcaagttgaaatggcgcaggtcgaaattgatgggcaggaattctgcctgcaactggttgtaacggatgttataatccagattgccataagtatagatgtctacatcttttctgcggaacgtataactaaatgtcgggcgtgtaaaggatcgggggtgaatggttatctcgccacgggccatcagacgcttacccagtcgtagcgtgatgtcggtctcgataggaatggccgtcttcagcggaatatcgagccctaattgcacagcggcagattcttccgtatcgtagcgtacaccagcatgtagttgtaccgacttgcggttgcctgctgagaggatgacacgcacaccgttgccctcaggcaccagtcggcactcggctgtctgatagaagagatccatacgcatacttgtcgtcagttcctgctctagtttggcatcgatactgtcaatcttgttcagatggaacttctggcgcaggaaccgctctgtctgaggcgtcatgttttcgaatataaaaccggtgacacgctggcgctctgtcatggcgttcgggctcaggggatgatagatggtaggacggaatgagtcgtctataccgatgcgctgcttcagggcgataatctcgtcccagtggcgcatggcctcttcctcaccatagcgtattagggagtcgatggcctcagacgtaaaactggcagtggaatagccgtgaggatccacattcatccacaggtcgctgattgccttgttctcgtcgtatttgttcacacagttcacgtcgataatctggccgactattttcatggtgcccgtgatgtcctctgccgtcttcggcttgccattcagtgtgacgccgatgacaatatctgcacccatctcacgggccacatcaacaggataattattcttcaagccgccatcgaccagtaccatgttgccgattcttacaggcgagaaagcggcagggatagacatggaggcacgtatggcctgtggcaaccggccgctatgaaacacgacttcgctgttgtccatgatgtttgttgctacgcaagcgaaaggaatcttcaggtcgtttgtaaagtcgagcgagtcggtgtagcccacaaagagtttctggaacaattctgccaggttcttgcctttgatgagaccgccggcattcaggtcgcgcttgccgatggtcaggctcgtggtaaacaaataggtgctctccttcttgcggtcgaggagactctgattacgcaggtcttccttgtcagtaatgacgtaggtccagtcctgtgcccttaccattgagtcgagtgaatgggaattatagccgatagcatagagtccaccgacgatgctgcctattgacgtgccggtaacgatgtcgatggggatacccgccttttccagcactttcagcacaccgatgtgcgccataccctttgcgccgccgccactgagtacgacgccaactcttttcctttttaccgtcgtgctgtctgtctgagcatttgctgcaccaatcatgagcacagcaacaatcagcaaaaataacttctttcccctttgaggcttataatcccgtatttccatgcggtttgttttttattcttttcggttgcaaaattagacaaaattattctattttcattgtttgatatctctttttatatgctccatagcgtaaaaatttcttaaaaagaaggaaatcagtaataaatggatggtttttgttggaggaatggggaaaagtgactatctttgcatcaaactaacaatatagacaaatgaagattagaacttttatgagtatcgcagtcgcatcagccgtgatgatgcaagtttcgtcctgtaaggaggcacagcgtgagaatcctttgttgcaagagagtacattacctttcggggcgcccgatttcagtaagatcgacagcaccgactatatgcccgccttcgagacggccatccaacagacgcgtgacgagatcaagcagattgtcgacaaccccgattctgccaccttcgagaacaccatcctcgcctatgaggagagtggaaagacgctcgatcgtgtgagccgcgtgttcttcgccctcgtcgaggccgacaagacgccagccctcgcagagatcgagaagaaggtgcagcccatgctcaccgacctcgaaaatgagatctccttcaacaagcccctcttcgagcgcatcaagaaggtctacgatgcccagtatgagtcgcttcagggtgaggacaagaaactgctcgaggagacctacaaggagtttgtccgcaagggagcccttctgcccgatgacaagatggctcgcatgaaggaaatcaacctgcgcatctccgagttgcagaccaagtggggcgaggtgctccccgatgccaccaacgatgccgtcgtctgggtcgataagaaggaagacctggcaggcatgagcgaggccgacattgcccaatgtgcgaaagatgctgagagtcgtggcggcaaggccccgtatgccatcgtcatcgtcaacaccacgcagcaggcgcccttggccagcctcgataaccgcgaactgcgcaagaaggtctatgagtcatctatccatcgtgccgacggaacaggtaaatacaataccttccccctcgtggtggagatcgccaaactccgtgccgagaaggccgagatcatgggttatcctaactacgctgcctattcattggagaatacaatggccaagacctcagtgaatgtccgtactttcctgatgaacctgattaaggcctatgtgcccaaggctgatgccgagaccaaggccattgaggactttgcccgcaaaactcagggtcccgaattccagttgcaggcctacgactatttctactattccgcctacggcctcaccttcaaggagcgtacggacattcccacctaccatcctgacatgaaagccttcgaggtgattgacaaggacggtaagaccaaggccctcttctataccgactactaccgtcgtcccacgaagcgtggtggtgcctggatggacggttttcagaagcagagccgtcagcgcggcacgatgccaattatctttaatgtgtgcaacaacgcgaaagcccccgagggcaagccctcgttgatcacctgggacgaggtcaccaccatgttccatgagttcggacacgccctgcacggtatcctttccgattgtcagtacaaccgtctgagcggtaccagcgtagcccgcgacttcgtcgagatgccctcgcagtttaatgagtcgtttgcctccatccccgagatcttcgatcactatgctcgtcattacgagaccggtgagcccatgcctgccgacctgaaggagcgcatgcttaagagtatcaacttccagccgtgctacgccctgggtgagaacctcgctgccacctgtgtcgacctcgcctggcacatgctcgcctcgaaggatattcccacagccgacaaggctatggatttcgagacagagtcgttgcgtaaggtgggacttctgaatccttttattccgattccgccacgctatcataccagttacttcaatcacgtgtggggtgggggctatgccgccggctattacagttatctgtggacggaggtgctggctgtgaacatcgctgatgtcttcgccaagcgtggtgctctgaaaccagagacgggtcaggagttccgtgacaagatcctgagtcggggtaatactggcgacctcatgcagatgtttaccgacttcacaggtatggctcagcctgatgcttccagcctgctcaaagccagaggtctgtgaaaccggcactgatcttccaacagtatatctggctcatcaatgccttccgccgtcatgggcggatgacgcttgatgaacttaatgagcggtgggtgagagaggaggtggcagaaggcaaccccctctcgcgctccaccttcaaccgccatcgtgacgctatcctcgatatgtttggtgtcatcatcgactgcgacgtgaagggcggttatcagtatttcattgccaatcgggaggtgctcgatgatgacagtcttgaacgctggatgctctccaccatgaccgtgggcggtgtgctctccgacagtatctcgctcaaagacaggattatcttggagaatgtgccagcaggcgaagagttcttgcagaccatcatccgtgccattaagtctggcaagaagatcctgatgacctatcagcgttttggggcagagagttatgagaaggtggtggagccttatgccctcaaactcttccatcagcgttggtatatgctctcctttacggggcgccactatgccatctattctctagatcgtatgcaggctgtctgtctcaccgacgaggactttaagatgccgaaggacttttcgcctcaggactatttcgcagagtatttcggagtgctgacccttgagatcccgatggctcacgttgttgtccgtacctatgggaagacatccaactatttccgtacgttgcccctccaccagtcgcagcgcactgttgccgtcacagccgcctatacggacttctccttcgacatccgccctacggcagacttccttggagaactgctttcttatgactcaggtctcgaagtgcttgagcctcaggaactccgtcaacagatgcagcggcaggttgaggctatgctccagcggtataacccatcattgaagtaaaagatatgcaagacaataaagaagaacgtttcccgatagttgatgaggagggtcgcgtcgtcggctctgccacgaggggcgagtgccatagcggttcaaagttgctgcatcctgtggttcatctccatgtgttcaattcgcgaggtgaggtctatttgcagaagcgtcccgagtggaaggatatccagccgggcaagtgggacaccagcgtgggaggccatatcgactatggcgagacgcctgagcaggcattagtaagagaagtacgcgaggaactcggtatcacggattttgtaccggaacgggtagggcagtatgtctttgaaagtcttcgagaacgggagttcgtctatgtccaccgtaccctctacgacgggcctgtgcatccttctaccgaagaactcgatggtggtcgcttctggacgcttgatgagatccgctctgccattggcgagaacattctcacgccaaatttcgagagtgagttccagaaattctttctgtaagcccattagcattctttaacgaaaaaacttcaagggtgtaccgacatatggtacacctttgctgttactttgcagccgtaaacaattatgtcgaactaaaaaagtttaagattatggctggattatttctgatttttgtaatggtgattgccctcggcagtctggcagatggttatgtggaagtactgaatcatgttgatgagactcattgaccgcagcctctcagccctcttccgagtggccgactacgttaccagcaagtgcccgattttctccattaagcgccctactggtaacgaccttcctccccgtaccatccgcttctcatcagatgatgtggtgatggattgaaatatattagtgctataatttggtagattgcgaaaaagtccttatctttgcacaaacttaaatgtaattattcccaaacaatggaaggaacatatttagaagaacaaggctgtttgatggcatgtgaatcatcaccatggggtggccgatggactgaagagaagttggatgcgtttgagaaatatgtcaatgcatatctaactattatgaactcttatcgggaaaagtgtaattggaaattgatttattttgacggatttgccggtagtggctcacgaaatgagacaaagaaagaaaagaattcagatctattgcaagagttgttcaaggacttatctttagatgaagaggaactcgaaacctacaaaggggcagcagaaagagtattaagcatctctcagagaggatttgattattattactttgtagataaggacaaagaatcgagtttgaagttacatgagttgttggctccatttgagaatgataaaactttggtatatagaaattctgatgctaacaagcaagtcgagatgcttgcccaagcaatgcataatgacaaatgtcttactgccttagttttgttagatccatttggaatgcaagttgattggaggtccattgaactcttgaggggtacgcgtacagacttatggatattgattccaacaggtgtgatcgtcaataggctgcttgatcgaaaatgcgaattgacacatattgagaagttgtcctccttttttggaaaagacgaggaattcttgaaagagtttttttacaagaaaaaaaaggttgacaccttgtttggtgagacagagattgttgagaaagtaaagaaacccattgagaagattgcagaattgtatattgatcaactgaaaacgatattcgattatgtcacggaaaagcctcttgtgctatacaatactcggaatacacccatattccatttcgcctgtgcatcaaacaatgctactgcgataagtatcgcaagtcagattatcaaaaagaagcaagggttatgagaacaacgaagattgaatggacagataaaacgtggaatcctattacaggttgcacaaaaaaatcatctggctgtgctcattgctatgcagaggtgatggctcgaagattgaaagccatgggactggagaaatatcagaacggttttggcctgaccttgcacgaggatgacttggaagaacccctccaatggaagaaaccacataatatttttgtctgttctatgagtgatatctttcacgaagatgtaccttttgagttcgttgacaagattatgcatacaatcgtgatttcaccccaacatagataccagatacttactaaacgtgctgagcggatgagcgagtatttttctacaaggcagattcctcgtaatgtctggttaggcgtgacggttgagtgtgaagcaactaagaaacgcattgactacctcaggaaattgaatgccagcatcaagttcctatcttgtgaaccgttgattgaggatttgggcgacatggatcttaatggtattgattgggttatcgttggaggtgagagtgggccgaaggctcggcctatgcggttagaatgggttgtaaacatcaaacgtcaagttgagttgcaaggcgcagcctttttcttcaaacagtggggaacctggggtagcgatggcataaagagaaacaaacatgccaacggcaaactccttttaggggaagtcattcagcaaatgccggaaaaaatggctgtatgagattatgacaacaatcagattgtaaaacgagtcatggggtcggagaaaatggtcactttacctccgacccattgacgcttggtgttccatcaatttggcggtcagcgaccgccaaattacaaaagtctggaagtctggaagatggaattatgcagacggcgaaaacttgttgtgaagaacgcccggataatatatctgaggagacatttagagaattgaaggaagaagaggattccgcagattaaaaccacaaagagggaacacagagtatctgacacttagagtgagtacgcataaaacgaaaaactcccaccgaagcgggagtataggttttacccttcggccattatggccttattgtgataagatgtaggaatcttacgaatgcaaaaatagtaaaaatctttgttatttcaaaatttatttgtaattttaccgcaaattttaataaatattactatatggagcgaattttaggtattgatacgggtacaaatagccttggatgggctatcgtagataagaatgaaagtgtatatcatctggtagcaaaaggcactaacatattctcagaaggtgtcaaaattgaaaagggaatagaatcttccaaggccgcagaacgtacagaccaccgatctgtacgtaagcattattggcgaagaaaaatacgcaaaataagactgttgaccattttatctgaacacgacctctgtccaccacttaaaaaagaacaacttaggcaatggcgattaaagaaggtatatccgacagaagatacatttatggaatggcaacgaacagaggataaggccaatgtgaatccttacagatttagatatatctgtttgactcaaaaactcgatctttctgacttgacacagcgttttattctgggacgagccttatatcacctgaatcagcgtcgtggttttttaagtaacagaaaagaatcaacaaaggagtcggaaggtgctgtaaaagaaggtatcagcagtctgtcggaggatattaaggctgcaggttgtaagtatttgggagaatacttctatcaactatatcagaaaggagagaagataagaaaccactatactgcccgtaaagagcactatttgaaagagtttcaagcgatatgtgaaaagcagggatttgactcagaattagtgtcgaaactagaaaaggccatcttcgaccagcgtccattaaagtcacaaaaaggccaagtaggaacatgtacctttgaaaagggcaagtcgcgatgcccttcctctcatccgctatatgaggatttcagaatgtatggttttataaacaatatcaagatacaggcgaatacactgtatgataaagacgaaagatatttgacagatgatgagaagcagaagattattcctctcttcaaacgcaagtcaaagcgtacattcccatttgaggatattgccaagaaattggctggcaaaaacaattatagttactacaaaagcggtgaggacaagccatatctattcaactaccaaatggatactcaggtttctggaagccctgtaaatgcacagttggaagaaatctttggcgaagactggttgactagtgtctgtgaagtttatacacttgcaaaggataagacccgctttcagattatgaacgacatctggcatgcgctattcttctatgacgatgaagacaaattgaaggattttggcagaaaacgattacaattagacgatgttcaggctgagatgttcagaaagattagcatccccaacgattatgcagcattgagtttgaaggccatacgaaagatattgccatatatgcgtaactatgggcttatctattctgaagcagtactccttgctaatttggttgaggtgttaccacagcatatttggggaattaaggaaatgcgtaaggctgccattgagaatgtaattggggtgatgcattcatacgacaagaataatatggatggcttgacattggaagcgtgcgtcaaggctttcttaaaagacagatatcaggtgaacgatgatgatttgaagaaactgtatcatccctcaatgatggaactatatccccgtcagcgtccgaatgatgatggtgtttatcaattgggatcacctcgtattagtagtgtcagaaatccaatggcgatgcattccttgttcagactccgcaaggttgtgaatctgatgctgaaagaaggttacattaccccagacaccaagattcatatcgagttctctcgggatctgaatgatgccaataaacgttgggctattcaagtctggcagcgtgaaaacgagaaagacagagagcgttgccgaaaggagatcgagaaatatatagtctcaccatccgataccgatattctgaaataccagttgtgggaggaacagaaccataagtgtttatatacaggcgaggaaatacgaattacagacttcttaggtgataatcccaaatacgatatcgagcatacgataccacgtagtgcaggaggcgatagtacgaagatgaatctgacgctttgtagtaacaggtataaccgtgatgtaaagaagaccaaactgcctacccaattagcagtacaaaatgaaattatggagcgtattcagggatggaaagagaagtatgaagaccttgataagcagatacgtaaaatcagtacaaagggtgcttcttcgaaagaagagaaagacaacaagattcgtcgccgtcatctgttatcgtttcaacgtgattattggcgaggcaagtaccaacgttttacaatgactgaggtgcctgaaggtttctctcgtcgccagggtacagatatcagtgtcatatcacgttatgcacgaatgtatcttaaatctgtattcaaacaggtatatattgtaaaaggtatagccacctctgatttcagaaaaatatggggcattcaggaagagtatactaagaaagagcgtgtaaaccatgttcaccactgcattgatgctatcaccatcgcttgtattggcaaagcggagtatgataaattggcccaatactatcatgagtcagatgaatataaacagggcaaaggtaagaaacctgtttttgaaaaaccttggccctcgtttgttagcgacatcaagcagatacaggatgaattgctgattgcccattattctaaggatattttgccgaaacaggctaagcgctatgttcgagacagtaagggcaataaggttttgacacaaggcgatacggctcgtgcctccttacacaatgatacctattatggagccattaatcgggatggcgaggttcggtatgtggttaggaagaaccttgatgggctagacgaaaaagatataaagaatatcgttgataacgaagtgcgctctaaagtggaaaatgccatcctgctgcatggctctttgaagaaggctatggaagaaaccatttggatgaacgaagagaagcggatacccataaagaaagtgcgagttttttcaggatctgttactcggccaatcaatattcgtcagcaacgcgacaaatccagacatgagtataaacgacaataccatgtccagaatgatcgaaactatatgatggccatttatgtggggcaagacaagaaaggaaaagaaaagcgggaatttgaattagttaataatattaccgcagcaaatttctatcgtcgtagcaatgatcgtgtgcctactgataatcaacttgtaccattattcagtaagagtggttatgaactcagatacaaactgaaaattggtacgatggtattactatatgaaaatagcccagaggaaatatgggaattggatagaaagcatatgcagaagaggctctataaagtgactggaatgtcatcaatggttattcaagggaaattcgaatatggtacaatagaactggttcaccaccaaaatgcaagaccaagttctgatattaagaaaatcaacggagagtacaaatcaggagaagagtttcgtcctggtatcaagatgcttcattctcaatttagagcactagttcaagatgttgattttgtaataaatgatataggtgaagtaaagagacagatatgataaaacagacattgatgtttacatcccccgtatccctatctttgaaaaaccagcaaatggtcatcatattcaaagataacaatgatatagttacgcggcctattgaggatataggttttgtggtcattgagaatccgatggtcagcatctctattccgttgttgaatgaactggcagataacaatgtttctgttgtgttctgtgacaagaaaaagatgcccaaaacgatgcttatgacccttgatggtaatacgacacagcaggaaagttataagtttcagattgatgcttcggccccaaccaaaaagaatgtttggaagcaattgatagaaagtaaaataaggaatcaagctttattactaaataaagtgggaaagaatggtgatgtacttaagccttactatatgaatgtaaaatcaggggatacgggtaatcgagaaggtgctgcagcacgagaatattggagtaggttattcgatgatggtttcaaacgtgagcgcgaaggggagtcgcctaataatctattaaattacggatatactattcttcgggctgctgtgactcgtgccctgataggctctggtctatatcctgcatttggagttttccatcgcagtcgatataatgcatttccgcttgcagatgatgtaatggaaccatatcgtcctttcgttgatgaaatagtataccacctttactacgacggagcagtaaaagaactggataatcaatcaagggggacaatacttagattgttattctcagatgtaaaaataggtaaagtgacaagaccacttgaaaatgctttgtcgataacgactgcctcactactcaaaatatataagggtgaaacggataaattatcattaccggtgctaacatgagtgagaataggttaaatgcttaccatattatgtggctctttgttttcttcgacctgcctgttattacaaagaaagaacgtaaggttgcagcgacttttagaaagaatttgatgaaagatggtttcgtgatgttgcagttctccgtttacatccgccattgtgcatcaaaggaaagtcaagcggttcatattaagagggtaaaatccatagttccagagactggcatggtgagtatgttaagcgtcacagacaaacaatacggcgatatcgtaaacttttggggaaaagaaaagaagaaaaaagtaccaacagatccgttacaattggagtttttttagtatttttgcaacgatttaccacattacaagccacttcatgggcaagagatttcatctaaatgcttaatatatagccaaataattaacctaggttgtggtttgatgtaggaacaggatgatatacaaccctgacggtctctaacatcatcaatcttggttgtggtttgatgtaggaacaggatgatatacaacgcatttgccaactctgctgactggatatcgttgtggtttgatgtaggaacaggatgatatacaacagttgggaagcctgatgtgacttgactcagttgtggtttgatgtaggaacaggatgatatacaaccaccgtctcggacttctgaccaagccttaggttgtggtttgatgtaggaacaggatgatatacaaccttctgataagatttaagttgagcacttgggttgtggtttgatgtaggaacaggatgatatacaacccagtaccccaagaaagacgcattggcaccgttgtggtttgatgtaggaacaggatgatatacaactagtaagtaacgccaatctttccagtatcagttgtggtttgatgtaggaacaggatgatatacaaccctgcttgattgacgggaaaaccttgatacgttgtggtttgatgtaggaacaggatgatatacaacatacgagataccttagaagactcttcaacagttgtggtttgatgtaggaacaggatgatatacaacccagtaccccaagaaagacgcataggaaccgttgtggtttgatgtaggaacaggatgatatacaaccctttgtttttttaagtttcacggggcaagttgtggtttgatgtaggaacaggatgatatacaacgagaccgacgcaaagaccggcgagcaaagagttgtggtttgatgtaggaacaggatgatatacaaccttgtagggttcttccacactaatgagcagttgtggtttgatgtaggaacaggatgatatacaacggctctgcaatggcatccatcgaagacccgttgtggtttgatgtaggaacaggatgatatacaaccagaccagtcttttcatcaaccgagaaaagttgtggtttgatgtaggaacaggatgatatacaacgacaagccccgtggcggagatctcggtctagttgtggtttgatgtaggaacaggatgatatacaaccgttagtagacaaattatactgggaactagttgtggtttgatgtaggaacaggatgatatacaacatagataggatgcttgaagatgatgaagcagttgtctctgggggcggaataatatgccccggatccgagggataattttccgaggtcggaattatttgccctagattcaaggcatatttctctggggtctggatttcttcacccagatctgaggcatgttttcccgaggtcggaataattcctcccgtttttggggctgatttttaaaagattaaaatgacttgtctcaaatctaagacagaacatccaagagtttgaaaacctagtcccaaatccatgaaaatccatcccagaacttcaaaaacctgcctgaaaaccgggggacatttatgcaccccgtgcataaacgtgccccagatttagggctaataattccgacttgaggatgtcttgtccagagatttaggaatccttcaagggagcgtttttgagttgttctagggcgcggcagagttggtcagggcatgaggtacccttcgtgccacagcggataccgtcgagtttcttgatgacatcgtcgatgtgctggccacgcaccaactggctgacaccttgtaggttgccgttgcagccaccgaggaaaaacacttgctggatgatgttgttctcgtcggcagtcacgtcgatcagtttcgagcaggtgccgtgggtctcgtattggatatgcttcgtcttcattttcctgtgagtcattaaagggttttacaattatacttattctggttgcaaaattacgaaataaaaggcaaccagccaaacgaatggtcaaaaaaagatggagtagtttgtgtatgtgcgggaaaatgtttacctttgcaccaacaaaatgcgtatggaaaagaaagagaaatacatattgttggaagagcagatacggagcctgatagagggcgagacggacagcgtggcagtgatggccaatgtgtgtgcggccattcacgagacgatgggattcttctggacgggattctatcgtgtgcaaggtgatgaactggtgttgggaccttttcagggtcctgtcgcctgtatgcatatcccatttgggaaaggggtctgcggcactgcctggcagcgcaaggagaccatcgtcgtacctgacgtagaacagttccctgggcatatcgcctgtagcagcctctcaaggtcggagattgtggtgcctgtcttttcacaggctggcgaggtggtagccgtgctcgatatcgacagcaaggaactggctacttttgacgagacagaccgctattatcttgagaccatctgtcgactgatcagatgatgaaagaagagactttctgcggtctcttctttactttctgacgatgacgcttccgctggcttggtgcgtggcaaggatgagcacctctgctatttgcacatgctctggtgcattggcggcatagacagccacgtcggcgatgtcgtcacccgttagaggcttgatgccctgataaagtttggccgcacgttctgtatctccatgaaagcggatattgctgaaattcgtctccaccagtccgggcttgagattggtgacacgtactgccgtattggccacatcgatgcgaagtccgtcgctaagagcctttacagcagcctttgtggcacaatagacattgcctccggcataggcagcatcaccggctacactacctatattaataatgtgtccgctgttgcgagcaatcatctgaggcacgacaagacgggtcatcgtcaacagtcctttgatgttcgtgtcaatcatcgtctcccagtcgtcgaggtcgccctcatattctggttccagtccgagggccagaccggcattgttgataagaacgtcaatttgctgccattcggctggaaggccatcgagggccttcttagatgcctcgcggtctctcacatcaaaggcgaggacaagcacctgagtgcctttcgcctccagttcctgacggatggtttccaacttctcaacgtttctgccattgaggatgattctgtcgccattagcggcgaacttgcgggcgcagccgagccctatgccactcgtcgcaccagtgataaaaatcgtctttttcttcatatcggctacaaagatacaattttttagccatgatatttgcggattaaaaagattttaattaattttgcatcagaataacaaagtatctttatgtcaaaggaagaatttcagaagtatcaggagaaatatgctgcccagttggaaaccatcaggcagtcggcccatgacttgcatcagagtgtgaaccagacctatggcgacgacctgccatacggattccatctcgatatggtggtggaaggcatttctggtttcggtcatctggtatgtgcctgcgaggaggatgtgctgccgctgttcttcggaggctattatcacgatagcatcgaggatgcacgggtgacgtacaatgatgtgatgaatatcgcacggcagtggctgacggaggaacaggcgctgatggcgacggagatcgtctatgccctgaccaacgacaaggggcgcacgcgtgccgagcgggcaggggagaagtattatcaaggtatacgcgagacgctctatgctccctttgtgaaactctgcgaccgtctggccaacgtgacttatacctgttcggtggacagcggcaagaaaggccatcggatgcgtgaggtgtataagcatgagatggctcatttcctgccttctatcaatccgcacagtgatgatcctcggatgcaggtcccctttgaggtcgtcacagcattggcagaaatactgatagacgaggtggatcgtgacgaaatgcgccgtcagtggtgcggatattaaaaaagtaagcaaaatcgcaaaatttcttgcaaattatttgtttgtttcgcaaaaatgatgtacttttgcagccgataagacaaaaacgaacagaatatgtcaatgttgaacgcttatttttacggttattacttttactttgcagggaactgtgaagcggaaggccgtaagtaaaattaaagaattgaaaattgaagaattgaaataaggtcccgcttcacaacagagtgaaagcgggattttttaataaattgtaaatcgtcaaattgtaattacatagatgaagaggattgccatacaaggactgattgggtcgttccacgacattgcggcgcacctgtatttcgagggagaacagatacaactcatctgctgttccaccttcgaacaggtgttccagagtatcaagcaggatcctactgccatcggtatgctggccatagagaacacgattgcgggttcgctgttgcataactatgagttgctgcgcgactctggtaccacggtggtgggtgagcataagttgcacatctcgcactgcatctgttgtctgcctgaggacgactggagcactatcacggaagtacactcgcatcctgtggccctgatgcagtgccgccagtttctggcccagcacccgcaattgaagaatgtggaggctgaggacacggcaggctcggcaaaaatgattgccgaagagggtaggcgaggctgggctgccatctgtcacgcagaggctgcacgactctatggattgaaggtgcttgaagaccatatcgaggacaacaagcacaacttcacccgtttcctcgtggtgtcgaatcccaataaggcggatatgcttcgtccgctgttggaaaccaacaagtcgagcattgtattctccctgcctcacgaggagggctcactgagtcatgtactcgcaatcctttccttttataagatcaacctgacgaagatccagtcgttgccgattatcggacgggagtgggaatacctgttctatgtcgacgtgatgtacgacgacctgacccgttaccgccagagcattgacgcgattatcccattgaccagggacttaaagattttaggagaatataaggatggcaaacagaccaattaaaccagcagagagattaagtttagtacaggagtactatttcagtaggaagttgaaggaagtggctcagatgaatgctgagggcaaggatatcatcagcctcgccattggcagtcccgatatgccgccgtcaccacagaccatcgagaaactctgtgaggtggcccatcaaccgaatgcccacggctatcagcccacgatgggtacgcctgagttgcgtgaggccatggccggcttctacaagcgctggtacgatgtggatcttgaccccaagacggagatcctgccactgataggctcgaaggaaggtatcctgcacgtgacgctcgccttcgtgaatcctggcgacgaggtgctggtgccgaatccgggctatcctacctatacttcgctgagtaagatcttgggcgccaagatcgtgaactacaatctgcgtgaggataacggttggcagccagacttcgaggaactggagaagatggatctctcgaaggtgaaactgatgtggacaaattatcctaatatgccgacgggcggtcgtgcccagcgtgagacttacgagcgtctggtgcagtttgccaaagcgcacaatattgtggttgtcaacgacaatccttattcattcatcctcagcgaggaacacctgagcattcttcaagtgcctggtgcgagggactgctgtatcgagttcaactcgatgtcgaagagtcacaatatgcccggttggcgtgtaggcctgtgtgcaacgaatgctgagtttattacgtggatactgaaagtgcagtcgaacattgagagtggtactttccgtggcatccaactggctgccgctgaggcgtatcagaatgatgaggcttggcacagggagtataatatcaatacctatcagcgtcgtcgtgagtgggcagagaagattatggatgtcttaggatgtacctacgacaagaatcaggtgggtatgttcttatggggaaagattcccgctgacatccagaacgtggaagacctgacggagcgtgtactgcatgaggctcgtgtcttcatcaccccaggcttcatcttcggctctaacggagagcggtatatccgcatctccctctgtgcgaaggaagagaaaatacagcaagcattagaaagaatcaaaaaagcaatataattatggaactggaattagccccattgaatttaccgagtgacaatgaacgtcccttcgtgattgcaggcccttgctctgccgagacggaggaacaagtgatgaccacagcccgtgaactggcaatgaagggttgccataacttccgtgccggtgtgtggaagccccgtacgaagccaggtggctttgagggacacggtgaacccgcccttgtgtggctctcgcaagtgaagaaagagaccaagatgaacgtggcctgtgaggtggctacgccagaacacgtggaactggccttgaagtatgatgtcgatatcctctggattggtgcccgtacatcggccaatccctttgccatgcaggctattgccgatgcgttgcaaggggtagatgtacctgtgttcgtgaagaatcccgtcaaccctgacctcgaactctggataggtgccttggagcgcatcaaccaggctggggtgaagcgtctgggagccatccaccgtggtttctcttcgtatgagcagaaaatctaccgcaacgccccgatgtggcagattcccattgagttgcgccgcaggattcctgacctgccgctcatcagtgatccgagtcatatcggaggtcgtcgtgaactggtggctccactctgtcagcaggccatggaccttggcttcgacggtctgatcattgagagccattgtgatcctgacaaggcgtggagtgatgccaagcaacaggtgacgcctgatgtgctcgactatatcctctccctgctcgtgatccgtgatgagcacaccacgacagaaggcatcagtcaactacgtaagcagattgacgaactcgacaatcagattatggatattctggctaagcgcatgaaggtctgtcgcgagatcggtcagtacaagaaggaacacaatatgacggtgttgcaggccaaccgctacaatgagattctgaacaagcgtggtgcgcagggagccctctgtggtatggctcctgagttcgtggctcacgtctttgagaatatccacgaggaaagtgtcagacaacaaatcgaaatcattaataagtaatttctttcataaaagaggagtattatgaagattcttgtgatgggtgcaggtaagatgggaagtttcttcatcgacctgctgagttttgagcacgaggtggcagtctttgagagagaccccaagcggatgcggttcacttacaactgtcagcgctttacctcctacgaggaaatcaaggagtttaagccggaactgctcatcaacgctgtgacgctgaaatataccattcctgtgtttaaggaggtgattccctatctccccaaagagtgtattatcagcgatatcgcctctgtgaagactgatttgaaagatttttatgaggcttcgggaatgcgctatgtcagtacccacccgatgttcggtcctacgtttgccaacctgcagcaactctctgaggagaatgccatcatcatcagcgagggcgactatatgggacgtatcttcttcaaggatctctatcagaagttgggactcaatatctacgagtattccttcgaggagcacgacaagacggtggcttactcactgtcaatcccgttcgtgtcaacattcgtgtttgctgccgtgatgaagcatcaggatgcaccgggtactaccttcaagcgccacatgcggattgccaaaggcgtgctgaatgaggatgactatctgttgcaggaaatcctcttcaacccctatacccacgatcaggtgagtcagattcgtacggagttgaaagaacttctggaaatcatcgacaacaaggatgctgagggtatgaagggctatctcacaaagatccgcaacaatgtgaagcgagacatagagataaagaaatagtccttgagtctgttcaaatacgcaaaataatcggttcatttcttggtcgttccgattattttgcgtatttttgcagcatcaaaccaattaaatagtaaaattatgggtattatcatttcacttcttttaggttgtttggctggcttctgcgctggtgtgctgggtctccttggcggtgccctcggcggctggctgttcgacctgctcggcatttcttggggtggcctcctcggacaactcgccacagccatcatcggtgcggctctcatcctctggatagcctccttcttcaagaagtaaatggttgatttagagaaatgtaccctggctgtgtgcgagattgcacggcgggctggggcgtatattaggggagaacgggagaagttctcccttgaaagcgtggagcgaaaacacgcccacgactatgtgtcgtatgtcgacaaggggtcggagcggctgattgtcagtgcgttaagagaactgttaccagaggcgggatttatcaccgaagagggaacgacagaagtgaaaagtgaaggagtgaaaagtgaaaagtc

SEQ ID NO: 4176 - DNA, 23681 bp, synthetic construct
  misc_feature 1..23681: note = Synthetic
  source 1..23681: mol_type = other DNA
ctgccgaaccggcaactatctcatcaaagccgtcaccgtcgacatctgccgactggagtgtgtggtagccttgtccatacattccctttccgcttgttgtggaagagtgacgccataactcatggagttcctttccgtcaaagtatgcagccatatagtatgcctggctgtaatagccatgattcatcactgcacacggagtagccttgccgttgacgttaagtcgcgccatggctgcattataacgctctatgcgtgctgcactgccataagcggctgaattgttctcgaagtcgtcatgggcaggccagtagtggatgctgcttattgcaccgccggttgtgccgtcgaatacagtgagatactccggtccgctctccacacgcccattagctgcaacgtaatttgcataagggtcatcattgcccataagcacgaaattgccttcgccgtctatggttccgggagcggtgcgtacaatcatctcgccatagccgtcaccgtcaaagtcatagcagaggaatgttattgtgtgctgtgacgcccacatgttccgtccaagattgatgcgccaaaggtgtgtgccgtcaagttttacgcagtcaaagaatacagcacccgttgagccggtatttgcgccatcgcggacattggaaggttcccagcgtatgacaatctcctgctcgccgtcgccgtccatatcataacatgaagcatcattcggagtgtatgtagctccggtaccgttggtgtctgtaggagcctgtggcaaggcgaaagcggtgttctgcgcatcccatgcagaagtttcctgcgtctcaagcacagcgccgtcggcactgcatacttctatgcgatagttcgttccggcagttttgccacgatcatagtagttcgtctttagtttcaaggtctgtatcagttcgccctcacgatagagtttgtacagagtggagcctgggatgtctgtggcacgcatacgccagctgacaagattgccatcgttaaggtggacagccagcaagccacggttgagcggttttgcctcgccacggttgccgatgtgactgaccatgaggcgtacagctgatgagtagacagtgctgccattctcctttatggtaacagtggcaacattgtttgcatagtcgacattggcagtatagccttccgtcggtatggcattgaagtctgtagggacttctgtcagttttgttctgaaaaggctctcgacaccattgccagaatcctttattacagggtacaggtcaatggtttctccgttggaacggcaagtgaatgcggacaggtagtgtgacatgttgtataccggctcatccacgatgccttctatttccacactgcctattgcaatctgcttggtgttggcgattcccattatgtatatgttcacagtgtaggatgaaccttcaactatcacaccgttgatgttgtattcatgggtgctgaatccggtagagttgcctgacatgattttgttgcgcaaaggagtgattccttgtgcaaatgttgttgcaggagcagaacctgtctgtgtggttatgcttattgtgcctttgtccgttccgcagcgtgctgcatcgaaggacaagcgagtaggtttgaatgtatgcccttcagcaatgtttatgctgaaagagccacaatagccgttggtgatgtttttcacctctgtggcaggttggaatttcgtcatgggacggtcgtatgtcaccgccgtataaccggcatcggctcctgagactgtcaataattccgtggcggtcagtttttcgccaatcttgcaggcagtcgtcaactgggcaactgcagtttcatcgcctgtaaggcttgcagttgtcaggttctccaaatcatttaaactccacaacgcggtcgctttctgcgcccacatggttgttgccgttgcaagtaagagtacaaatagtaattttcttagcatgtttgttagtgttttaattggtgtttttgttaatcaggtcaagtcattccatgaagtcgtttggctatgtaggaagccgtctttttgtgaggtcatttccatttcgggtacaaatttacgaatttattttgacataaatagctatatgcaagcgatttttcatttctcattcatataataataaggtgaattaataaacttttgcgaaataattttggtggtactttgggtattttgtaattttgcatatagattgttgtgatttatcatttatccgctttgaatggcatggtgtacactctctttggtgaaagatatagggttttcccatgtacagttaggggatttccattctggcgttacagtggaaatgagtacctttgcaccaagtgacagaaatggacaagccaacagataaatatatttacaacacttattgctgcttatgggcggcatagtattaaaaatgacaattaaaaacgtagaacaacaatgaaaaagattctaagcatcatcgcagcattagtatgcgtacttacagtaagtgcacagtcagtcaaccagtcagacaatagccaaaaggctaaaactacctcatgtgtagggaaacagtgcacacagtctgacaaatgtacagctaagtgtggcacagccaaatgtgagaagcagtgtgacaagtctgcaggctgcaagtccaagtgtgagaaaaaatgtggcaatccgtcagagtgcaagaagcagtgtgacaagcagtgcaccaagtctgaagattgcaagaagcagtgcattcgcaacaatgccaaataatcggcaatgtgctttgtcactgatgtgaacaagtgattatcttgacaataatatattcaacattacttttttgatgaaaattctgttgcttggctcaggagaactgggtaaggagttcgttattgctgcaaagcgcaagggcgtgtatgttgtggcatgtgacaaatatgacaatgcaccggctatgcaggttgccgacgagcgtgaggttttctccatgcttgacggtgacaaacttgcggaggtggttgctaagcataagccggacatcattgtcccggagatagaggcgatacgcacagaacgccttttcgattttgagaagcagggcatacaggttgtaccgtcagcgcgtgccgtgaactataccatgaaccgccaggctattcgtgacctcgctgcaaaggaattcgggctgcgtacggcaaagtatttctatgccaagaccttcgaggaacttgagacagccagccgtgagataggtttcccatgcgtaatcaagcctctgatgtcatcttccggacatggtcagtccactgtaaaatgtgcagaggaactgcgtccggcgtttgatgctgccatggcaggcgcacgtggtgatttgcaggaggtaatcattgaggagtttattcatttcacatcagagtttacattgctcacggtcacacagaaaaacggtcctactcttttctgtcctccgataggccatgttcagaaaggcggtgactaccgtgagtcatggcagccttacatgatttccgataaggaccttaaggatgctcaggacatggcggcaaaggtcactgcggcactcacgggtgcaggcatctggggcgtggagttcttccttaccgagacaggcgttgtcttctcagagctttccccgcgtccgcatgacacaggtatggtgaccctcggtcatactacaaacctttcagagtttgagctgcatctgcgcgctgtcctcggtctgcctatccatagcatcaagctggaacatgcaggagcgtcagccgtagtgcttgctgacaaggattatgagggcgtgcctgaatacaatcttgccgatgtgctctcagaagagaacgcacgcatccgcatcttcggcaagcctgaagctcacaagggacgccgtatgggcgttgtgctgacttatggcgatgtcgagaacggcactgactgcctgcgcgacaaggctaagcgtcttgccgaaacagtattgaaatagaatttccaaggttatgggttgtaggttttgggttataggttcatttttattaagcaaaatgaagggctgcaacccaaaacctgcaacccaaaacctgcaacccaaaaccaaagaatgcaaacattatatcccaaactcatcactgatgcccttgccacagtgaactatgccggaacgaaaaagaacctcatcgaaagcgagatgcttgtcgatgatgtcagcatcgatggcatgaaggtatcgttcacactgcttttcccaaaagagacagaccctttcctcaaatccacactgaaggctgccgaggcggcaatacactattacgtgggcaaggaagtggaggtcacgataaagacagagttcaagacaaagccgcgtccgaaagaggacaagtacctcacagacctgaaaataattgccgtaagttccggaaaggggggtgtcggcaagtctacggtgtcggcaaacatcgctgttgccatggcgcgccttggttatagggtggggcttcttgacacagacatcttcggaccttccatgccaaagatgttcggatgcgaagatgcacgcccttatgcgatagagaaggacggcagacagcttattgaacctatcgaaaaattcggtgtgaaactcctttccattggcttcttcgtatcgcctgagacagcaactctgtggcgtggcggcatggcttgctctgcattgaagcagcttatctgcgactccgattggtcggacatcgattaccttatccttgacactcctcccggaacgagcgacattcacctgtcattgctccagatactgaacatcacgggagcggtaatcgtctccactccgcagcaagttgcgcttgccgatgcacgcaaaggcatagacatgtaccagaacgacaaggtcaatgtgccaattctcggtcttgtggagaacatggcatactttactccggcggaacttccggagaacaagtactacatctttggcaaggacggctgcaagaatcttgccgagcagcttaaccttccgctcctggcacaaatacctatcgtgcagagcgtttgcgagaatggcgacaacggtactcctgctgcaatggatgtcgcgtcaccgacagggcaggcattcctcgcccttgcacagggaattgtttccaaggtgcgcttattgtagtaaagctttgcgtccgattgtttccgtaatgggctgtaaaataagtatggcaagtatgtcaaagaactctgtaaaccaacattcttgatgtttttggtttcggttgcaaaggtacaacattccgcaagcgattccaaatgttataggggtatatatgggggtatctcttgtaaaatggaatagttgtatagagcatattatataatataaggtgtaaatagttttgtgcgctcttatatataatcaacataatcttctgaatccgtgttatgatttaacgtgagttcgacggactcacgttaaattattagtgctgcatagagccatccgcatgcgaactcagaagattaatcgtttctcaaagcatgaattgcaaaggattatgcctgtttgccggacaccaatgcttttgcaaccggtttgcaaaatattttatgtaattttgcacccgaaatcaaggaaaggcgtataactatgcgctgtccttttacacttttgcaaacaataaatcacatagaaatgattatgattaaagatgttctctccgactacgtgctttcgttctggcatctgctgtgcgaaatggcaccttacctccttctgggattcttcattgcgggactgcttcaggcatttgtcccacggaatatgttttcacgccaccttgcctccaatgactggaaatcagtggttaaggctgcactcttgggcatacctctcccattatgttcatgcggagtcatacctaccactgccgcccttcgccgcgaaggggcgtccaaaggtgctgcaacatcattcctcatcgctaccccacagacaggagtggacagcattatggcgacatactccgtgcttggaccggcgtttgccgtcatccgcccgttggcagcactcgtcacatcattctttggcggcatacttgtcaacagacttgacggtaaggaggaatggaaagacgatgaagagacagtggaagaggggtgcaaggacggctgctgccatagtcatgagcatgcagaagacgcttcttttgctgcacgcatgaagtctgccctcaactatggatttgtggagatgttgcaggatgtgggcaaatggcttttcatcggtctgcttatcgccgctttaatcaccgttgctgtgcctgcgcagttctttgaactcttctcaggaaacacactcctgagtatggttcttgtgctgctggctgccattcccatgtacctctgtgccactggcagcataccaattgccgtgtcgctgatgctcaaaggtctctctccgggcactgcccttgtcatgcttatggcaggaccggcaagcaatgccgcatcaatccttgtcgtgcgcaagattatgggtcgcaagacgctcatgatataccttggctccattatcttcggttcggttctctgtggtctggcgatggactatcttatgccgcgcgagtggtttgcgctgtcaccggcaggtgtcatggcaaatagctgttgtgaggatggcggacctgggtttatagagatagcttccggcattgttcttgttgcgcttatggtcaatgcttttgtcattcgccgcagtcatcatggtagtgagcatgaggtggcagccacagacatgcctgactatacgataaaggttgatggcatgacctgttcccactgccgcgccgctgtcgcaggtgctgtgcagtccgttgcaggagtggagcgtgcggatgtctgcctgaactgtggtgaggtcaaggtgtggggcacctgctctgcggagtctgtgatgaaggctattgactctgccggctttgactgccgtttgctgtaagattttagcgttttgacaatcactctccttacaaaaagaacatctgctttttgtaaggagagtgatttgtttttatgtgtgagatttttcctgattgctgagatgttacttagcttgtgaaagtgagcgtggtacatccacacacacgcatccacatgcacaagttgtcaacaggctttataggcacgcattgctgaatcctgggataccatgaggacacagtggccaggtcacggtcattagcgagtcatggactatcattgcgcagagtttgttacactaaaaaaataatgaactgcagagtgttgaagatgtttgccgtacaccaacaattcttttatggcaatgatatgccaaccccgattgcaagattgttgtcagaagaatttcggagtatgttcctttcgtattctgctttgatgacaatctgttcgagtggcagatagttgatgcctatcttcgcgctatgacaattctctttatgattggagaagtcataccgtacaaaggcaaaaagacggctgtttgcttttggcagaccatggaacaggtcatagccggcttcagctccgcagtggacggcatttgcccgctgggaatatgtggcaacggcacgtgcaatgacggcatcagatgagaatctcaggttgctgctcacaatgaattttccgtcataatatccgcttgcgtcaatacttagattgtcggcaggactgttctcgattcgcattgccaatgccaaggagtcgtttgccagcagtatttgcgcttcatagttgcacattttatggcttccaaggaacgatatgccggtgaggttgcagttctctggcaggatatccgtttcgcccaatggcagggatacggagaagtggtccatgggattgtcaagaagatttgagatgccgacagggacagtcatcttgccgaaacgcactgctgcccattctgtgaaggtcttctgtgcgaacaattgtgtgatgtcagccgcatctgcatactccacttctccaaatgcgctccagccatatttccaaatatactccgcgcctgcgagaacatgcggactgacggcattataaccttcggatgtcttcatgactcctgtttcgccgtaaccttcgatggtaaatgaactgtttcttgctttgctgctgtcttcgtcttttgctgccgccatgacggatatggcagacagcgcaattacgcagataattgctcttttcatgctatgttttttgagttttttgaattttttgtgcaaaattacaatgattctttgtgtacggcaatacttaaaagtaggtaatatttttacggtagattgtcggtgttgttgaagaaagattatatagtatgtgcttttgttaaagggcaggataatgagcgggagtgtcgctttttcacatgagggaaaggctgcactcatgtttatgtaccgaaattgtaattagaaaactcaatgctttttcccctccgtagaattgcataaaaacaagactgtaggaacaaacatagaaatttgcgaaatttcagaattcttgcagtctgctggtattcaacggcttatgtaaaataaggcgtcttttctcaatcagcgggactgcaaagtgttaccattcgtgtgacaaaaggttatctctgacaggacgaaaggtcatgaaaagggatgtaatatgtggctttttctgatgagaaatgccgtttttcacaggaaaaagagtgggaaacggctgatatagatgtcaagtcaggcgtttccttaatattatgataaacagaacatttgaaaacttgatgttttccgctggcagggaaatgtaccgtttggcaatatttttttgtgccggacgaactgcataaggatatgacaaccggatgatttgtggatgatgtgttttgccgcaccacttatgaagcacccgtatgaaaattgtaccgatgttcgattgtatgggtaatggaaaatatataaataagactttggtcatgataaaaatgttaatgattttttatttgacattttttcttgattatactgaatttgatataagaaacccgttggcggaattaaattagcgcatatttaactcttccaattggtttgttaattaatgtattgtaggattgtgagtgcgctggctttcccgataattcgcgtaaacagtccttctgtgtcttttgcataattccttgtaatccaaaattggccggacaactgtgagaataacgtttcaatccttttccttgcttctgcaaaaaagaggagcggtcggtttcctgtccttccggtttctcctatgatgagcctccggctttattttggcagtagtaagcaggtccaattgtacttgtcttatgtatcctctgtcgcctgtgacagtacagctgttatgaccaccccttgcatctttgatgtaatgaatatcatgtacacttgcctttgtcaggtcagaagaatggactactccgcttaacccacagagggcgtgcagttcatatccgtaattattgcctgcgggatacaaggttcgggattttcctgcgatactcctttaacttggaaaagagcaaaggctcgctgtcaataccgacagcttcggaacacatattcaaggcaactgcttccatatcggaaaattttgtaacaacacctctacggggtaagctttctgattcattgattgaatttcctgcaatttgtttgtatatgtccaataacgatttcgatggttaggataagtgtttttgaaattgtagtatacaggggtaaagaagaatggaataaactggctttaaatttgtaattgtgattatttctcgttatctttgtacagaaatataaaaaaaaactcccaccgaagcgggagtataggttttcaaccttcggtctgatgaccttattgtgataagatgtaagaaatcttatattgcaaaggtacggctttaaaatgactaataatcacaaatgataggctattaacataaatttaacgaatatacagatgaaagaacgaattttaggtcttgatacaggaacaaacagcgtaggctgggctgtggttgattataatccggaagcaccgaccgacaagtatacattagttgatgcaggagttaatatctttcaggagggtgtgaagatagaaaagggtacaatagaatattcacgtgctgctgaacgaacagggtacaggcgtcagcgtataggatattggaggcgcaaagtcaggaaaatcaagttgctgaagattttgataaagcatggattatgtcctttcgtttctgacgatgctcttaaaaattggcgcacgaaaaaagaatatccattgtctgatgagtttgttgattggcaacggacagatgaggcgatgaacaagaatccttattattaccgcaatctatgtctctcggagaaattagatatggatgatgtggggaacaggtacattgtcgggcgtgccatttatcacataaaccagcgtagaggtttccttagcaatagaaaagaggaggccaaggaaagtgacggtaaagttgcaaaatcgattagtgacattaatgatgagatggaaactggagggtatgaataccttggacagtatttttactctctttatcagagaggagaacgtatccgtgcaaaatacacagacaggctggagcactatgagaaagaattgcttgctatttgtgagaaacaaggcttgggagaagaactggcaaaggttttacgcaaaacaattattacgcaacgacctttgaaatctcagaaacatactgttgggcgctgtgtttttgaacctaacaagactcgttgcccaatatcacatccgatgtatgagcagtacagaatgtatgcgtttgttaacaatatcaagatacagactccgatagacagtggaagcaggcaccttacccgagaggaaaaagatttgataattccgctcttcttaaggaaatcaaagaaagatttcggctttgatgaaattgcaaagaaattgtctgggacaaagaataacttttgctattataaagacaaaagcgagcaaccttaccgtttcaattaccacatggacactcgcgtgagtggttgccctgttattgctcagttgtcagatgtctttgagtgcaaggcaagcgatgactcatggttggaagctgcctgtgaggtttatgtaatgggtggaggcaaaactcgcttccagataatgaatgatatttggcatgcattgtttttctttgaagacaaagagcatttgttctcgtttgcaaaggaaaaattgcaattggatgatgaacatgcgaaaatgttcagcaatatcaaggtaccatctgattatgcttcattgtctcttgcggcaattaggaaaatattgccatacatgaagcactatggtttgatttattctcatgcagtgttccttgcaaacatgtacaaggttgtgccatgtgcaattgacaaggaggctttgcttccaatgctgccgaaagaggatgcggaggatattgttgaggcatttgaagaatatgattcgcaaaagtcagaaattcgtactcgtgaggaatatgtaaaacgatatgttgcatgcaagtatcaattggatgaagagcaggaaagaaggttgaaggttctttatcatccttcccaaatagacttgttccctaaagtgcgcaagccaaccgaagatggttatttccagcttggctcgccacgtacaagcagtgtacgcaatcctatggctatgcattcattgtttaggatgcgtcatgtgataaatacattgttgaaagagggaaagataaatgaatttacatctgtcagaatagaactcgccagggaacttaatgactccaataggcgtgctgccataagacagtggcagaatgacaatgaaaagaaaaacgtagaaaatgcaaagcatataaaagagcattttggtgagtcgtatgtgccaacaagtgtggatttgctgaaatataaattgtgggaagagcagaatcatctttgtttgtacacgggagagacgatacgccttggggatttgtttgataagaacaaatacgacatagaacatactattccacgtagtgttggtggtgattcaacagcaacgaatcttaccgtgtgccaaagccgttttaaccgtgaggtgaagaagacttgtctcccaagtgaattggagaactatgaggcgattcttgaacgtgtggaacattggaatgaaaaatacgaacaagtggacaaacaattacgaaagctgaatacacgaggtgtagcagacaaagaattgaaagaccgcattattcagaaaaggcacaggctggctttggagcgtgactattggcaaggaaagtactcgcgttttattatgaaagaggtccctgaaggattctcacgccgtcaaggtgccgatgccggtttgatttcaaagtatgcccggctttatttgaaatcattgttccgcaatgtgtcaatagtcaagggccttgcaacgtctgacttccgtaaaatctgggggcttcaggataagaatgaacagaaacggcgtgagaatcattgccatcatgctattgacgctgtgaccattgcttgtataggcagagcagagtatgaccaacttgctcaatattatcatgacgaggagcgacatagatggggaatgaacagctgcaatgggatgttcccaaagccttggcaaacattcacagaagatgtaaagtcgcttgctgatagaattctcgtcagtcattatacggcagataatatgtctaagcggacaaagaagcatataagaaagaatgggaaggttatgccgcagtttatgcaaggtgacactgcacgcggaccgttgcatttggatacattctatggcgcgatagaacgtgatggcgaaatcaaatatgttgtccgtaagtcattggaccaagtgcttccaaaggatgaagagaagttcataaacaagatagttgatgaaaaggtaaaggaaaaggtgaaatctgcaaaagacgagtatggaagtctgaaaaaggcagttgccgcaggtatttggatgaaccgtgataaagggataaagataaacaaggtaaggatatattgtgaagacgtgaaacatcccatcgaaatacgtatacatagggacatctcacgtaagaaatataaacagtatgtcaatgtaaagaatgaagttaattatatgatggcaatctatgttggcaaggataaacgagggaaagagaaacgctcttttgaacttgttaacaactatgacgctgtggcttatcataatagtgatttgaaggtacaggggataagattatttcaagaatacaaggatggttatcctctgaaatggcaactgaaaacaggttctatggtattgctgtatgaagaaactccggaggaaatctatgaattacctaagtctgctttgaccaatcgtttatatagggtggcaggaatgtcgtctatgattgtgtctggatgtcattacggtacgattgcacttgttcatcaccaagaggcacgcccatcttcagaagtgaaattgaaaaatggagcttatagatgtactgaagattttcgtgcaggtatcaaattgtatcatactcaatttaaagccttagtccaaaatcaggattttactatcaatgaaattggagaaattaaattcctacatagatgataaagcaaactcttatgttctccactccggttttgctatccttgaaactcaaccagctggttattcgtttcagggatagcgaagacgaagtcacgcgcccgatagaagacattggcgtagtgattgtggaaaatcaaatggttcaaatcacagtgccactgctgaatgctttggcaggtaataatgtatctgttgtattttgtgattctaaagcgatgccaaacactatgcttatgccacttgttgcaaacagtacgcaacaagagagttaccgttgccaaatggaagcctctctccctacaaaaaagcggatttggaaagaaattgttgagtggaagataaggaatcaggcagcattattgaataaacttggcaagaacggcagttgcctgcgccagtattacgagaatgtgttgtcgggtgacagtgacaatagggaaggcgctgctgccaaagtgtactggcaacgtatgtttggtaaaggctttgtacgtcgtagagaaggcatgccgcccaatgcgctcttgaattatggatattccatcttacgtgccgccgtggcaagagctttgctgggttctggtcttcttcctgcttttggtttgtttcatagaaatcgttacaatgcatttccattggctgatgatgtaatggaggtgtatcgtccatacgtggatgagatagtgtattctgtatatatggaatgcccggatataggaatcacaaaggaggtgaaacaacgactgttggaggtgttgtttgcagatgtgcgtatgaacaagcagacaaagcctttagaggttgctttgtcgtttacaacagcctcacttgtcagggcgttgaaagataatagacaacacattgtttgcccgaaaatgctatgactgtaaatcgtctaaatgcttatcatattatgtggctatttgtcctgttcgatttgccggtaacaacgaaaaaagagcgtaaattggcttctgatttcaggaagaatctgattaaggatggctttgtaatgatgcagttctctgtgtacatacgccattgtgcttcttatgaaagtcttactgtgcacaagaagagggtgaaatcgctcatgcctcattctggaaaggttagtatgatagcggttactgataaacaatatggtgatatggagactgtttttggaaaatctgcgaaaaaagaagtgaaagcaccagtgcaattggaatttttttagtatctttgcagtgcaaatacatcaaagatgtccacttcttatacgaatagcccttttgaatacgctgatatataggtgtttgatgaatataagttgtggtttgatgtaagaatagaaagatatacaactgcctgaacatgatgaagaacatattgcaggttgtggtttgatgtaagaatagaaagatatacaacaggtgtacgaaacgtacaggggtttactagttgtggtttgatgtaagaatagaaagatatacaacatatctttgcgcatttggggccgcatgtagttgtggtttgatgtaagaatagaaagatatacaacgatattgcagattataatgagtttgcgaagttgtggtttgatgtaagaatagaaagatatacaacgccacacgcaagcggatgctcgctcagttggttgtggtttgatgtaagaatagaaagatatacaacaagttcagtagaaggaacctcaatggtaacgttgtggtttgatgtaagaatagaaagatatacaacagaggaggggggggagaacactgtattagttgtggtttgatgtaagaatagaaagatatacaacaatagaatctatcaccaagataagggtcaggttgtggtttgatgtaagaatagaaagatatacaacagaacacgttattgtcgcttggagcggtagttgtggtttgatgtaagaatagaaagatatacaacccggacccgtcccattcggcattctgtaagttgtggtttgatgtaagaatagaaagatatacaacttcttgttcgctaatagcaaatagggtatgttgtggtttgatgtaagaatagaaagatatacaactgccgggtgtataattaaagcctttcattactatagtgctgtatataacaagatagttatggcaagccagccgacacaaagcattcgattaattgtcgacaggttcaacgatacggtagtaccatcgtagaatttgcttttggaatggagagaaccttgaagcaatataataagttgtcagatggtatcgcttatactgaattagtcaaattaaagcattgattgaaaatgttttgtaattttgcatcatgtaaaagcgttcttttgaattattgcaaaataaggtgaaacacagaatttcgctggtttataatatcgttacccatcaagctgaactattaattattgaattttagcgagaaagaaaatttgctatgccttgtgttatgaaaagttcagttttttcgatatataggaacctgctatcatctttggggataccacaaggatgatagcagattaaactttaaaatcaggccaaaatggaaataagaaacctggaacataccgattttgacacgctttttcacggctttgaaaaagcatttgccgattacgagatacactttgagaaagaagaggtgcgctccatgctcatacggcgtggatataatcccaaactctcttttgcagctttcgtcaataacgaaattgtggcatttactttgaacggaacaggaacattcaacggtattcccaccgcctatgacaccgggactggaacagtaaaagaatgtcggggacaacgcatcgccggaaagattttcacctattcaattccttttcttaaagaagctggtatcagtcaatatctgttggaagtcatgcaaaacaaccaaaaggcaatcggcgtttatcgccgaatggattttgaggtaacacgggaatttgattgtttcagacaaacgattgaccacattgacaatcgaaaagtaaacacggactgcagcattgaacaggtcaatgcagatgccatcagagaagcacagcactattgcgactttagtccttcgtggcaaaacagctttgaatccattgaaagagggatagccgagctgaggtgtcttggggctttcttggacgggaagatggttggatattgtgtgtttgacattcatacaggtgatttgactcaaatagccgttctaagagaatgccgaagaaaaagagtagcttcccgattattgcaagaggtcactgcgcgtatgaaaacagacttcatcaaagtgctgaacatcagccccaacaatacgaccatgtctgtttttctcgaaagcaagaacattccattggcaagcaggcagtttgaaatgatattgccactttaacagtgatgatgcaggctatgagaaaagtgatactttatattgccgtcagtctggatggctatattgctgatgacaaaggttccgttgactggataggtggacaagatgaaaatgtagaggtggaagatacctttacacgattcttcaatagtgtggatacggtcattatgggaagaaagacctacagccagattgtgaccgaactttcacccagccagtggccttatgagggagcaacgacctatgtcctgactcatcagaccaaagctgacgacacaaaacacatccgtttaaaaaatatggatatttgtcaacttgtagaagagttgagacaggaatcaggtaaagacatctgggtttgtggaggtgcaaaagtcgccgagcagcttattgataaaaatatgataaacacctatcatctggccatcattccggttattttgggtggaggggttaggttatttggcgcttctacccaaaagattgatttggcattggttgaaacaaagaaatacaatggaatagtggaggtaatatataatcagaaacaaatttagattaccattaatgttctttacccgaaaaaggacaaagccaattatctgcaggcttgacagaaataggagtgaactgtttcatgaatacagcgttaaagcagataaatgtgaaagatgcgcaaatcaaagacgtatcggactgggctttctacacatgcgaggacttgaaagaagtagcattacctgacggcttggttgcaattggagacaatgtattcagagtgtgttcgttcacatccattaagtagcctgcatcttcaaaggaaatacaaggagctgcatttttttgttgtgacaacttgctctgttacttgcaatgcgaccgcaccgccgacattggtaggagatatgtatgaccaaccaatccatttcaccaaatactttatgcaatccaacaggcaagacatcgctttcttgaaatgttgagctatgacattctaaacattgagaaaccgcatttggtagttagcgatactgcaagccattttaggtaactgcgggtttgtataaaaacggatacaatcataaactaattttcaactgttgctcttgagaattatgaatatctttagtcgctcagtttatccttaaatatgagcaatatttggcaagtagattcactaaagggaggtctccgttttcgaaccgttgcgcatttaaaggcagaatcctttcacacacacatgttctgcctctgtaaagagctttgagatataaacaataaggctttcatactgagatttagcgcgaaagcctttgtcatgtcaatgatttttagtaattttgccttcggtaatcatagcggaattttttagtttcattgtttcgtgtatattgcaaagttgccgggaatttcgctaattgctaaattattagagagttgcttttcagaactcacgttaaaataataaaaaaataaatatgaaaaagtttttccagacacttgtcttcctgctgtttgcaatgacggcaaatgctgattttgtcattatgctgccttcaaaatatgaagggcagaaaattctcgtgatggcggaggatatttcgtcaatagccagctccaaatcgcggcgtgacgtcataagaaagatggatacattgacagtggagaacaacactctgagggtgtctcctatgatggatgtccctgcatgctacagcataggtacggataaagagttgctggaaaggttttatgccgctcctggcgaaaaccttgtgatagacgtttccaatccagaaacttataaggcttccggcagcactttggtagagcagatggctgtcatcaagaaccgcctcagccagttccagtcggaggcgagggaagcgtatcgtaatggtaataaagctggagctaaggagaaacaagaggcacaggagaattacttgtcgcaatacatcacggagaatgcgtccgctccgggggcagtctatgcgcttctgaggttaggtgaggagaagacactggtgaagcttgccacgacgcttgaaggtacagccaaggaatgtgtcatatatccgttggtgacgaaagctgtttcacaagctgaggagcaaatggcaagggacgaacgtcaggcttctcttgaaggtgcccttgctccggatttcactcttgccggccttgacggaaagatgaggagtcttagcgattatcgtgggaaatgggtgatattggacttctggggaagctggtgtccttggtgtatcaaaggcttcccggacctcaaagaactttatgggaaatatggtcgtgacaaactggaaatcataggcatagactgccgtgagtcggaagatgcatggcgtcgtggggtggagaagcatcagttgccatgggtgcagctgtataatccgaagaacggcaatgccacagacctctatggggtcagcggctatcctacaaaggttgttgtcagccctgacggtaaggttcggaagatagatatcggacataatgttgatttcgttagggattttgagagcatggtgcagcattgatgcggctgcatgtcgttgtaaatgaccaggtctccggattcggccaggtgcagatgtgtgtttatatcatcttgtttttgctaaatgatacatataaaagttatattatcttaaaaacaaacactcttgttgcgataaatgcctatttaattatgttattttagggaaattgtgtaactttgcaccctgaatcggctttatgggagtcgtgtatacctatgcatataagtaaatacaataatatataaaatcaaaaacaaaaaattatgcctacaattcagcaattagttagaaaaggcagaaaggtgctcgtagacaagagcaagtctccggctctggaggcgtgcccacagcgccgtggcgtttgtgtgcgtgtctacacaacaacacctaagaagcctaattcggcaatgcgtaaggttgcccgtgttcgtttgacaaaccagaaggaggtcaactcctacatcccgggagagggacacaacctccaggagcactctatcgtgcttgtacgcggcggtcgtgtgaaagaccttccgggtgtgcgttatcacatcgtgcgtggcacactcgataccgcaggtgtggcaaaccgtacacagcgccgttcaaagtacggagcaaagcgtcctaaggctaagaagtaatcggattacagatatagcacaagacaaactcgaaaagaagaaaacaaattgaaagttttgctggagactataaaaatgaaggttgagtaaatgtccaggagcggacgttgaagaacaagaaaaagacagccccaagcaagatgaattgacaaacaaagcaatgagaaaagcaaaaccaaagaagcgcgtgatccttccggatccggtgtacaatgaccagaaagtgtcaaagttcgtgaaccacctcatgtatgacggcaagaagaacctctcttacgagattttctacaacgccctcaagactgtcggtgagaagatgcagaacgaagagaagtcagctctcgagatttggaagcaggctctcgacaacgttactcctcacgttgaggttaagagccgccgtatcggtggtgccacattccaggttccaacagaaatccgtcctgaccgtcgcgagtctgtatcgatgaagaacatgattctcttcgcacgcaagcgtggtggcaagggtatggcagacaagcttgctgccgaaatcatggacgcatacaacaatcagggtggcgcattcaagcgtaaggaagacatgcaccgtatggctgaggctaaccgtgcattcgctcatttccgtttctaatatttaaggaggaaaaagaaaaatggcaaaacacgatttgcattttacccgcaacatcggcatcatggctcacatcgatgccggtaagacaacaacatcagagcgtatcctcttctacacaggtaagactcacaaaatcggtgagactcacgacggtagcgcaacaatggactggatggctcaggagcaggagcgtggtatcactattacttctgctgccacaacatgtttttggaactacctgaacaaacagtataagattaaccttatcgacactccgggacacgttgactttactgcagaggtggagcgttcactccgtgtccttgacggtgctgtcgctacatattgtgcggtaggcggcgtggagccacagtctgagactgtatggcgccaggctgacaagtacaatgtgcctcgtatcggatatgtcaacaagatggaccgttccggcgctaactactatgatgtggttaagcagatgaaggaagtccttggcgccaaccctgtaagcctctgctgcccaatcggtgcagaagagaatttcaagggtctggttgacctcgtaaagatgaaggctatcttctggcatgacgagacaatgggtgctgactatgacgtagaggaaatccctgctgacatggttgacgagtgcaacgaatggcgcgacaagctccttgagtctgccgctgagttcgatgagtctctcatggagaaatacttcgaggatccttccacaatcacagaggaagagattatcgccgctatccgtaagggtactcttgctcttcagtgcgttccaatgctctgtggatcttcgttcaagaacaagggcgtgcagacaatgcttgactacgtatgtgcacttctcccttctccggttgatattgatacaatcgtgggtacaaaccctgacacagaggaagaggaagagcgtaagccgtctgaggcagagccgacatcagctcttgcattcaagattgctacagacccgtacgtcggacgtcttgtattcttccgtgtctactcaggtactgttgctgcgggttcatacgtttacaacccacgctcaggaaagaaagagcgcgtaagccgcctcttccagatgcactccaacaagcagaaccctgtagaggagattgctgccggtgatatcggttccggcgtaggcttcaaggatatccgcacaggtgatacactctgtgacgaggcacacccaatcgtgctcgagtcaatgacattccctgacaccgttatctctatcgccgttgagcctaagtcacaggctgacatcgctaagcttgacaacggtcttgccaagctcgctgaggaggatccaacattcacagtgcgcactgacgagcagtcaggtcagactgtcatctcaggtatgggtgagcttcatctcgacatcatcatcgaccgtctgaagcgcgaattcaaggtagagtgtaaccagggcaagccacaggttaactacaaggaggctatcacacgcgaggttaacctccgtgaggtctacaagaagcagtccggtggtcgtggtaagttcgctgacatcatcgttaacgtcggtcctaaggacgaggactacaaggagggcgaccttcagttcatcaacgaggttaagggtggtaacgtgcctaaggaattcattccttctgtacagaagggcttcgaggactgcctgaaggcaggtgtactcggtggattccctgtcacaggactcaaggttactctcatcgacggtagcttccacccggttgactctgaccagttgtcattcgagcttgcagcacgcaacgccttcaagaacgcatgccctaaggctggtccttgcctcatggagcctatcatgaaggtagaggttgttactccggaagagaacatgggtgacgtcatcggtgaccttaacaagcgccgtggtatggtacagggcatggaagaggctcgcagcggtgcacgcattgtgaaggctatggtgccactggcagagatgttcggctacgttacagccctccgtaccatcacttctggtcgtgctacatcttctatggagtacgatcaccacgaggcagtgtcaagctctatcgctaaggctatcctcgaagagtgcaacggtcgtgctgacctcgtttaatcaggtcacgcactaagcaacagataaatagtgaaaagggactccgtgagcaaatgactctttacggaatccctctttcacaacatatatctcataacaaacaaaaaacaagaactaatgagtcagaaaattcgtatcaagctgaagagctacgaccacatgctcgtagacaagtcagcagagaagattgtgaaggctgttaaggctacaggtgcagttgtcagcggtcctattccactcccaactcacaagcgcatcttcaccgtcaaccgttcaaccttcgttaacaagaagtcacgtgagcagttccagctctcagactacaagcgtctcatcgacatctacagctcaacagccaagactgttgacgctctgatgaagcttgagctcccttcaggtgttgaggttgaaatcaaggtgtagttaagtatctaatagcaaatataaaaaagacggatatgccattcaaggcgtatccgtctttttttgtgacatcctcacattgacagattgttttgcgttcctgcttcaggaaatcttgtgtctcgtgtgtgtgttttttttatgagaaggttttaggcttttatattattaatctgccaatgtcttgtaaatcaataag

SEQ ID NO: 4177 - DNA, 23666 bp, synthetic construct
  misc_feature 1..23666: note = Synthetic
  source 1..23666: mol_type = other DNA
ggaaactgaaaaacgtagagccgcgcccctactcttacccttcactgcgaggcagtctgggcatggtgcagcaggtagcttccggcatgatgcctgttatcatggcttctacatgggcaagctatgccgacgcactgaagtcacttgcccaacagttcacccccggcgaccgcacagtcattgaagcccaactgaacgcactgaagcaggcagcacagcaagacagcaccgacctgcgcacagccatcgccacctacatgaataggctgtacacctccagccagtgcaaggtgtcgctgcaagaagcaggataccgcctgcgtccggcatcggaagtcatccgtagtgcctacggtacacaggccgaactggttaacctggatgtcaccttgcaacaagcagccggaatgaaagccgaagcaaccatctgtgccctccacccgtcagaagcagataaccggggacttgcttccatcgtttccctcatagcccaatccgaaaatgctccccaaaaaggagcggccgtacaagggacaggcgaatcccgactacaagactacatgacggtgactaccctgcaggcacagcccctgaaactggcggaaaacacagctcaagacactcagaaagacgtattggaagtcaatgccgacaactcgcagacactgcccgacggatggcaggttgtcaccctgaaaccggtatcggccgccttacctttatatacatacgctaccaatacccgcatccgcgaaaacatcctgcttccacaaaccgtggaagtgacctgcgaaacattggtcaagctgcccgaaggtaccaactggagtcagaaagccgacaagacgctgacccgcccatgtggcaaggtatcattcagctataagcagggagcagagggagtaaccgtgacacgaagcctcagcatcacacaacaattactcactcctcagacctaccgcgacttctatgccctgatggccgaatggcgcgacagcaacaaccacacactgctgctgaaacctgtgaagtaagatgaaaatacaaaacgagggcgcatccgtttggacgcgccctcgctattctcctatataatacaggtaagattataccagatgtgaaatccactcttcacgctcacccggcagcaagtcgatgacaggaatctcgatcatcgtgtagcagcccggttgctgacgcatagctgcacgtgccacgcaaaccaatacctgagcagtcaaagccggattgttgatacgcatgttgaactcgaacagctggttctgcgtcttgcccgaaacacccttacgagtcaggttcacaccgtgtcccatgtcgagcagtgcgtctacgctgggcacgagtttcacgtgtgtttcgtcgttcacgaagtaaggatcggccttaatggcagcagccaccttgtcgaaatcgtaaccttcgttcagttcgatgtataccatacggcgatggatgcctgtaccggtaggaatcgtcatggacaatgcagccttcacaccttcaatggcctttacggctactgtgtgtcccatactcatgcccggtccgaagttggtatacgtgatgcctttcggtgcaatagcttcgagcaacgtacgtactacagaatcgcttcccggatcccatccggccgagatgatggaaactgtattgtgagccttggcctcagcatcgagcgtacggcgcagatcggcaatgcctgtatggatgtcaaagctgtctactgtatggatgcccagtgccagaatctctttggcatatttctctacactgcgggtcggtgtacaaagaatggccacgtccactccttccagttctttaatatctttcacgacaggataatcgttcaattcagccggacggttctcggcacctgcacggcgtacaacaccggcaatttcgaaatcaggcgcagcctgcaaagcctggagcacatagtgcccgatattgccataaccaacgatggcagctcttacttttttcatacttttatccaatttagttatcagttttctttttagtgggtgcaaaaatacgcattattcatcaaatagcgtacaaaacggtgcaatcttccattttctttttttctttattaagactattttatagccaatggatatttcgtacatttgcaccggacatataacaaaccagacatggcatttgttccgaccccgaagacgaaagagcttccaaaccaacaactcaagaactcataaactcataaacatatgatagaatacctccgaggcgaacttgccgaacttagtccggcaaccgctgtcatcgactgcaacggcgtaggctacatagccagcatttcgctcaacacctactcggccatacagggcaagaagacatgcaagctctacatctacgaagccatccgcgaagatacctaccagttatacggctttgccgacaagcaggaacgcgaactcttcctgctgctgatcaccgtatcgggcatcggaggcaatacggcacgaatgattctctcggccttgtcgcccaccgaacttatcaacatcatcagcaacgaaaatgccaatcttctgaaaacggtgaaaggtatcggactgaaaaccgcccaacgcatcatcgtagacctgaaagacaagataaagaccggagccgtagcagccgccatgggtgtagaaccgggacttccgctggcaagcatggccaacagcgaactgcaagaagaagccgtagcagccctcaccatgctgggatttgcacaggctgcctcgcaaaaagtggttctggccattctgaaagaaacgcccgatgctccggtagaacaggttatcaaactggcacttaaacgactctgacatgatgaagacaaagaaaatatatatgaatgactggctgacagccaacgcccggaaccagacacagccggccgacaaatggtatgtagactttgccaaccgtctgcttcccctgatcgacagctctcctctgtatgccggtcatacgttttacgacctgaccaaaacagccatccgggtaagtctgtacttctacgataccattgcccagtctggcggctggaaagttttctgtgacaaataccgacagctctaccaccagacgttacctttctacgagtgtaccgattacattgacgacgaaatcaacctgcccgatgtatgcctgctgttatgggacagcctttcgcaaccggctctcctcccggacgaagaccatccggaattgcaagctttcgccgatcttcacgctccttttcattttcagaatccttatgacaaggaactgttggcactggccggaaaactgtatgatgaaatggacagcctgttcgaagaagcacctattggcgaaataccttcacccgactcgtggatgaggaacagccaagtactggaaactccttcgcttactttacccgaaatcactcccgacagccggctgaccaaggacgtggaacgctgcctgaagtacagcaacggctatcccctgctttatttcgccacctaccgcgaactgcacaccttcctgactcaagaactgaagtgggaagaccatcccgatggcctgctggccgacttgaaagacgaaaagaactttgtgatctatgccaacgctaaaggcatgctgatggctcctggtgtggcagcctgcttctgcgatgcccgcaatgcagcctacaatgcttcgacggctgctgccgaagcatacaagctgttctgcctgcccggccattgtccgttcgacctgttaaagtatggtatacagcacggacttctgcctgatgcccaacttcccttcccgcaaggaaaagaagtactgcagaacaactgggatttcataacacgatactttttagacgaatattatgagggggaataagaatacacatactcgtccgcggcggaccagcagcaaaaaaaagccgacaggaaaaagaataggcaagtcgaaaccatcgaaagccaacaaccagctgaacagaagggtaaaataggatctgcctgcaagtagcagaaaaatagaataccacacacgaaacaatataaaagaagtgcaaacatactgtcatttcctcgactctgaacggaatggcagcatatttgcacttcttttttatgtgcccttattttctaaggatacaagagggtatatcaaattaaggaagcgttttcctttagacaccctccttctcacgaaagatttctttcttaaagctcgataatttcttcgttgcacacggtcagtttctccactccttcggtagttaccagccatgagttctctatacctaacggaccgacacccggcaacacaatcttcggttccaaagcaaataccatgcccggctccagctcctgcttcatgcggggagcgataacaggtgcttcgtttatttccaaaccgatgccatgaccgatgaatttagccttctgtcctactcccatgaaataatcggcaaatccggcttcctccaccatcttgacagccgtattgtacaaatcttcgcacgctacgcccggcttcgccatattggcaatggcttcttgtacttccagacacgtctggtgtgccgcatacgccttttccggcaatttaccgatagagaatacacgactcatatcacccatatatccgtagaagttaccgcccatatctaccatcaggctctgtcctgcctgcaacagtgaaccgtttgcacctcccggcaacgaaggatcgagtccctcaccacccaaggcaaaatcgtagggagaaggagcagcagcattgtcacctgccagcagactacccataaaaatttccatactctgcccaaacacacggaaaatgcccagacagccttccagacgcatcaaccgttctatctcgatggaaagctgacggtcggtcatgcccggacgataaacagacggtatctgttcgtaagctttggcatgcgcagctcccgaacgacggaaaatctcaatctccatcaccgtcttgatgctgcgtgcctgacgaatcagcgacgaaccgcacggcacaacttccgcttcggggaaacaggctgccagccgattgtactcagtaaacgacaattcatcgccttccaacatcagttttttgggcaaaggcaagccacactccagtatcagttccggcaattgttcgggcttgcgtacaggaagtacatgttctccggtaatgttattggggcgcttgacaaacaggcgagcaggcgattccagcggcaaatacaggtaaccgctaactacagttccgtaggtatatatcagattgacattgcaagcaataagggcggcatcaattccacgttgagccatcagtacacgtatcttatcacgtctttgttttaattccggttgtaacatcttttataattatgattggttagcattcttcgttttcgcacacaaagatacaattctcccgtcataattccatcaatccggaaaatgattatatacgcctatataaaaaaagtactgccccataccttcacaggccgcaggcagcacaaaccacaaatacaaatacaactaaacaaagtttctttatactattccctgacccatcatggcgtgagccaccttcatgaatccggcgatatttgcgcctttcacatagttgatgtaaccgtcaggttctgtaccatatttaacacattgctcatgtatgccgtgcatgatagtgtgcagtttctcatccacttctgcagcactccagctcaggtgcatggcgttctgcgacatttccagtccgctggtagccacaccaccggcatttacagccttacccggtgcatacataatcttgttttcgataaagaggtcgatggcttcgggcgtacatcccatgttggatatttcgcctacgcaagtcacgttattatctatcaggtgacgggcatcttcgccattcagctcgttctgtgtagcgcaaggcagtgcgatgtctaccttcacttcccacggacgtttgccagctacgaattttgcacccgggaactgctcggcatacggttcaacgatatcattgcccgaagcacgaagttccagcatatagtcaatcttttcgccactgatgccatccggatcgtaaatgtaaccgtcgggaccggaaatggtaaccaccttggcatccagttgcgtagcttttgtagcagcaccccaagccacgttaccgaatccggagatagctactgtcttacctttaatatcaatacctttcgtctgcagcatctggttcacgaagtacaaaccaccgaaacctgtagcctcaggacggatcagcgaaccgccgaattccaatcccttaccagtaaacgtaccggtaaactcacgggtcagcttcttgtacataccgaacatatagcctacttcgcggccacctacgccgatatcaccggcaggaacatccatatcgggtcccagatgacgccacaattccagcataaatgcctggcagaaacgcataatttcggcatcgctcttaccacgcggtgagaagtcggaacctcccttaccgccccccataggcagcgtagtcagcgcgttcttgaaagtctgctcaaatcctaagaatttcaggatggaaaggttgacggaagcatggaaacggataccgcctttgtacggaccaatggcattattgaactgtacacggtaacccagattcgtctgagcttcacccttatcgtccacccacgtaacacggaacgtaaaaatccggtcaggttcaaccaatcgttctataatctttgctttttcgaactctggatgctggttatatatatcttctatagaaagaagtacttcctttacggcttgaagatattcagactcgccggggtgcttagcctccaaagaggacatgatacgttcgatgttcataatattactttttaaaaggttattgcctctgttatttattcaaggtcattcgagcaatttgtcagcgaacaacactgcaaatatagggaaacttttcgtatttcctaaattttaaagcgatattttgattaataaatgataaaatgacaaaaactacgtattttattccttaaaacccattcccaggttgtacatgatgaagctatatatgtctgcctgctcctccagcaccttgctcatgggctttcctgctccgtgtccggccttgctgtcgatgcggataagggtcggattcgttccatcattgcaagcctgcagcgttgctgcaaacttgaacgagtgtgccggcactacgcggtcgtcgtgatcggccgtcgtaaccatagtggcaggatattttgtacccggtttcaggttgtgcaagggcgaataccccttcaggtactcgaacatttctttgctgtcttcgctcgtaccgtaatcgcttgcccagttccagccaatggtgaacttatgatagcgaagcatatccatcacgcccacttcgggaatggctacacggaacagatcgggacgctgcgtcatgcaggcacctaccagcagacctccgttcgagcctcccacgatggctatcttgtccttattggtatagttggcagctatcagatactcggccgccgcaataaagtcgtcgaaaacattctgcttctgcatctttgtgccggccacatgccaggcttcgccatattcgccgcctccgcgcaggttgacctgcgcatagattcctccgttctccaggaaaggaatgcgcatagccgagaagccaggattcagactgatgttgaaacctccgtaaccgtacaggtataccggattcgtaccgttctttttcaggtctttcttatatgtaaggaacatgggaatcttcgtaccgtccttgctgggatagaacacctgttcggtaacgaaagcatcggcatcgaaatcgaccttcggcgcacggaacagttcgtatgtattcttatccatatcatatttataggtagcacccggaatggtgaacgaagtaaagctgaagaaacattccttgtcgtccttgtcgccactgaagcccacggttcccaacgacggcagattgatttcctgcaactgcttgccgtcgagtccgtacacataagcgtggttggaagcgtctttgtcgtaagtcaggaacagctttccgccaatcacctgtgcgcccgacagcactgcttccgactcgggcaccagttctgtccagtctttcagttcgctcttggcaaggtcggccaccattatgcggtttttcggagctccgtgattggtgaacagatatattttcccgccaattacttccagcggactatactgatagtccatatctgtagccatcgccacaaagggagcgtcattccggcgcagatccttcacgtacaaggcatttccacgtccttctccactttcgtacaagaagagcatcgtctcatcctcgctcacactgcaagtatagaagcgtttgggataggccggattctggtacaccagcttgtcctgcgactggggagtacccagtttgtgatagtatatcttatgattggcattcatgttggagaactcctttcctttctcgggagcatcgtaagcactgtaatagaatccgtcgccctgccattcggctccggtaaacttggcccattcgatgtgatcgtccagcagctgtccgctttctgcatccatcacataaatctcggtccagtccgaaccgctgcgcgaaatggtataagccgcatactttccattgtgcgagaaaaagatgccggtcagcgccaccgtaccgtcgtccgacagacggtttggatcgaggaacacacgtggttcgccatccagcttgtcctgcacatacaatacgctctgattttgtaggccgtcattcttgaagaaataatactttccgtgttttttgaacggcgtacctatcttttcgtagtcggacaccgcagtcaggcgtttcaacaatgcctcacgaaacggaatctgcaacaagtaaccgtttgtaaccttattctgagcttcgacccacgcagccgttgccgcactggtatcattctccagccaacgatacggatcggggacttccgtgccgaaatacacatctaccgtatctactttcgccgtttcgggatacaccaatttggattgtttcacaccacaagatactgctgtcatactcatagccaatgctaaaatctggacttgtttcataaaatatttccgttcgttcagtgttattggcgcaatatacgaataaaaaatgaatatttaaaaaactatggttcgaaatatcgcgaatattctcccccgttttttccccagttaggaaatatttttttcccagttaggcagatattttttcctaactgggaaaaaaacggcacccttaaataaaaagaataggcagaaaaacacattaaaaaaacaggaaacaaagtcatccgtctttcacctttcaccgcaattcatggattatcagcgagatgcggtgaaacttcacacgggaaactttgttcacaacagaaaaagcggtgaaatcatgttttaccagtctcccaaacaagtcttgtaaaccacttgcacggctcacgaacgacacttgtatggctcgcgagcaacacttgcacggctcacgagcgacacttgcataatagccctcacaactatggactttagcaacgtaaagagggacttgggaaacgtaaagaggaactttcggagaataaggtatgagataaaatgataggggaatttttattgaataagaatgtaaatgctaagcaatacgattcatattataatatcaataaaaacaaaattaaatagcacaatttaaatattagataaatatagcataaaaaactcccaccgaagcgggagtataggttttacccttcggcccgaaggccttattgtgataagatgtagaaaatcttatgttgcaaagataaatctttttccttaaatttgcaagcaatcgtacaaatcgttttttaccttaatcacgatacatcatggaaaagataatcttaggtgttgacaatggcacaaatagcattggttggagcattgtgaaatatgatgacgaagcatcggaaaacaaatataccttaatagataaaggtgtgaacatctttcaggaaggtgtaaaaatagaaaaaggaatagaatcctcaaaggcatccgaacgtacccaacacaagcaccaacggattggctactggcgcagaaagactagaaaaatcaaactacttcaaattcttaacaagcatcatttgtgtccaccgttatcaaaggaagaactaagaaaatggcgttcacaaaagatatatccaatgaatgaagcatttatggcatggcaacgtacggatgataacgtaggtgataatccttactacttccgccatctctgcctgaccaagaagttagacctcaacgacctcaagaatcgttatatcgtaggccgcgccctttatcacttgaatcaaagacgaggctttttaagcaaccgcaaagagaacaccaaggaaagcgacggaaaagtcaaacaaggcatagaagcattggcacaatccatgaaggaatgtgaaacagagtatttgggagaatacttcaaccagttgtatcagaaaggggaaaagatacgaactcattatagcagtcggcttgactgtgaaaaagagctgcttgccatttgcgaaaaacagggcttacccgaagaactgactcaagaacttcgccaaaccattattacgcaacgccctttaaaatcacaaaagcacatggtggggaaatgtgtctttgagtcctccaagcccagatgcctgatgtcgcacccactatatgagcaataccgtatgtatgccttcatcaataacatcaaaatacaaggccccagtgataataaactaagagcactgacagagcaagaaaaacaaaccataatacctctgtttctgagaaaatccaaaaaagattttaagtttgaagatattgccaaaaaactttcgggtggtaaaaaaaatttctgcttctataaggataaggtagaatgcgcataccgcttcaactattatatggacacattggtcagcggttgtcctgtcatagcccaattgtcagaagcattcgatgtaaaaagccatatagacgaatggttggaaagagcttgcgaagtctatacgcaagggggagaaaaaaatcgttatgaaatcatgaacgacatttggcacgtactattcttctttgatagtgaagacaaattgaaagaatttgccttgaaaaaactacagatggacgaagcacatgccatcctatttagcaagatacacctgccttccgactacgcatcactttctttgaaagcaatcagaaagattctaccttatatgaaagagtatggcatgatttattcacacgccgtgttcctggccaatcttcccagcgtaataccctgcaaggtggataaagaagccttattaccgatgttgtcgcacgaggaaacggatgatatcgtgaaagcattctacgaatatgatccttccatgtcggccatccgtacacaggaagaatatgtgaaacgttatatagcctataaatacaatctcaacgaagaggatgaacgcaaattgaagagactttaccatccatcaatgatagagacttttcccaaagtacgtcaacggacagccgaagggtattatcaattagggtctccccgcaccaacagtttacgaaacccgatggtaatgcgctcactatttcgccttcgtcacgtcatcaatactttgttaaaaaaaggaaagatagatgaagatacaaccatacacatagagtttgcacgcgaactgaacgacgcgaacaaacgaacagccatccgtcagtggcagaaccaacgaaacaaaaggcatcaggaaattgcagaaaaaatcaaagagcattttggcagcgactatctacctacgtcaatggaaatactcaaatatgagttgtgggaagagcagaatcatttgtgtctctatacaggagagacaattagtcttacagatctttttgaccctaacaaatatgatatagagcacactattccacgaagcgtgggtggtgactctacagccatgaacctgaccatttgcgacagccgttataatcgtgaaatcaaacaagcacaaatcccgtcacaaatgtctaattacgaacaaatcatggagcgaatagacagttggaaagaaacaatagaaaaactaggtaaagaaatacgcaaaattaacacacgaggtgtctatgacaaggaggttaaagaccgtatgattcaaaaacgtcatcgtctcatgttggaacgtgattattggaaaggcaaatacgaccgatttactatgaccgaagtaccagaggggttctctcgtcgtcagggagtagatataagcatcatctcaaaatatgcacggtcatacttgaaatctgtattcaagaatgtgtacatcgttaaaggcattgcaacctcagatttccgaaagatatggggtatccaagaggagtacgaaaaaaaacaacgtatcaaccattgccaccatgccatagacgctgtaaccatcgcctgcatcggcaaagccgaatacgacaagctggctcaatattatcacgatgaagaacgatgggaatggggattggagcgtcgccgtgcagagtttccaaaaccatggaacacgtttacggaggatatgaaacatcttgatgagacattgcttgtcagccattacaccgcagacaatctgggtaaacaaacccgcaagaaaatacgaaaaaacggaaaaattaccggacagtatatgcagggagataccgctcgcggtccactacatcaggatacttactacggagcaattgaacacaaaggtgaaatcaaatatgtagttcgtaagtcactggatcaacttgacgaaaagaatgtaaagaatattgttgacaatatagtgcgtaaaaaaatagaagcggccatagaacaatatggaaatctgaaaaaagctgtagaagccggaatttggatgaacagagaaaaaggtatagccattcacaaagtaagaatatacacaccacaagtcaagcgcccattggacattcgccgacaacgtgacctttcgcccaaagaatataaacgtagcttccatgtgaccaacgattcaaactacatgatgggtatttatgcaggcaaaagcaaaaacggtaaggagaaacgagagtttgaacttattaacaacatgaatgccgtagaatactataacagcggagtttcagtacaaagcatcgatatactaccctcggaaagtaaaaatgggtatccactaaaatggaaattcagagttggaactatggttttactatacgatgaaactcccgaagaaatatatgaacttgacgaaattcaattacgcaaacggctttataaaataacaggaatgtcttcaatgaaagtaacatccggaatttacggtgttctctcattggtattccatcaagaagctcgtccttcaaaagatattcctttgaagaatggagtttttaaatacggtgaagccacaagagctggtattaccttactgcacactcagtttaaagctttagtacaaggctatgattttgaaatggatgatttgggtaaaattaaatttaagaaccgatgataaagcaaaccctattttttacgacttccgtgtcagtatcgctgaaatataaccagatagagatacgttgtaaagatacagaggaggttatcacaaggccgatagaagatgtgggggtcgtaatcgtagaaaaccaaatggttcatttcaccatcccactattaaatgccttggcagacaataacgttgcagtaatattctgcaatgcccaatgcatgcccaatacaatgctgatgcctttggaatcgaactctgttcaacaagaagtgtacaggtttcagatagaaacaactctgcctacgaaaaagagaatttggaaagaaatcatcgagtataagatacggaatcaggctgcgttactcaacattttaggcctcgacggcaaaatattgaaaccatattatatgaatgtactatcgggggacagtgacaaccgcgaaggagtagccgccaaaatttattggcaacaaatgtatggaagacagttcaaccgaaatcgcaacggggaatcgcccaactcgttgttaaactatggatacgccatccttcgcgcagctgtaacccgcgcattgttgggttccggattgttcccagcatttggtctgtttcaccgcaaccgatacaatgcgtttcctttagccgacgatatcatggaaccctatcgcccgtttgttgatcaggttgtctaccagattttcacatcgtctccagatatctgtttaaacaaagagaccaaacaatcacttgtaaaagttttgtttactgacataaaaataaacggccaaatgcgaccacttcaaatcgctttatctatgacaaccgcttctcttgtccgcgcattaaagaataaaagggagaacatcatttatccttcgtttatatgagcgaatatcgtttaaatgcctatcgtgttatgtggctgtttgtgttctttgacttaccagtaacaaccaaacgagagcgaaagatagcctctgactttcggaaaaacttattaaaggacggatttgtaatgatgcagttttctgtgtatatccgccattgcgcctctaacgaaagccttattgtacacaaaaaacgtgtaaaaatcgcaatgcccattacaggtaaaattagtatgcttgccgtaacagacaaacagtatggaaatattgaaactatttttggaaaatctgcaaaaaaagaaataaaagcccccattcaattggaatttttttagtaccttcggcgaacattctacatctgtataactacttcgtattattagaattagtctatatatgcaataaaatcaagcacttagaggatttacgttgtggtttgatgtagaaaataaaagatatacaaccacgcttccatgagcgtcgaatcgtcgaaggttgtggtttgatgtagaaaataaaagatatacaactttatcgggtctccgtaaatgcacttggaagttgtggtttgatgtagaaaataaaagatatacaacttcatgtgctcaatataaacagagaattgagttgtggtttgatgtagaaaataaaagatatacaaccgggataaggcataatatagacatcgagtagttgtggtttgatgtagaaaataaaagatatacaaccattttttcagtgcgaccagtgtcggcgaagttgtggtttgatgtagaaaataaaagatatacaactttcacgatggagagaaaaagcataaagatgttgtggtttgatgtagaaaataaaagatatacaacttcagcaaggcgcggcgcagtgaaaacttgttgtggtttgatgtagaaaataaaagatatacaacacaaaaataagaaatacagctattccatatgttgtggtttgatgtagaaaataaaagatatacaactccgacaagaaaaaagagtaataagcaccgttgtggtttgatgtagaaaataaaagatatacaacgcgtcattctgcgcgccgacaagaacgcagttgtggtttgatgtagaaaataaaagatatacaacaaactcgggatggtgatatatacgttcttgttgtggtttgatgtagaaaataaaagatatacaacgacgctacggcggttgaagcagcggctggagttgtggtttgatgtagaaaataaaagatatacaacgggtagtcaggtaggacttcaagggcagtgttgtggtttgatgtagaaaaagctgtattctcctgctcaagatcaaaacttttgtattaattaacagcttccatacctctacatgcataaccatcagaaccattccctgaaagccggcacacgtgctttgctgatgatgactttttcgtcggtaggaggcgtaagctgaagaaccatccgcccgccaaaccacagactgacgcctacaacggctttgtgggcaatgatatactgacggttggcccgaaagaactgacggggattcagtagctcggccaattcatcgagcgtctgttggaaaataaaagtctcggaagactggagaaccgccttaaccactccatcgctgatgtagaaataagagatctgatctacactaaccggcacgaaacggtcgcctttcacaggaaccagaaagtgagttttatatccttcttcccgcttcagggcgtgcatgacagcctgaaaatcggtcttcgtgccctccgctttcgcacctccgagcagcttcagcttgtcgatggccatttgcaggtcggcactgctgatgggtttcagcaaataagcaatgctattcacgcgaaaagcctgcaaagcatattcatcgtaagcggtggtaaagatgatgggacaggtgatgtcaacctgctcgaagatgccgaaagccgacccgtctgccaggtggatatccataaataccagttcgggcatggagtggctggcaaaccactccagtgtatcggtcacactatccgtctcgcctacaatatcgaaatcggtatccacctcttgcatggctgctttcaggttgcgaagggcagccttttcgtcttctataatcagtgtcctcatatcagtggcaaggttactttaaagtcgttgttgctttcttcgatggtaatgtctttcccgaaaagcagccggtaacgtttggacaggttggccagtccgatgcatgtgctgctactacttgacagtttgggctgtagacgattcgcgacatacagttcattgccattcgcccggatgctgatcgttaacggattccgccggctgatttcattatgcttcaccgcattcaccaccaacatctgtactgccattggcggcacctcccgctgcaacagctcctgcgggatatctatatcgaaatgcagattgtcctcgtagcgcatctgcaaaagatatatgtacgaacgtacaaaaaccatctcttcattcagagtgacagtatgcgacagattgtcgtgcaacgtatagcgcatgaccctcgacagttcctgaagataattctgagccttgtccggcgattcccgtatcagcgaatacaacgtattgagcgagttgaaaagcatatgcggattcagctggcttttcaaagattcgtattggttgacaagattttccgtacgcaactgctcgttttcgagcagcatcttgcggctacgccggttctgataatccagatagcaagtgcccgtcacaatgcaggctatcaggatgtccctcaacggatgcaggtaatgatggagcatggcagtgatggccggtatgccgaagtgctggtgagcataaacaaagccttttcccaacaggttgcatacaaccagtgtgaccacaaaactcaccactactcttttccaactcaatgctgtagccaagctgccggacatcatgattctgacattgatgaaaaacaacaacagtatggagaaataagtaaacagtatttcgtaacagacattgagccaatgaatatccgggaacagatggctgcccgatacaggatcggacaacgctatcagttcgggcaagtgcatgaggaacgccacgataacggaaatggcattcaacatcagcagaaacttcttatggatgcgcaataacttcatgcggcaaagttagtgttttttatccataattctggccgccacatacattcccggccggaaatcggaattagtctgcgtgatacgcgcatagactttaatggaacggttgacgttgtccaccatctgatctaccgaaacaagttcggctgtgaacgttgtatcctgcatgccattgaccttgaacgaaaagcgactgccgggcaacagtttgtccaggtctttttcgtaagccgtaagctgcaacatggggttgctcttgtcaatcacatcacagactggttcgccggcagcaaaatacttgcctgcattgacattcatgttggttacgtagccgttgcgcggagcacgtacttccagataggtgcgaataccgtcgcgagtcactgctacagtatctgtacccagcaaggccagttgggcggcagcagcctccatacggcttttcatggacagatagtcggccttgctttgctgcatacgtttcaacgaagccgattcgccggaaacaagtttctgctgacgctcgtattccttcttcagatattcggtctgggcagcagcatcgagataggattgctgaagctcgataaagtccggattggccaaagtcagcaggatttctcccttccgtacatattcacccggcaggacacggatgtcgtgtaccgaaccgcccatgctcagcgtaacagtcacatgactctgcggaggcatgacaataacaccgttgaacgacggcggattggccacgttggtagcaccgcttatgccgtctacttcgggagtctgtgtggtgtccgaaccggcttgctctgccatctctgtagcgtttgccgattcagtctgctgggcagagggatttgaacacgatgctgccagcaaagcaagcatcaggtaaatcattcgttgtttcatcaggttcatcttattcatttttttctaatgttcgtttttagtgataaattcttggactcaggaaccactgtcttattcagtgtaaagttccaattctaataaggtaacgttgtaggcatagaccgtttcaatatacccgcgcttgatttcgcggacagtattcaggctttgaatgaattcgctgatatcggtttcattctcctgaaacttttgggttgcactttgctgtaaagcttcagcttccttgatagctgcctgctgataataagtcagacgttcgcgctgacgggcaagctggctttgcagttcgcttactttattggacagttgctgccgattggcctctgcctcccagccggctgcctgcatagcgatgcgcgcctgtctggcacggctccgctgagggaaaaagagaatggggaaagaagcccctaccatccacgaattaagtccggtaagcggagctatcttctgacggacataaccaatggaaaactcaggaaagaaacggcttcgttcaattttcaacaagtcttttttctcttgcagctgagcattgaaataatccagatgacgggttgacaggatacgaccctctgtcggcatctgcataaccgacagggtcgtatcggcagggaccaaaggccgatcgctataacaagtccatacaaaccggcgttcggccagtgtcaggtctccggctgtttccatccatcgtgtattcaggtcggctgccagtgctgttatcatgttacgttcggccagatcaatgtctccctgaaggtaacgctgttcaccactgttccgcaactgttcagccagttctttctgtccattgtacaaagcgttaaggttgaaagcatactggtagtacgcccatgcccactttacttctgcagtgatttctttcttcaccatgtcccgatagctttttcctttgtttatctgcgtgttggacaatgcattcttgtagaaaggagtcagcagagagccaagtgactgctcaatagccagttcgttatcgtggcggtcggtaccattcaactgtccccacgaataactgaaagaagtattgccaccatcccaggcttcgcctttcgaagcacgggcacgttcaatctccgactcggccatcttcagacgcggatgattgcgcaaggctatttcaacagcctgctccaaggtcaccggctgctgcgcttgtacggcaggcacactgatgaccagcatggcgatgccaagcatcatccgacgaaaagcaagacgattcttcctgcgtatgcgtctggcagcgatactgcccaccaggcggtagaatacaggaataatgatcagcgtcagtatggtagacacaatcagtccgcctatcacaactgtagccagcggacgctgtacttcggcaccggccgaagtagcgatagccatcggcacaaagcccaacgaagctaccaatccggtcaggaagactgggcgcagcaaatgcggacaccctaaagatatgatacgatcggtacacatatgatatttagtttgtttgcgtatatcgttgaaatgattgatcatcagaattccgttcaatacggccacaccaaaaagggcaatgaaaccgacaccagccgagatactgaaaggtaagccgcgcagccacagagctacgatacctccaatcagtgaaagcggaacggtggagaatacgaccagcgaatagatgacgctgcggaacgcaaagaacagcaacagcaggatgagcaacaaagcaataggaataaccaccgtcagagtgctgatagcgttctgcagattttcaaactgaccgccgtattcgaaataataaccgggcttaagtttcacgttcttttcgagcgcgtcactgatttggctgaccacttgctgaatgtcggcattgcgcacattcacaccaatgacaacccggcgtttggtagcgtcacgattaatctggagaggtccgttcaccagttcgatactggctacttcactaaccggcaactgaatgttatccttagtacggacaaacagtttgtcgatgttcaaatcactcaccttttccttgtccagacgaacaacgaggtcgaacctacgctcgttctcgaataccactcctgccgtctcgcctgcataagcagtacggataacagtattcagttcttcgatatcaataccataacgggctatttttgcacggtcgtagtggacaagcaactgtggaagtcccatggcttgttccactaatacgtcggctgctccgggaacctgttccacgtagcgggctgcttcctgagcctttgcatacaattcggccatgtcttctccataaagtttgatggcaatatcggccttggcacctgtcatcagctcgttaaaacgaagctggataggctgactgaagttaaattcggctccgtcaatagagtccagacactgtttcatcttctctaccatctctgcacggctcgacgcggaagtccattcggcaaaaggtttcataacaatcatcacatcggcatcttccaccgccatcgggtcggtcggaacttcagccgtaccgatcttggctacaacatgcttgatttcgggaaagcgttctttgagacgtttttctgcttcgagcgaaacttcaatgctacggctcagcgaactaccggcaggcagcgtcatctgcatggcaaagtcgccttcgtcaagggtcgggataaattcggctcccaactttgtgaaaagcagcaacgaaagcaacagggctacaaaagaagcagcaatagtaccccacacatgagccagactgaaacgaagcacacgctgatagattttattcagccagtcgaagaaacggtcggccagtgtaggcttcaccgtcatggtacgtttcaggaagagggatgccatcatcggaacataagttatagaaagaagaagagcaccgataatgcagaacaccagtgtcttggccatcggcgtgaagtatttgccttcgataccggtcaaggtcaagatagggaagaacacgatcagaatgataagtacggcaaacgtagcacttctcaccacacggcctgctcctttttctacttcctgatccatttcctgcgaagtcagcgtacgtcctttcagttcccgcccgtaaagatgggccaggattccttccagaataacaatggaaccgtctaccacgataccgaagtctatcgcaccaaggctcatcagattggccgaaacattaaatatacgcatcagaataaaagcgaaaagcatcgctagtggaatgaccgacgccacaatcaggccggcacgcatattgcctaagaagataatcagtaccagaaacacaatgatggcaccttccaccagattgcgtattacggtagagatattacgtttcaccagttccgaacggttcagataaggttccacactcactccttcgggcagcatcttctggactttctccacccgcttctccagttccttggtcacgacattggcattggcacctttcagcatcatggcaataccgcccacacactctccttcgccatctttcgtcatggctccaaagcgtttgggagcgccgaactgtactttaccaatgtctccgatgtgtactggtataccgccacgattggtcacaacaatctgctccacatcatgcaaatcgttgatcataccttccgaacggatataataggcacggtttaccttttctatataactgccacccgtattctggttgttgcggctcaaggcttcgaatacctcgccgatagtaatgttgagcgaatataaggcatcaggatctaccgctacttcatattgcttcagataaccaccgaaactattgatttctacaataccaggaatacccgacaattgtctcttcacaatccagtcctgaatggtgcgcaactccatggcatcataacggttttcataccccggagctaccttaagcacatactgatatatttcgcctaaacccgtcgtgataggcatcagctcgggagttcctagttccgacggaatttcacccgccaccatctgaatttgttcgttaaccagctgcctggcgtccagcgtaggaacatcttccttgaaaacaaccgttacaaccgatagcccgaagcgggataccgaccgtatttcctctacgttcatgacgttgctcatggctatttcgatagggaaagtgataagctgttccacttcctgcggagccagtgtaggcgacacagtaacaatctgcacctgattgttggtaatatcgggcacggcatcaatgggcagcgtcagcatggaatatatgccagccgccagcaaaagcagcgtggtcagcgccacaaacagcttctttctgattgaaaaatgtacgatttttgtaaacataaaataagcgacactaaatttataatgattacaaagttagtgcttatacaatctacattctccacctcaccgttgaaacgcccaaaatgcaggttgaaatacacaatacgggaaatgaccttaccacaacattcgttcacagttcccatccccaaacgtttcggaagtgttcaatgtccggaacatcgccagtaaactccattttttattaccgcctccttgcatatcccaagaaaaagcacgaattttgacggactaatctattaaattgcaaaaacagacatgctcagcaagttcaaactaaaccagctgtacttcaaggacacacagtttgccaacctgatgaccagacgtatcttcaacgttctgctgatagccaatccttacgacgctttcatgttggaagatgacgggcgcatcgacgaaaagatattcaatgaatacacctcgctctcgttgcgctatccgccgcgcttcacacaggtcagtacgtgcgaagaagccctgaagcaactgtcatccataacctacgacctcattatcagcatgccgggaacaggcgacaacgaaggtttcgacgtggcacgtaatatcaaagggcaatatcccaacatcccgatggtgatact

SEQ ID NO: 4178 - DNA, 23666 bp, synthetic construct
  source 1..23666: mol_type = other DNA
  misc_feature 1..23666: note = Synthetic
tgccggttatgagccaggaaaggatgtgaagattgccatggactgtgctgccagcgagtttgccgttcaggaaaatggtgagtggtactacgattatcgccagttgaaggatggtaagaagaaggatcctaatggtaaaaaactgactgctgctgagcagatcaagttcctggaagaactgattaccaaatatcctatcgattcaatcgaggatggccttgacgagaacgattgggacaactgggtaaagttgactgctgccatcggcgatcgttgccagttggtaggtgacgacctctttgttaccaacgtgaagttcctggagaagggcatcaagatgggtgctgccaactctatcctcatcaaggtgaaccagataggttctcttaccgagacactggatgctatcgagatggctcaccgtcatggttacaccaccgttacttcccatcgttctggtgaaaccgaggatacaacaattgctgatattgccgtagcaactaactctggtcagattaagacgggttctatgagtcgtaccgaccgtatggctaagtacaaccagcttatccgcatcgaagagcagttgggcaatagtgcagcttatggttataagaagttgaaataggaatgatgatatgaaattggaaaacaccaatttcaccataacaaaacataattagtaataactgaatagatcagatacgaaatagatgggcatggatgactgtgagggttgtccatgcttttttcttctatgatgtatctgtatcttcatgtgtttaactggataacttcgatatatatatattgattatgacaaacgtattgattagtgctgccgggctttgcggtgccacgattattggtgccattttgggattcttcgtcaaggagttgccccataaatggaacgacgccgtattgggatattgtgccggaatcatgctggcagcttccacgttgggactgatagtgccagccttcgaacagaccagtctttggtggctggtagtaatcggcgtaatggcaggagccttgtttctgaatgtactggatctggtaactccccatcttcatcatatcacgggactagaccccgaggagcatcgcaataatgcccgactcagtcaggtgatgctcttcgtgatggcgatagccctacataaactgcccgaaggcatggctgctggagtgagtgtctgttcggcagagggagcaacggagtggggggtatccttcggtatcgccctgcagaacatccctgagggtatggtgattattgctcctttaatgatggctggtgttacagcagtccgcaccttcttcatttccatcttcattgccctgctcgaagtggtaggcattctgttaggtttcggtttgggttcagcctcttccaccttcctccccgtgatgttgggctttgccggtggtgccatgctctatgtaacgagcgatgagatgattcccgaaacacatgcccatggttttcagaagcaagccacctacgcccttctcctgggcttcatcacctttgtgttgatggagaaatatgtatgattagattctgataccgaggcaggtagtatttcctaaatacagagtgtgcttaggtgtaggctttttggggaaaaaaagcggagcgtgatttcacaaccacactccgcgcaaacttaaacaaccaataaaagaaatagattgatcgttcaattgttatatctgatgaagagtagctcttgttagagctttgtttttttatctgtcagaaatatgtcttatctattttgaagacattgctgattagcggatgaacaggagttcacgatacttaggcaaggtccagagctcatcggctacagtcaactccaacttatcaatctgataacggatttcctccatctttggagctaccgtgtcatgataagcaattgccttatcgtgctcattctcaatcttgttggcaaccttgcgggcattaaccaactcctcaacacctgtctcgataatctgagtgcgctcggcaatcttcttgatgatattgatgttgcgggcagtcaacttcttgccttcctcgtcgccgaagatatcaatcatgttctccacattcttagccaactgactctgatagtgagtagccacagggatgatgtggttcatgctcaagtcgcccattacacgagcctcaatctgaatcttcttggtgtaggtctcccatttcacctcgttacgagcttccaactcgttcttcttcatgacgcccatatcctcgaacatcttgatagtggcagggtcgagataacgctcgaaaatcttaggacagctcttctcgcagtccagaccacgcttagctgcttcctctacccactcatctgagtaaccattgccgtcgaaacggattggcttgcaggtcttcaaatcctgacgaacgatatcgatgatggcagatgtcttgtcctcacccttggcaatcaactcatccacacgcttcttgaagtcggtcaaagcctcggctacagctgtgttcaatacgatcattgctgatgcacagttagcctcagaacctacggcacggaactcgaaacggttaccggtaaaggcgaatggagaagtacggttacggtcggtgttatcaatcatcaactctggaatctcagggatatccaacttcatgccctgcttgccagctacggtgaagagatccttcttgtcggctttctcaatgtgctcgagaaggtcggtcagctgcttgccgaggaatgaagagatgattgctggaggtgcctcgttggcgcccagacgatgagcattggttgcactcatgatagatgccttgagcaaaccattgtgcttgtatacacccatcaaagtctctgtgatgaagactacgaaacggaggttatcctctggtgtcttgccaggaccatggagcaggatgccggtatctgtagcgagactccagttgttgtgcttaccggaaccgttgatgcctgcgaatggcttctcatggagaagtacgcggaaaccgtgatggcgagctaccttcttcatcaaactcatcaggagcatgttgtggtcaacggcaaggttggtctcctcgaagataggtgccaactcaaactggtttggtgctacctcgttgtgacgggtcttgcaaggaataccgagttcaagagcctggatttccaaatccttcatgaatgcctgaacacgctctgggatggctccgaagtagtggtcgtccatctgctggttcttggctgaatcgtgacccatcagggtgcggcctgtcagcatcaggtcaggacgtgctgcatacaagctttcatctactaggaagtactcctgctcccaaccgagattggaaataactttcttgacatctgggttgaagtagtggcaaacctctgttgctgctacgtttacagcgtgcaatgaacggagcaatggagctttatagtcgagtgcctcacctgtgtaagagatgaagacagtagggatacagagtgtatcgtcgatgataaatacaggagatgttggatcccatgcagaataaccgcgagcctcgaaggttgagcggataccgccagatgggaaagatgatgcatcaggctcctgctgaacgagcaacttgcctgaaaattcctcgatcataccacccttgccatcatgctcgatgaaggcatcgtgcttctcggcagtaccttctgtcaatggctggaaccagtgagtgtagtgggttacgccattctcgtcagcccactgcttgatgcctttggctacggcgttggcgatgttacggtcgagacgtgctccgttgtcgatgacgtctatcagtttctcatagacatctgcagggagatacttgtacatcttctgtcggttgaataccttctttccgaagaattcacttggtcgctcgctaggagcggttacctcaacaggctttctcttggaagcctctgaaacagcttcaaatcttaagttgctcataccttatatattttaaaatttctgattttcaatgtttttataatctgttggaacgtttattttcccagccatttggcaattctctccatggcttccttgcagtcctcatgctcgccgaaggcggtgagtcggatgtagccttcgcccgatggaccgaagccgacacctggagtgcagactacgctggcaccataaagcatctcttcgaagaatttccagctaggtgtattgtttggcgtcttcacccagagataaggtgcattctcgccgccatatactctcaagccgagtttctggagttcggctctcatgaagtgggcattctccatatagtaattgatggttgccttcacctgttccttaccctcaggggtgtagatggcttcggcagcacgctggctgatatagcttgtaccattaaacttggtgcactggcggcggtcccagataggattcaatgccacttcctcacctgccaatgtcttagccttcaactccttaggaacgatggtgtaaccacaacgtacaccggtgaatccggcagtcttcgaataactgtggaattctatcgctacctttctggcaccacgaatctcgtagatagaatgaggaattgatgggtcggtaatatatgcctcgtaggctgcatcatagaggatgatgctctcgttcttgatagcatagtttacccattttctgagttcttctttcgagatgaccgtacccgtagggttgtttggataacagagataaatcatgtccacacggtgatctggaatctgagggatgaagtcatcgctctcatcgcaaggcatgtaggttacattgctccacttgccgttctcgaagactccggctctacctatcatcacgttagagtctatataaaccggataaatcgggtcggtaacgccgatgttgttatcccatctcaaaatctcctggatatttcccgtatcgctcttggctccatcgtttacgaatacctcgttggcatcaagatgaatgccacgtggcagaaagtcgttcttgatgatagcctcgcggaggaagtcgtagcctcgttccggaccatagcctctgaaagaagcctgctcagccatctcgtctacagccttgtgcatcgccttgatgacggcagggcagagaggctgggttacgtcaccgatgcccagactgattacacgctgctttggatgtgcaatcttgtaggcgttcaccttctttgcgatgtcggcaaacaagtagttgttggccaacttcaggaaatgttcattaactaatgccatattttgtttctccttttatttgtggtcattatcgaccatttgttatttaagtttgctcttatttataattcaatttctccttcgaatgagaaggctgcaggtcccgtcatgtaaacatgatcatcagcctcgctatattctatttccagcgttccgccatccatcacgatactgctttttctgccagtacgcttggtaagggctgcggctacggctgtggcacaggctcctgttccgcaagccattgttattccgcttcccctttcccaaactcgtgtccttatggcgtctgtgtcagttacttgtgcaaattctatgttgcatctctggggaaatgccttgtctttttccaggattttaccatagtgggcgatgtcgatggtgtcgatgtcatccacgaaggtaacgaaatgcggattacccatgcaaacataggtgccttcaaattttctgccgtcagcttcgagcaccgaagggcctatgaattgctcgggattttcaagtttgggttccagcatgtctactgttaccgattccacaacttctttattatcctgaagatgaagtttcaatatcttgatacccgaaagcgtttccagtcggatggtgtcctttcgggtcaatcccttttcgtaaagatacttaccgatgcatcggcttgcattgccgcacatcatagcttctgaaccatcggcgttgaagatacgcatcgaataatctgctcttctgctgtcttgcggctttccgatgagaaccagtccatcgcttcctatgcccgtgtgataagcactccaggcaatggccgccttctctgggtcagggatgtcgtacatctgggtatctacatatatataatcgttacccgctccctgcatctttgtaaaatgaactgtttctttcatctgcgttgttctttatgtttgaatactcttcttttatctctcatgtcttatctcttttgagatttgactttttgctagtctttcgaatatttcgatgactatttgtttgatttcggttgcaaaggtacgacgatttgttgagatatgcaagaaaataaatacagaaatcttgattatttttcgcaatcttacaatttgtgttataaaaatgctttctgccttacaaattgtaaggagaatatgataagccttgataaatttaaaatattcgataaaaagtagaaacgaaatgtttttattttctttaaaatgctgacaaaatgtattaattttgcagccgaaaacgaacataatgtaaaagaaaggcttgatttgaatagcaaccaatgaatgttcgttttcgaaaagagacaatcaatagaagtattaacacattattaattattaaaggattatgaagaagattgaggcaattatccgcaagtctagattcgaggatgtcaagaaggcgcttttagcagcagacatcgagtggttctcttattacaatgtaagaggtgagggtaaaatgcgccaggctcgcatttaccgtggtgtgatgtacgataccagcagcatcgagcgtgtgcttctgaacatcgtggttcgtgacaagaatgtggagcctaccatcgccgccatccagggcgctgcacagaccggtgaagtaggagatggcagaatcttcgtgattcctgtactcgataccgttagaatcagaaccggcgagcgaggcgacatcgcattgtataacgctgagaaagaggaataatttaaaatgttgaatgttaagtgttgaatgttgaattaggcattcttacttatctttaataaatattatttagtattctaatttaactataagatatttttatgagcagtttattattgacgacacttgatacgggtaacacagcgtggatgatcatggcaaccatcttggtgcttttgatgtcaatcccgggtatagcacttttttatggtggtttggtgcgccagaagaatatcctcagcgtcctgatgcagacggttttcatcgtggcagtagtcagtctgatatgggtagccttcggttattcctgggcattctctacagaatatgccgattcgggcaatcctctggcttgcgtcatcggtggtttcgataaatgtttcctccacggcattggcttggatgccatcatgccaacaggcattccggagctcacctttgcaatgttccagtgcatgttcgccctcattactccagccttgattctcggtgcttttgccgagcgcgtgaagttcagcggatatgtacttttcaccatcctctgggttattatcgcttatcttccaatggcccactgggtatggggtggcggtttcctgcaggagatgggagccatcgactttgcgggtggtaccgtggttcatatcaatgccggtgtagccgctctggtcatggcactctgtgtaggcaagcgtgatgattaccgtgcgggtcatcctatcacacctcacaacatcaccttcgtgttcatgggtatgtcattcctctggttgggatggttcggtttcaatgccggtagcggtctggcagccgatggtctggctgccaacgccttccttgtaactcatatcgccacagctgcagcagctactacctggatgctcatcgactggattgtgaacaagaagccaactacggtaggtgcttgtaccggtgctgtagccggattggtagccatcactcctgcagccggcagtaccgatattttcggagctttctgcatcggtatcatttccaccatcgtctgcttcttcatggtagctgtagtgaaggagaagttcaagtatgatgatgccctcgatgcctttggtgttcatggtatgggtggtattctgggatctatcctcaccggtgtcttcgccactcagtatgtaacaggagccgaaggcgtacagggtgccctctacggcgactggcatcagctttgggttcaggttgtagccaccgtggtaagcatcatctacagcgtagtagttacctacattatcttcaaggtagtagataagagtgtaggtgtacgtgttgacaagcgagtagaggaggaaggtctcgacatctacgagcatggtgagagtgcttatagcaactaagatagagaatgaatatatgtataacaccttgactgtatgttttgtatggtcaaggtgttttctattataataatgtgtaaacctgattttgcctaaattcttcttgttattttatcatttgcctgcttttttatgttaaatcttataaataattagttacaaaatcagttatttttattatatttgtcaacaaattaaagcgtagacaattatgattaatgaatcattttctataagattgcgggaagcgcgacagatgatggggctcagcatggataaactcgtagagcgaaccaacggagccatcaccaagcagagtatctcccgatatgagaaaggcatcatgcaccctaagcgtgatgccctgcaagccatagccaaagccctcaatatcagcgaggaatatttcgaaggaaccaatctcaagatagatatgcctatgctccgcaccacctccaatggcaagttgtccgaagacgagttgcaagccctggaagcgaaactctcgttttgggcagagcaatatcttacgaaggagaaagaagcaggctttcctacccggttcaagaatccgataaaaggcaccaaggtatcaacccttgaagatgccatccatgctgccgaccttcttcgtgagaagtggcattgcggtgatggtcccatcgccagcatcctgagactcttggaaagaaaaggtatcatgatacttgctgctaatcttcctgagtatgtcttcggaatgagcacctgggctgataagaagcatccgctgatgattctcgatttcaatccggaaaagagtagcgtagagaaacttcgtttcacggcagttcatgagttggctcatctgcttctcctcttcccagaagatagtccgctgaggctggagaagcgttgtgatctctttgccagttatttccttcttcctaaattggcgcttatcgaagagttgggctccaagaagcgtgagaagataacgctggaggagatgattgacatcaaggaactgtatggcgcatctctcgctgcttccatcatcgccgccagggattacggcatcatcaccaccgagtataaacgggcatggtatgccgagcatatagagcctaatccccgtgaaataggtaatggccactatgtatttcccgagacattgggaagggagaagagagtcaattcgatagtagattcgtgaatgttgaatgtcggtgtaaatgtcagcatttgatgatatttaaaataggaaatactaattcttaatagtgttagatatgaaggaaaaaaataatgagcaaattgtcttcgatatgttcgaagaagtagcaaccgaaagcatcgctgaggctcggaatgcattcacctatgaagaaattgatgggtgctatttggaggcgaaagagattgctgatcatgctaggaagaacttgctggagaaaatgggaggtacataaaaaacaaaactcccaccgaggcgggagtataggttttacaccttcggcaattactgccttattgtgataagatgtaggaaatcttattttctgctgcaaatataatacaaaatatttgtttatccaataaaaaggttgtaattttacagaaaattaataattaagtatataaaataatactgatatgactaaaatactaggaattgatactggtaccaatagtcttggatgggctattgtggaaaaacaggcagatgaatatcatttgcttgataaaggtgtcaacatcttccaggaaggtgttaagatagaaaaaggtatcgagtcttctaaagctgctgagcgtacggctcataaggcagcacgagtaagaaattatcgaattaaattacgtaaaattcgtctgcttcgtattttaagtgatgcacatttatgtcctccgctttcgaaagcagaactatctgcatggagactcaagaaagagtatcctaagaatgagttgtttatgcaatggcaagctaccgatgataaatctgataaaacaccatacgcttatcgacacaaatgccttcatgagagtttggacttcagtagtataactgataggcatattttgggtcgtgctttttatcatatgattcagcgacgtggctttttaagcaatcgtaaagatcagagtggtgatgatacaggaatggtaaaagaaaacatcagtaaccttactcaagagatgcatgatgctggttatgagtatcttggtgattatttctattatctgtataataatggagagaagattcgcaatcattatactgcacggaatgaacattatctggcagagtttaaggctatttgtgagaagcaggatttagataaaaatcttggttctgaggtagtacgccaaatagaaaaagccatattcgaccagcgaccattaaagtcgcaaaagggacaagttggtaaatgcgtgtttgagaagaacaagacaagatgtccttcttcacatcctatgtttgaagagtttagaatgctctcttttatcaataatataaagattcaaacgccaaatgatggtgcattacgctctttgtctgccgaggagcgagaacttatcatgcctttgttcttccgcaagtcgattataaaaaagaagcagtttgtttttgaagatattgcaaagaaactggctcgtagggaactgtatgggttttataagaagagcactgatgtcgaaatgccatatcttttcaatttccctatggatacatctgtttctggttgtcctgtaactgctgctctgatagatatatttggggagaattgggtcgatactctttgcgaaacctatactcttgctgagggcaaaagtcgattggatattgttaatgatatctggcatgtattatttttctatacagatgaggcaaaacttgcagtgtttggcaagaatcgtctgcaattgaatgatgaagatgcaaagaaattcagtaaaataactctacagaatggctatggacgattgtgtttaaaagtaatttgtaaaattctaccttatcttagaagaggattagtgaaagatcatgcaatctttttaggaaatttatgtgaagtgatgccgcaatacgaatgggatataaaggaaatgcgtattgctgccattgataatatcatccgcgaaataaataagacagatactaaagacgaaagtactttagagaagcgtatcaaattagagaagcgtatcaaagaatatttgaaaaatcagtatcatgtttctgatgataagcttaaaaagttataccatccttctaagatggataaatatccaagagtattgcgtactaatgatcatggtgtttatcagcttggttcacctcgaattgattgtgtgcgtaatccaatggctatgcgttccatattcagattgcgtaaattggtaaatcgtttgttggaagaggggaagattgatcaaaatactgaaattcatatagagtttgctcgtgaattgaatgatgctaacaaacgtcatgctatagcagcatatacgaaagagaatcaaaaaacgaatgatgaggctcgcaagaaaataaaagaactctttaaagatgaaactggaaaagatatagaaccaaaggatgatgatgtcttgaaatatgtgctttgggaagagcagggacatatttgcttatatacaggtaggcagattgctatttctgactttgtcggaacaagtcaaaagtttgataaagagcatacgattcctcgtagtgttggtggtgacagtacaagaataaatttgactctctgtgatagtcgtttcaatagagaagtcaagaaaactaagttgccaacagaattgcctaaccatgatgaaattatggcacgtattaatgactggagagaaaagtatgagtctcttgatggacaaatacgtaaattgaagggaaaatcaaagggggcaacaaccaaaaagcaaaaggatgacatcattagtaagcgtcatcttttggaattgcaacgcgattactggcgaggtaagtatttacgtttcacgatggaaagtgtacctgatggatttagtcgtcgtcaaggtactgatatctgcgtgatttctaaatatgcacgtctttatttgaaatcccttttcaagcatgtctataccgttaaaggtattgcgacttctgattttagaaagatttggggtatccaaaaggtatatagtaagaaggaacgtgtaaatcatgttcatcattgtattgatgccatcgttattgcatgtatcggcttagatgaatataataagttgggaacatactatcatgatgaggaaaatcatgaatggtatggcatgtcaaaggcttattttaaaaagccttggtctacatttgttgaggatattaaaagggtgcaagatgagattttggtttatcattatactccagacaatatgccaaagcaaggacgccgcagaattcttcttgatgtagagattaatggacgaaagaagaagaaaaaagttctttgtaagggtgatgcagcaagaggttcgttgcataaagatacttattatggagcaattatgagatcgggtgaggatacaccgtattatgtagttcgtaaaaatgttgataatcaccttagtgatcaagatattgaaaatattgtagatgatgttgttagaggaatcatacaaaatgcagtagctaaaggcggtaaagatgcattaaatggtacgatatggatgaatgaagaaaagcagattccgattaaaaaggtaagatgtataacttctgtaaaaaatccattaagtttcgaacatcgcaagccgcgtgatatatctaataaatgctataagaatgattattatgtagctcctggtgataataattacttaatggcagtttataaaggtgtaacatcaaaaggaaaagtaaagtatatgtatgaattcattaatatgcttgatgctgcaaaattctataagcaaagcaacgacaaagtactagttgatggaaatattgtacagctaaataaagatgggcttaatttgtactatactttaaaaaagggaacgatggtactgctttatgttgacaacccagatgaaatctgggaaaacaacggtgattggagtcgtagactctataaagtaacagaactttggaaggctggtcgaattgttgtaactaagcatactgaggctagaccttcgtcagaagtacctaaagttaccaaaggcttctgtataggagattctaagggactgtatagttatagtaaattttcggctttagttcaaggctatgatttcgagataaatgaattaggtgaaattaaaagattaagataaaaatgattaagcaaacattattcttttcaactcctgtatgtctttcgctcaagaattgccagattgttatctcttggaaagattgcgacgacaagataacacgccctattgaagatatagggtgtgttgtcttggaaaatcaaatgataagcattactttaccgcttctcaacgagttggtaaagaataatgttgctgttattttatgtgataccaagatgatgccaacatctatgttgcaaagcttagatgctaatactacgcaagctgaaagtttaaaatttcagcttgctgttactgagccaatgaaaaagcaggcctggaaacagattatagagtcaaaaatagcaaatcaatccgcagtcttgggacttgctggtaagaataaagatattctcaaaccttattataataatgttaagagtggagatcctgacaatagggaggaattagcggcaaaggtgtattggaatagccttttaggtaactctttcaaaagagaaagagaaggatgtccacctaatactcttctaaattatggctatgctgtattacgtgcagctgttgctcgtgctttgctaggttctggtttgctccctaatttgggcatctttcataaaagcagatataatgcttttcctttagctgatgatgtaatggaaccatatcgaccatttgttgatgaaatagtttttcgactttatggcaatggaattactgaactgaataaagaatcaaaggcagagataatgcgtgtgttgaattgtgatgttaatataggaaaggttaagcgacctttgcagattgctttgaccataacaactgcctctcttgtgaaatattattctggagaaatcaaaaaaatttcattacctattatgacatgacagaagatagactaaatgcttatcatataatgtggttatttgtatttttcgatttacctgttactacgaaaaaagagatgaaggcagcttctctcttccgtaagaacttggaaaaagatggtttctccatgatgcaattttctgtctatatccgtcattgtgcatcaagggaaagtttggaagtgcatgtaaaacgggtaaaatctttgcttccggaggcaggaaaagtaagtttgttaagtgtaacagataagcaatatggagatatctataacttctggggtaaacccaaaagtattaataagagtaaaatatcgaaaaaagttatcagcgaacctattcaattggagtttttttagtacttttgcattagaaattatatcctgcacgccatttcttattagaagaagtgattgatatatgttgtgaatcagcatgttatattctataggttgtggtttgatgtaggaatcaaaagatatacaacttgccagtcaccacattgcgcatagtctgagttgtggtttgatgtaggaatcaaaagatatacaacaacccattaagcgacccggacacacagacggttgtggtttgatgtaggaatcaaaagatatacaacccatatatcacatagtcaatggtaagatagttgtggtttgatgtaggaatcaaaagatatacaactagttcttcaccaataggaggaacataaagttgtggtttgatgtaggaatcaaaagatatacaactttcaaggtgcagaaggtagataataaaagttgtggtttgatgtaggaatcaaaagatatacaacccgtcaacggtggttatgtggtagtacttgttgtggtttgatgtaggaatcaaaagatatacaactcgttggggtgacaagtattggtgctacgagttgtggtttgatgtaggaatcaaaagatttataatgtggatatatgggggcaaatgttttggggcatatgcccgtggttattataatacgatcgtatgtaaggaagaatttttcccctacgtacttctcctctttccatgagagaagaaaaaactgaaccaacagaagtgttttctggggagatttaggacgaaggtttaaagcgtacaaagaaagtgttggagaaaatagaaaacggctaaagtactctgtaaaactattcttcggaactaagaaacaccatttgcccaatagataagaaaaacaatgctgatgtgacgataagggccaacacgccgtagattgattggggattgttgacacagtatcctatgcaggcaacccaaacagcgaaggacaaaaggctgttgtcacccaacgctcatatttcttagagtgcttcgggggagtatcttcgcctactacttcaatgctaacgatttctacctttatttcatgttcgggcttgttcgattcttcgttgttgtttgcagcgtctgatatgctgttgttgttctgataatccttttccataacgcttagtttgaatgtttacgccacaaagatactaaaaatattgattacttcgtttttttgtacgaagaattttagcaaaagaaataaacttaacgttaaatagactttgtaagaaaaaagtggtttgtcggaaattccgacaaaccactcaccatggtgctttagaggggaaaacacagagcttccaatctgcatcgcaaaaagtgcagaaattgagtgtgattcaggaatgtttagtaaagaaattagtaaaatcgggctgtttttcttaatttaactctgaaatagagtggaatatcagagaaaatctataaatttgcatccaaatacaatattttgtaaagaatggaagatagagaactgttgctgaaaagtgacccagagttcgaacgcctcgcctttacggtgttggctatcgaggcttcggcacaaaaaatgggtatatcgccgtctgaaatgagaaagcgattggataaggtgggactaatcaagagtctcattcaagattgctatgatactctacatacagagagccgggaagctgtagcaaatgatgtggtcgaagctcttaaaaattgggaaagaaaagaataatggaaaagcaaatattatatcatggttcaaatgtcattgttgagcatcctttagtaagcattggaagaaaggacttggatttcggtccaggattctatcttacgcctttgtttgaacaagcttccaaatgggctggtcgtatcaagaccatcagacgagccaagcaagctatagtgaacacctatgagttcgctctaccacaagacagcaaggtaaaacgatttgatgcttacgataaggaatggctcgacttcattgttgacagcagaaaaggaaagcagccttggagtgggtatgacatcattgaaggaggagtggctgacgaccgtgtaattgatgcagtagaagcctatatcaatggttatgcagatgttgagcatactcttcgccagttggcttatcacaagcccaactatcagatttgcattttaagccaggagatagttgataagtatttacaattcaaatcatatggaaggatataattatgttggatttcttattatggaataaaatcgctcgtatcataaagcaactagctgatacgttacatatatcaaccgacagggctttacagatattctatgactctgacgtttgctgtatgctacatgacaaagaacttggcttgcatctaatgagtgatacatatattgtaaatgacttgatagaagagctaaggaataagcaatagcaaaacgatggataattagaggaggaagattatttgtactgtagcaccttgactgtatgtttagtacggtcaaggtgctatctttatgtaataatgtgcaaatgtgtctccttcagctatcgcattcgactcctccggtcactgcattcgactccttcagctatcgcattcgtctccttcggtcactgcattcgtctccttcagccactgcattcgactccttcagccaccgcagccgtatgtgtcaactcaatgaagtagatgaactcgtgaaatgaagtggatgagttcgcataatgaagttcatgatttctgcacaattgccaatacatgcgaatggtaaagtaaaaagaagtttattcctacctttatgattcttatacgaaaatgtttttctgtttctattgccacatctgtcacctttggtttaactcgctgattataagtgaataatgcgtggcagtaagcggtatttctgttgccacctaatgccacgcattgccacgctttttttatgaggaaatgagatggaaggtgagcaggttatttcctaactaccagatactcagtaccaaatcttgttcttcggttcttcaaaccttcaatattctgaagctctctgcccaatttctgtatactcgaaacctggagagaagagccgaatttctgctttaaaatgtcgaaaatggcggctgccatcagatattcgccattttccggggtacttgcaggctcgaaaacctgcagaaaacattgcttgataggggaaatctgctcaaattgtctgttatgttgcatgatgatggcggtttccttggcgtcgaaataggatttttcgccacgctccagagcttgcatcgcctgcgcataaagctgttcatagttcagtctgccactcacatcgataggtcccgtcagttctactcccagaaaacggcggttgccggatgggtcggaaagaatatcggtcatgttgctcgtggcgatgaaggaggctagacgaggaaattcctgtacatgacttccgtatggcggcttgatttttaccgtaggcaactgcagcagattcttcagaaatccctgctgcacctgtggcgaaatctgattgaactcatcgagattgatgagcagaaattgtgacatcgcctgcagaacctgacgcttttctgagagaatcatgttgtcgctgaagccccatgataattcggtagggatgagacggcggcagaaggtgctcttgttgtaaccctgcttggaaataagcagcggcatggtactgttgccatattgacggcgatacatgccgcgccactggtcaaccattcccagaaaccaggtgtaaaaccagtcttcccaatgaggattgttggtgggtacggttcgtgccagggcacggatgcggtccttgccgtcccattttcccagacagtcatagagataggactctatcgggctgtagttcctgatgcggtctgactctagaaaattccttacatccttgatgcttacgtggatgtcggctatctgaacatccagcgtcatgcttttctgcacacgggcatccaccggcctgaaatcgccaacccatgagttgttcgggcggtattcggtatatttcatcacggtgttgtagcggaactggtatcggctctccaggtatctgatcatctgcagaatgtcggcacggccctttctgcctgaggctgatttctccgtcttcctgtctttggaatgggtatcgtaagcggtgcccactatctggcggagtttctcttctgtcacatgtccccagttgttgcggcggatatggatgaaagcttcttcttcgctgaggcccatgttgcagagcttgattgcgatggctgagaaaccggcaaggaaccggtcttcatcgttctgccatgagatgttggcttttttcatctcttccttcgtctcttctgctgccttgcggtagagaaattcatagtcatcgtatgtctttaaatcgtctacattcttaggggctgaggctaccctcttcatattttgtgagatgcgcatcgccactgccttgctgttataataaggagagtcatcaagcgtaagcatgaagttggatgccaatgatggcttttcgggtttgatggctgcctgtacctgcgactggtagagcgtttttacctgttcgtaggcagactggtagagtaagtcggcgtcggcttcttttgtcgggatttttccttcttcgttgcagatgcttacgagcacaatgaggcttctgccgtcggctccttcaaaggcagcgaaggtcatcggcagcagactgaccgtcttcttgacggcatctttttcctggtccgacatgaggttgatgaagtggagcatcaccagcccgtttgatttctggaagacgagattgccgctttcatccttgttgaattctgcggctggataaacgtgctgccattccttgatgcctttgtagtactggtagtcggcctccatgagcggcacactcattctgaaattggtgacactcagcttggcatcatctttagcgatgcgctccagaaaccgttctacggttttcgaactgaccatcagcttgttctgtttgttgattcttgtaatagtaaacttcatatttctgctaatttgttgatagggtgatacttagggttgttgatgactttgcccagctttgcccgaagcgttgggcaaatgtgcccggctacgctggtcattcgtgaccttcgtgtcggtcatccgtgctcaattgaagcaatagttccatgagttgtaaacatctcctttagcgaagtagagcctgattaaatctgcttgtgtcataggtttttggaattaaaattatataaaaagtggtttcacaggagtcgtaagcttctaggtggaatcggcaggaatttttcctgttggttgcaaaaatacaaaaaatgttcgaaaccgcaagcctttttctccacttttttaatgtttttctgcgaaaacaataagtattcctctgctttttcgctgagaatcccccgtttttcgcccgagtgtggcaataggtgataatagaaaatgcccttattgcaacgcttaaatagctaaaaaaaccaattggttaacttggagtgtgacaatggtgacattagttttagaaaaattttctcatacataggctttcctcttttactaataaatgttatattcccgccattccttttccaaatcatttgttttctcccgaatttacagtacttttgcagaaagtatctaattaaagattaaaagtgcgatttaaaataaggtgtagattatgcaatacaagaatatcatattcgatttaggtaatgtcctggtgaaactcaatccggaaggatgcatcggggctttcaaggcgatagaaatgggggaactggcgaatccgaatccccagagtgaggggatgaagctgatgagcaaactgggtgtgggaatgattaccaccgaagcattctgcgatgcagcccgtgagttgactggagctgatgtgacgaatgaagagatcatcgatgctgccaacaagatgctggtggagattcctgatgagaaaaagaagcgactcctgcagttgaagaaggctggttaccgcctcttcctcttgagcaataccattgatatacactggaattattgcgtggagcatctcttcccttatcagaaccatggggtagaggattatttcgagcactgtttcctctctcagcgaatgcatttggctaagcctgatgcccgtatctatgaagaggtagtcaagcaggcgaacatccatcccgatgaaaccctcttcttcgatgatctgaaggaaaactgcgaggctgccgagaagctgggcatccatacctttcagaacgtgaagttcgatgattggctttcacttcgattctgacggatatgtcagaatcgaagtgattcgaaaaaaatatgaatttcttcgctttttccaataaaatgttatacctttgccaactcataataactaacatacaatatcaaaatgaatttttacaagacattaggattgaaaaacagccgtattgatgtggctgatgccttgcgaggattggccgtagcaggtattattctctatcactccgtggagcatttcaatatgtacgatggaaacatagtacatgtttatacgctggggtgtgatgattggatggcagatgtgctggcattgctgctgtcgggaaagatgtatggcatctttgccctgctcttcggattaagcttctttatcatgaatgataatcagcagcagcgtggaaattgcttttcgggtagattcgcctggagaatgttcctcctggcaatgctcggtatcgtgaacaccgccttctttgatggcgacatcctcttctcctatgccatctatggactggttctcatcccattgagttatcttcctaccaaatggctctggtgggtggttgccttcctctttatccaaccgatagaaatctattccctcatttcgggatggcaggtagatgcatcgtcgttgggagaggtgtatggaaatatgtataatggtcatcagcacggcagtttcctggagaatgcttatggcaacctgcgatacgggcaggtggctacttattactggtgtatgatgaagggaagacatacgcagactatctgcctcttcatactcggaatgctggtgggtagaaagcgttggttctacaatgagaacaacaacctggctttgtggaagaaggtgctggcggtttccatcctggtattgattgtgggaggcatagctgatgtgcgccacatggaaacatggaacaattggctttatcctatctacaacttcttcatcctctcgtttgtagtatcaggattcgtattgttgtggtacggaaaggaatggttcagaaagggattgtcgttcctgcgccagtttggcaagatgagtttgaccaactactttctccagtctatcatcggttgtggactgtttgcttattatggctttaatctccagacgaagctcggcatcacctacgctttctttgtgggcatcgccatggtggtagtacaatgcctcttctccaacctctggctcaagtatcactcccatggtcctttcgagggaatttggaagaagctgacctggattaagttctaaattttcaagtttactgtaaaactggagactccagttttacagtcttatcccatatttccagttgccttcattcatcatctgcgctggcataaattctttcatgctgttgatgatggtgttaagcatccgttctttgatatagtcttccctaatgtatagggagatgcgtctctgggaaagataatctccttctatctttcttacattcttgcgttgtgcctcatttaggaattcgaggtgcatctctggaatgatggtgaacccgccgttctcatccacgatgcgaattaaagtttctatgctgcctgactcatagatgtggtgccctttgctccttgctttacagaaggagaaggcactatcgcgaaggcattgtgcttctttcataatccacatgttctcatgttccagattctctggcttgaacacgggcagcttgcgccagcagtcttccgataaatatacataaaagcgttctgtgtaaagcggaatctcaagtattcctttacgaggtaggtctgaaatagcaatgccagcatctatttctccatcttgcaaaacatgaaacatttcttctgatttcatctcttgaatagagaggtttacttcaggataatcttttctgtaatgcttgatgaatttgggaagaatgtaaggagcaatggagggacctacggagagagacagagatttgccaatctggttcttttcttcagccacgagttctgtgattttctctagctccaaaagtgtctttttagcttgaaggatgattttctctcctgcactcgttggtgttacctgtttgttggtgcggtcgaagatgcgcacatcgagttcttcttctaacttcagcagcatggcgctgagtgtgggttgggaaatattgcacgagtctgccgccttcgcaaagttgcgaaagcggttgattgctacgatatatttgagttgttgcagattcattttgctttgagttatcttgcttgaaattatcttgctttgagtttacatatcagctgtgtcatgttgcccataggacagaacacgcaccaggttcttggacgatagataatggtgagcagaacgcccacaatcagcgaggtgagcatgatgccgtagagaccgaaggcaaactgcgccttccatggctcaatctctaccgggtaagcccaatg

SEQ ID NO: 4179 - DNA, 23654 bp, synthetic construct
  misc_feature 1..23654: note = Synthetic
  source 1..23654: mol_type = other DNA
gttcaaggtgctaactctatgattttccaattgggaaagacagacgtagagcgccgattggtagtaaactcaacgggtcgtaaatgggaatttacctttaccacgctcgtaacctttggtggtgcattctttgcatcgttcccactcttttacagtacaagtttcggctctgcttattgggtatgggttgccattcttttcacttttatcattcaagctgtaagctacgaatttcagaacaaagcaggcaacctcttgggtgtgaaaaccttccaaacttgcttgattatcaatggtatcgttggtccattgctcatcggtggtgctgtagcaaccttctttacaggttccaacttcatcgttgagaaagccaatatcgtcaatgaaatgcaacccgttatctcgcattgggcaaacggctcacgcggtttagacgtattgttgaacccttgggtagttgttttcggtatcgcagtggtattcttggcacgtgttttgggtacactctacattcataacaatgtgaacgacgacgctatccgctctcgcgtgcgcccacaactgctcatcaataccgtcttcttccttgttttcttcctcgctttcttggtgaaaacattgctcggcgaaggctatgcagtcaatgcagaaggcgttatcgtcatggaaccaatgaagtatttgaacaaccttttggatatgtggtacttagccgttatccttttaataggtgttctcatggtactctatggcatcgtgcgcaccatcatgcaacctactttcattaaaggtatttggtctactggcatcggcgttgtcctcgtagtcatcgttctcttcctcattgcaggttggaacaacaccgcctactacccttcaacagccgatttgcagagttcgctcaccttgcaaaactcaagttcaagcgaatttacattgaccgccatgttctatgcgagcctcattgcaccattcgttctcgcctacatcttctatgcttggcgcagcatcgacagcaagaaactcgataaagccgaattgggcgacgacaaacacgcttattaaactcgttttgggtgcgtaggaacgtgattttttcacaagctcaacagctcgtattacgttcctaacaactcaaaaacaataatgaaaaacgtggaaaatggactttgttccgttttccacgtttttttgttaccataatctggtgtgcggaacggatacgagttgttaagtttgtgaaaaacctccgcccctacaccttttttatatataggctgttttgcgctttaaaacaataggttttggaatgcaaaacagtaggttttgaaaatcagaccggttatcctgcaatttatcccatatttttgtgcaaacgataaaaaatgtaagcatacctacaaataggcattggagggatagaaaatgccctcgttttgtaatccaaagattgcaattattggtgtataatcttaaaggcgatacctaaaagtaggtattgagtgcataaaactattcgtttttgcacatcttaaaagacttgtgcaatgaaaaatacttaattataagtattgtcaaaaaaagataaaccgagtacctttgtaacctaaaaaataataaccagaccaagtatcccattataaggtactcggttaaaaaatttactaaattacagatattgttatgagagaagaatggagaggtttcacaggcacaaagtggcttgatgaagttaatatgcgcgagtttatccagtcaaactatactggctacgatggcgatgcagaatttcttgcaaatccaacagaagctactgacaagctttggggcagattaaaagaactccaaaaagaagaacgcgctaaaggcggtgttctcgatatggaaacagaaatagtttcaagtatgacagcttatggtgcaggctacattgacgaaagtatgaaagaccttgaaaaagtagtaggtcttcaaaccgataagcctttgaagcgtgcctttatgccatatggtggtatcaagatggctgaacaagcatgtactacttacggctaccaaccatcagaaaagctccacgaaatctttacaaaatattgcaagacccacaatgatggtgtgttcgatgcttatactgacgagatgaaactcgttcgccacaaccatattcttacaggtcttcctgatacatacggtcgtggacgtatcgtaggcgactatcgtcgtgtagctctttatggtatcgacttcctcattgcagagaagaaaaaagacttgaagaactgcggttgcggcgaaatgcaagacaacattatccgtcttcgtgaagaaatttcaatgcaaatcaaggcgttgaaagaaatgaaggaaatggctaagatttatggttacgatatttctaaccctgctaagaacgctcgcgaagcagttcaatggctctattttggctacctttcagctatcaagacacaaaatggtgctgccatgtcagtaggtcgtgtgtctactttcctcgatatttacatcaaccgcgaccttgaagaaggtacattgaccgaagaagaagcacaagaattgattgaccacttggttatgaagttccgcatggtgaagtttgctcgtattccttcttacaaccaactcttctctggcgacccagtttgggcaaccctcgaaatggctggtttaggtatggacggtcgccacatggtaacaaagaacgacttccgtttcctccacacattggaaaacatgggtccttcaccagaacctaacctcacagtgctttattctccagctttgcctgaaggtttcaagaaatatgcagcaaagatttcggttaagacaagctctattcaatacgaaaacgatgaagttatgcgtccagtttggggcgacgactactcaatttgctgctgcgtttcagcaacacaaacaggtaaggaaatgcaattcttcggtgctcgtgccaacttggctaagtgcttgacatacgctatcagcggtggtgtagaccacaaaacacgcgaacaatgcggccctgcgttccgtcctatcgaaggcgatgtagtaacttacgaagaatttatgccaaaattcatggatatgatggaatggttggcaggcgtttatgtaaacaccttgaaccttatccactacatgcacgacaaatatttctacgaagcagccgaattggcacttattgataccgatgttcgccgcacattcgcaacaggtatcgctggtttcagccatgttgtagactcaatttcagctatcaaatatgctaaggtaaacatcgttcgcgacgaaacaggtttcccactcgaatttaagaccgaaggcgagttcccacgctatggtaacgacgacgaccgtgcagacgaaattgcagtatggttgctcaagactttcatcagcatgataaagaaacaccatacttatcgtgattcagaaccaacaacaagtattttgaccattacctcaaacgtggtttatggtaaatatacttcaaatatgcctgacggtcgtcctgacggtgctccattggctccgggtgctaacccatcatacggtgcagagcaaaacggcttgttagcttctttgaactcagtagcaaaattgccttacgaatatgctttggacggtatttcaaatacacaaaccatcgctccaagcacattgggtaaggacgacgaagaacgtacaaataccctcgtgggcgtaatggacggatacttcagccgtggcgcacaccacttgaacgtaaacgtgttcggtgttgaaaagctcatcgatgctatggaacaccctgaaaaggaagaatacgctaacttcaccatccgtgtcagcggttacgcagtgaagttcatcgaccttacacgcgagcaacaagaagatgttatcgctcgtcaggctcacgctaaaatgtaagcattgatttaagtttttaaaatattaaaaagataattgggcagctgcccaattatctttttcatattgagaaagtcagacaggtccgacaagtccgacaggttagacaaaactacaaacattatggcagaaatccccacaatcgacatctccaccgagcaaaccatcaacgctgatggcactcacaccgctcgtgtacactctatcgaaaccttcggctcagtagacgggccaggtattcgcttcatcgttttcctcaaaggttgcgccatgcgctgccagtattgccataatccagacacatgggaaccaaattcagacaccctcaccaccgccgacgaactcttagaaaaagcactccgatacaaaagctattggggcaaaaacggaggtatcaccgttagcggaggagaatcgttgttgcaaatagacttcctcatcgaatttttcagaaaggcaaaagcaaaaggcataaacacctgtttggacacatcggcacagcccttccgccgcacaggtcagttcttcaagaagtttgaagaactgatgcagtataccgatttgctgcttttcgacattaaacatatcgacactgtcgagcataaaaagctcacagggtggggcaacgagaacatactcgactgcgctcgttatctttcagaaatcaataaacccatttggctgcgccacgtcctcgtgcctaccattaccgacaacgatgaatatctgcaccgtttgcgtgcttttatcgaagaattgcacaatgtagaacgcatcgaagtgctgccttatcacacacttggcatttataaatgggaaaatttgaacctaccttacgccctaaaagacataccagaacccaccccaaaagcggtggaatatgctcaacgagtgttagaaggaaaagcataaaaagataatttttattaatcttctgttcataaccttttcttgttcaaagaatttctatacctttgttcccataattgggtcaattctatttaagaatgaaaaggattattattgctattagcctgttatgcttgccatttatacttttaggacagaataatataggaacaaacgacaacgaacaagcaaacgaaatagcgcacatatcacccccaaaaactccagcggaaaggaaaaagctgtatgagtctttggcaatcatgggcgatgctgtgagccaatataaacttgcgctttgttatgacgatggaatcggtgttccacaaaactatggtgaagcgctgaaatggtatcgtaaatccgccgaacaaggagtgccacaagcacaacacaacctcggttttatgtacgcattgggcaatggtgtacgacagagttggaaagaagccgcaaaatggtttcagcaagctgccgaccaagaccatacattggcacaattcgccttaggctcatgttacgaaagtggcaatggcgtagaacaaaattatgtagttgcagcaaaatattttagagcagcagctgcaaagggattgctgcccgctgtcaatgccctcgcctcattttattttgaagggacaggcattgtgcaaaactatgaagaagcactaaaattataccgtcaagccgccgaacaaggctactcggaatcacaatataaactcggagtttgctaccaaaaaggcacaggagtgaaagccaatataaacgaagcactgagatggtttttaagggctgctcaacaaggatatgcccctgcacaaaacgattacggcacttatttcttagatgagaacaaccctaaaaaagattatcctaccgctttgttctggctacataaagctgccgaacaggaaaatgcacaagccatgtacaacattgccgtaagttacgaaaacgggtggggcgtagcacaaagcttagaaaatgccataagttggtatcgaaaggctgcattggcaggcgatgccgatgctatgctgcaaatgggattggcatacgcagacggaagaggcgtgaaacaaagttggacagatgccactcaatggcttttgaaaggagcagaagcgggcaatgcggaagcccaatcctactttgccttgtgtcttttacaaggtaaaggcatagcaaccgatgctaaaaaagccgtaaaatggttggaaaaagcaatagaacaaggcaacgcaatggcagctaacaatcttggattttgctatctcaacggatttggtgttgaaaaagataaagaaaaagccaaatattattttcagaaatcagccgaaatgggctatgagttggcaaagaaaaatttaaaattcataaaataaaagtgtggtaaatttgctcccttatgttcttgtaagaatacattttttaaagaaaatatatacaataatttgcagtttatggaatttttatttaactttgcttcatcattttttcaaaaagccataaaatgaaaagaaaagttatattgtttgcagcgttgcttttgccccttttcgttttagcacaaagcaatttaggcaaggcggacgataaaaaaacagatgattttgtacacgaaaactattttggagggtttacacctgaagaatttcaactctataaagatgctgcaaaggctggcgatgttgatgcacaatacaacgtgggctactgctacgagaatggtgaaggagtggaacaaaactatagcgaagccgcaaaatggtatcgtaaagccgctgagcaaggactctctgctgcacaacatggcttaggatttctctatgcctacggtcaaggagtgaaagagaattggacagaagctgcaaaatggtttagcaaagctgcagaacaaggctacggactgtctatttttgccatgggagcttgttacgaagacggcaatggagttccgcaaaactttgtagaagccgcaaaatattaccgcaaggcagtggataaaaatgtggttgaagcctacgaagcactcggacgattttattatataggtggtggcgtgccgcaaaactatgaagaagctgtaaaattatttgcgaaaggagcagctttgagaaaccctaatgcgcaatattatttaggactttgctatcattttggcaatggaatcaaggctgataccactgaagcggtgaagttgtacttgctatcggcagaacaaggatttgctcctgcacaaaacgaattaggtaatttttatcttacagacccaactcataaagattacaaaaaggcacttgaatggctgaataaggcagttgcccaagacttgcctgacgcttttttcaacatggcactctgttatgaagaagggtggggcgttgaacaaaatttgaaaacagcggtagagtggaatcgcaaagctgctttagcgggcgatgctgaggctattacaaaaatgggaattgcttacgaagaaggaaaaggtgttgaacaaaatatgaccgatgcggtgaaatggtacctgaaaggtgctgaattaggcaattcggacgcacaaaccaactatgctaagtgtcttttacaaggcaatggtattacgcaaaattacacagaagccataaaatggttggaaaaagctgttgctcaaaaaaatccaatcgctattaataacttaggattttgctatctcaatggatttggtgtaactgccgaccttgaaaaagctgagcaatattttcaaaaagctgccgatatgggctatgaattggcaaaggaaaatctaaaaatgctaaaataaagaataatgaagaaattctctactatccttgtgttactctttgtcagcaccattgtgttggcacaagacttcaatcgctattttattgatgccacattgcgcatcgattacacgtttattggcaatataaagcaacaacatattgccgttgatgaactctgtaagatacctcgttggtatggtaaacatcagcgattgagcgaattacctgttgaaggaaatggacaaattaccgtccgcgaccacaaaacgcaaaccattatttaccgtaattccttctcaactttattccaagaatggctctcttacgatgaagcaaagacagcgacaaaatcgtttgaaaacgttttcctcgtgccatttcctaaagatacagccgacatcaccatagaattgcgcgacaatcgccgttctgtgatgacacaactcacccatatggtggtcccaaacgatattctaattcgtaaaattggggataaatcggttacgccatacgaaaccttgcagcaagcagccgatacttctcgttgcattcacatcgcctatgtggcagaaggatataccgaagcagaaatgccaaccttcctaaacgactgtcgcacagctatggaagcactctttgcgcacgagcctttcaaaactttacgcaaccgctttaacgtggtagccgtgaaagctccgtcagccgaaagtggcacttccaacccaggaaagggcatttggaagaacaccgcactgcactctaatttcaatactttttacagcgaccgctatctaactacgttgcatctcaaagatttgcacaattggttggcaggaactccctacgaacacatcattgttttggtgaatactgacaactacggagggggcggaattctcaattcttacaacctttccatgacacatcaccgtgcgttcaaacctgtggtagtacacgaatttggacattcttttgcaggattggctgacgaatatgcctacgactacgaagccattccaatgtttccccacgacattgaaccttgggaaaagaacattaccactatggtcgattttaaatcgaaatggtcggacatggtgaagaaggggacaaagataccaaccgagcagcctgccgacttagataagcccaatgccaagaaagaaaagtggcaaattggtgcttacgaaccagctggttacagtatgcacggcgtttatcgtgcctatcccgattgccgtatgcgcaccaataacaaccccgaattttgtcctgtttgccagaaagcaatcaccgaattggtgaagttttacacagaataaatcaattttgccaaccctaacagtctgatagcctccctcaacactccgttgggaagaaagaagcctcccccaacccctccgttgggaggggagtgcaaatagatagttggtggggcaggtgggaattggcagatgggaatagtcggacaagtctgaaaggtctgacgagtcggacacagcaattgatggtaggttggtggctaaatggtgcaacaaataaaaaaactcccttctccacgcaattatggggaagggagttttttatttttcaactttgttgagccttctgctccgcaagtttttttgacctctacgctttattttgcagcgatgcactcaacttctaccaaagcattctttggcaaagtctttacagcaatggctgaacgagcagggaatggttcgttgaaaaattcagcataaacttcgttcatggctgcaaaatcgttcatatcagagaggaaaacagtagttttcatcacgttagcgagcgagataccagcttcttcgagaatagcctttgcgttggtgagcgattggcgtgtttgttctttgataccaccaggagcaaattcgcctgttgcagggtcgatagggagctgaccagaagtgataactaacccgttagcttcaattgcttgactgtaaggaccaattgcctttggtgcttttgctgtgtttataactttcataatctttggtttttatttgtttttggttttcttttttattgcctttgtttttcttttttgtcgccttcggtttgtgttgaaccattgtgccgtaggttttcatggcaaagttaataataaattgtgagttttgcaaagatttttttgtttgcttttttgtacccatataccttttttcaacctattctgtaaaaaaatagaaggtgtgcttcaaaaaagcacaccctcataggtttgaaaacctgcggcatatagccttattgtgataagatgtagaatatcttatgctgcaaaaataagaattttgtttggaaattgcaaatattattactatttttacaaaaaataattataatcaatggaaaaacaacgaatattaggattagaccctggaacaaatagtttaggttgggctgttcttgattttgataattcaaagcaagaatataacttagttcgcaaaggagaagttatttttgaagaaggtgttggtaaaagcgaaaggggcgaattttctaaagctgcctatagaactttttacaaatcaacgcgtaagcactattttcgccgcagactgcgcaaaatagaagtgctaaaagtattggttaaatatgatttttgcccatatctatcagacgatttgttaaaacaatggcacgaaaagaaaatttatccagcagttaaagaatttatggattggcagcgaaccagcgatgcagaaggaaaaaatccatactatgaccgccattgctgtttgaacgaaaagttggatttatcattaaaatcagatagatacattttaggaagagcattgtaccaccttacgcaacgaagaggttttaaaagcaacagattgatacaaaataatgatgaaaatgaagaaggaaaggttaagaagggtatttcagaattaagtacagaaatgcaagaagccaattgcaactatcttggagattatttctataaactttataccgagaaaggtaatactgtgcaaattcgcaaacgatatactgacagagaaaagcattataaaaacgaatttaatgctatttgtgagaagcaagaacttaacgaaactatcgtaaaagaattagacaaagccatcttctttcaacgtaaattgaagcctcaaagacatggtgttggtaaatgcacatttgagccaaataaccgccgatgcgcaatttcacaccctgattttgaacgattcagaatgctatgctttatcaataacatcaaaataaaaactccgtttgaagaaaatttacgccctttaaataatgaagaaaaagcattgatagaacctcttttttatagaaaatcaattaaaaactttgattttgaggagattgcaaaaaagttggcagggaaaaataattactgttatataaaagatgattcttcaaagcaatataaattcaactatcgcatgtcgcaaggtgcttctacatgccagaccattgcaaagctaaaatctatttttggtgaagagtggaaaaatggtattgcagaaacatatactaatagaagaaaaaaggaagggcttaagaaacaagctgaaatggttgatgatatttggaatgttctctattctgtgtcagaatgcgatgtactaaaagattttgcaataaataagttacagcttgacgaaaaaactgcagacaatttttctaaaaccaaattagcacaaggctttgctacattgagtttaaaagctatcagaaaaatattacctttcttagagcaaggttttggctacaccgaagctgtctttcttgcaaatattcctacagttgtaggtaaagaatattggaataacgaagatattcgtaatgatattatggaagaaatcaagactatattttatcataatactttaaagacaaacgattcacataataccatacttttttgtattaaagatattttaagcaataattttgatttagctccaggggcaatagataaactatatcacccatcaatgataaatgtttataaagatgttatacccaatgaagatggcattcttcaattgggttcaccaaaaatagatgccgtcaaaaatccaatggcaatgcgttctcttcatatcattagaaaagtcgtaaatgaattattaagagaaggtatcatcaatagtgatacagaagtaagaattgaatatgcaagagaattaaacgatgctaataaacgtcatgctatagcggattggcaaaaaaaacaatacggaaagcatcagaaatatagaaaagaaataaaagaattattcaaagctgaaacaggttttgaaattgaacctaatgaaactgatattcttaaatttgaattatgggaggagcaaaatcatatttgcctatatacaggacaagaaatcggaatttccgaatttgtaggagaaaatccaaaatatgatatagaacatacttttccaagaagtttaggtggtgatagtacaaaaatgaatatgacgctctgtgaaaataaatttaatagagaaaacaagcaaaagaaattgccttcagagttagcaaaccattccgaaattttggaacgtatagatgattggaaaaagaaaatttatattttgcaaaaaaaatatgacagcatacgtactcataatggaatggacaaagaaaacaaagataaaaaaattgtgagtaggcacaaaataaaattggagttagactattggaaagggaaatataaccgctttacaatgaccgaaataccagagggatttagtcgcagacagggtatgggtattggattaatatctcgctatgcaggtttataccttaaaacaatattccataaaaaagataatccacaaaagtctaatgtttatatcgtaaaaggatctattacggcagagtttcgtcgtatatggaatatacaagacgattacgagaaaaaatgccgcgataaccatattcaccattgcattgatgctattgtggtaggttgcattggaaaaagagaatatgacttaatggcgcaattttatcgagatgaagaaaaatatagatgggaaaagaagaaaaaacctttcttcaaaaagccttgggaaacatttactcaagatatgctttcattgaaagatgaagttcttactgtacattttaatccgagcaattttactaaaaaggcacataagaaagtctttacaccaaaagggatatttgttgctcagggagattgcgcacgagtaaaacttcataaaggaagctattttggtgcaatagagcaaaaaggggaaattaaatatgttatgcgaaaagaattaagcgcattaaaaatcgaagatataaagaatatagttgatgctgtagttaaagaaaaagtacttgctgtagtaaaaaagaaaggttttaaacaagcaatggctgaacctatctacatgaacgaagataaacgcatattgataaagaaagttcgcctattcgtttcccaagcaaatcctctgattgttaagaagcatagagacctttcttctaaagagtataaacaaaattattatgttgataatgaaggaaatctaatgatagccatgtatgaaggagttaaaaagaatggaaaaattgatagagaaattacagttgtaaataatttagaagctgcaaaattctttaggcagagtcaaaaaaataatgcagaaaaacaactaatatcacatttaagtcccaaaaatggttatccattaaagaccgtcttaactcaaaaacaattggttttgatgtacgaagatagtccaaaagaaataaaattgagagatacaaaaaatatggtaaaaaggctctaccaggtttttggaatagaaaaagatggacgtgttaaactgaaattccatcaagaagcccgttccgaaggcttgaacataaatagtgcagcatttaaaatacaagatactccagaatcattataccgacatactaaatcaaatttgaaggtgttagtaaatggagtggactttaaaataaatattttaggagaaatatcattaatataacgcttatgcccaaatactgattattgttcaaaaatttgcaaagatagagaaatgagtgaatttagattaaatgcttaccatattatgtggctatttattatgttcgatttgcccacgattacaacaaaggataaaaaagaatctgctcgatttagaaaagatttagaaaaagatggctttacaatgcatcagtttagtatctatgttcggtattgtgcatcgttagaaatagccaaagtgcatataaaacgagtaaaatcacttgtacctttagcaggaaaagttagcatactaatggtaactgataaacaatattctaaaatgataaatatttggggaggaataaagaaaaaatctccttcaacacctgtacagttagaacttttttagtaaatttgcagttaaaagattatatcaagttcacttcatataacataaaaatattataactcgttgtaaaacagtttgctatgcaatgtatgttgtgatttgatgtagaatgcgcaaaagaaataactttttacttctccgcttcttcttccgtaatgttgtgatttgatgtagaatgcgcaaaagaaataacttaaataaatttattatgacttacgacaagttgtgatttgatgtagaatgcgcaaaagaaataaccgactcggctaaatcgcctgctttgtcagcgttgtgatttgatgtagaatgcgcaaaagaaataacgtcgtagcgtttctcctttaattcaagctcgttgtgatttgatgtagaatgcgcaaaagaaataacgcccgtgaagattgtcttatacattacgatgttgtgatttgatgtagaatgcgcaaaagaaataacttgcatggttcatggacatacacacaataagttgtgatttgatgtagaatgcgcaaaagaaataacaccacccataaaagcagggcagttgataatgttgtgatttgatgtagaatgcgcaaaagaaataactaattctcctggttttaaatatccgtcaggtgttgtgatttgatgtagaatgcgcaaaagaaataacaacacatcaatattaccgtctattgatgtagttgtgatttgatgtagaatgcgcaaaagaaataaccggaacagtatataaaggtggcaaagatatgttgtgatttgatgtagaatgcgcaaaagaaataacaaatttcaatatatgagcaataaagaaaatgttgtgatttgatgtagaatgcgcaaaagaaataacagttcaacgatgccagcctatttgttacttgttgtgatttgatgtagaatgcgcaaaagaaataactcgttcttcttacattgtcagaacgttgttgttgtgatttgatgtagaatgcgcaaaagaaataaccttacagatgcgctgtggtgtataaccaaggttgtgatttgatgtagaatgcgcaaaagaaataaccattccgtatgctaatgtgagggctgctccgttgtgatttgatgtagaatgcgcaaaagaaataaccccttttggcgatattttatcagagggggaagttgtgatttgatgtagaatgcgcaaaagaaataaccgttaccttttttatccactgccgcttgtagttgtgatttgatgtagaatgcgcaaaagaaataactaaaataggtatgataacaatattagggacgttgtgatttgatgtagaatgcgcaaaagaaataacctataatccacaacacggtaaagttcaatagttgtgatttgatgtagaatgcgcaaaagaaataacctcgatattgagccaattattttctgttagttgtgatttgatgtagaatgcgcaaaagaaataacatgaagtggcgcaacaaggtaatgaagtacgttgtgatttgatgtagaatgcgcaaaagaaataacccttgaacttgacggactcagcgcaatatcgttgtgatttgatgtagaatgcgcaaaagaaataacgggcggtaaataagcatacaataatcgcaagttgtgatttgatgtagaatgcgcaaaagaaataacggaagattgagaggaagtatcatattcacggttgtgatttgatgtagaatgcgcaaaagaaataacttattttttacaacttttttgggtgcagtgttgtgatttgatgtagaatgcgcaaaagaaataacgccacatgtgcacgatattacgctttaagtgttgtgatttgatgtagaatgcgcaaaagaaacaacgaacaacgttcaatagaagtgtgttacggagttgggaaacaaaagttcataggaatgctttcatgacaatattttgtaaacttgtgcttgttagttgaactcactgaaccaacatattcttttaaacgttaataaggtttaaatacacctgttggctaagataaaatttggtagtttcaaaaaaaagtactacctttgcactcgcaattcagagataacacaacatcttaattacaattgcatggttaatatcgcgggttggagcagttggtagctcgccaggctcataacctggaggtcgcatgttcgagtcctgcacccgcaacaagtttcaataagtcgctcatttttgagcgacttatgtgcgtttataagatagaattattcatgataattttgtctcagcggatttttccagttggcaaagcgcagtattgaacataaagttcatacctttgcagtatgaaatcagacgcattattacggctcagtaggaaaaatatcctcatatttttcctactgagcccttttttttctatagaatttcgtttattgctgtaacttttggatacaaaaaaggcacgaccacagtcgtgccacctatttattatataaataaccaaattgttttgagcttgattattagttcacacctcacggtgttgaactaaaatcttgcatcaaaatgtcatcctattaactaacctattaccttaataacctattgacttcctgaaaattcttttttttacttaaacaactaaatctttaaacctaaacaatctattcttataaactttacgtttgcaaaggtaaagagtattttccaatgttccaaatatttatttggaaagtttacaataactgcaataacttgatataaatcaatatatttggtgcttttatgcgtgatttatagaaagaatgacgtaagttttaggataacgaatcagaatgttaggtgataaaatagggggaatgattagtgataaaataaatttttgctaatcattttactataatacgcaaatttactcacttgtccccatgctgcaagttgccttttggttgttgctatattataaggtgcaaccgaatgtaaaccattctttgaaggcagaagggaattgggttggggcagaagggagtagggcaaagaacgcactaccgctgcctgacatctgcgcatagaaagctcccatatcgtagagcgattgtttcacgctgcgtatttcggggtaaacgctgaaaatggagtgttcaaaatcgttggacaagtggttgcgccactctgtaacagggcgtttgacaatgtctaagcagttttctgcgggtgcttttggggtgataaacgagaaggcttgagccgtagaaatagccacaggaggtttcactatgaagagataaagtccttttaagtgagccaaatcattggttatgggttgcaaaatttcgcctattcctgttgcgtatgctggttctgaggttgcaaaaaaggcacaatcggctcccaatttcgctgcataatgttgtaatttctcggtcgttagtgataggttacagagttggttcaccattcttaaagcgtaggttgcatcagccgaaccgcctcccaatcctgcttgagaagggatattttttttcaaatcgaagctaacgtgcggtaaatcgaaatcgttggctaacagtttgtaagcctttacgataagattgtcagctgcattgccttcaattttgtttccgctcatggacaaggaacaagcatttggcgttccgtccgtgatgtttgcctccaatcggtcggtcagttcaataggataaaacacagtttccaagtcgtggtagccgtctttgcgctttgccacaacgttgagaccaagatttattttacaacaaggataggttatcatactttctatttttagcttttgcgaccctcttcgtcgggcgagggcatacaaaatggcttatcgttcataggcgaagacaagttcgaggtgaatgcttcgcttaatcttctacaaagttacacaatcattatggaatatttgcgagagtttgaagaattttgattaattttgtagcgatatgccagaaaagaatagtaacagcaaaaaaagtccgaatagacgccagaccgcgcctattgacaacacgtttggacacttgcaaccgcaagcgttggacattgaaaaagtagttttgggagcgttaatgattgataaagacgcctttacggtggtatctgaaattttgcgaccagaaactttttacgacccacgccaccaaaaaatatatggggccatacagtctttgaatttccacgagcgtcctgttgatatcatgaccgttgccgaagagttgaaacatcaaggcaatttggaggaaattggtggtcctgcctacatcgtagagattagttcgcatgtggcatcgtctgcccacatcgattatcatggtaagattttgcaacagaagttcttagcacgacaattgattcaatttgcatcaatgatagaaaccgatgctttcgacgaaacagttgatgttgatgatttgatgcaaagggcggaaggcagtttgtttgaactatcgcaaaagaacatggcgcaggaatatacgcaaatagacccgattgttcagcaggcacacgaattgcttttgaaagctgcaaacaataaggatagtggcggattgacaggtgtatcaacaggctatcacgacttagataaaattacagcaggttggcaaccgtccgatttaattattattgcgggacgtccagctatgggtaaaacttcgtttgcattgagtttggctaaaaatatagccattgataaccgcattccaatggctttcttctcgctcgaaatgaacaatgtgcagttggtaaaccgcttgttgtcaaacgtttgctctatctctggtagcaaaatacttagtggacaattagacccaagcgattgggaacgatttgatacgaaccttagaaaaatggaaggcgcaccaatttatgttgatgacacgccaggattatccgtttttgagctccgtacaaaggcaagacgattggcacgcgagcatggaataaaagttttgatggtcgactacttgcagttgatgaatgctaatggcatgcgtttcggcagtcgtcaagaagaagtttccaccatcagccgctcgttgaaaggattagccaaggaattggacataccagttttagccctttctcaattaaatcgtaccgtagaacaacgtgatggtatcgaaggtaaacgcccacagctgagcgacttgcgtgaatcgggagccattgagcaagatgccgatatggttctctttgtgcatcgtcccgaatactatcgcattttccaagacgaaaaaggcaacgacctacacggtaaggcgcaaatcattatcgccaagcaccgtaaaggcgcaacaggcgacgtgttactcaactttaagggcgaatttacccgatttgctaaccccgaagaagacaacttcctcccttccatgaacgacccattgggcggcacaatcatggaaagccgaatgaacaacgacccattgcccccaccaccaggcgatatagatttctaaaaaagcctccccaatccctttcgcaacaacgaaagggattgagaaggtttcaccttgattttacaaaatagcctattttggagttgaaaagcataactttttagcactaaaataggctattttaaaaaagtaaccgcccctccgttattttcgtttcataaaatgttgtgtctgtacaatataaaaaatgtgcaacactcttctctttaaccgattaaaatcttatgtctcagcatggatagttagcataaagttgttgtttttaaaaaaggattttggagacctcagcaatattgcgccatgcaagttaggtaacgagatatttagccataatatagacttcattgctcgcaatcaccgatgacatttttaccacgatcacgattattaattattgtatttcattttccgatgcagaagtgtctaaaaatgttgtggagggtttcttgcgacgtgatttgatttcctgtaatttctccgagaatggcgatggtgtctttaaggtcttcggagatgaggtcgccactgaggttcattgccattgcttcttgtacacggaggagggaggcgtgggcacgggtaagggcgtcatagtggcgagcgttggtgatgatggtcgtgttttcggtaagttcgggtaggtcggcaaccttgtatattaggctttcaaggcggtcaatacctaagttgtatttgcccgaaatggcgatttcgtggtaggtttggttctcggaaagggtaggagtggtttcgggaaggtcgtctactttgttgcgcacgagtatgagctgtttgtcagtacattgtgtaatgatttcttctttctcggcttcggtgggttcttggtctactacccacaatacgatttgtgctttttgtagttcagcgagggtgcgttctatgcccaattgttccacataatcggtggtttttcgtattcctgctgtgtcaataaataggaaatcgacgccgttaatgctaatgctatcttctatcacatcacgagtagtgccgtgaatatcgcttacaatggcacgattatcacgaagtaggcggttgagtagggtcgattttccaacgttggttttaccgataatggctactggaatgccgttttttaaggcttgacccgttttgaaagagcgtgcaagggttgtaactttgctgtcaatttcgttggcgagttcctttaattcagtgcggtcggcaaactctaattcctcatggtcggagaaatcgagttcgagttcgagcaacgaattgattttaagtagctgctctcgcagtgtagaaagttctgaagaaaaatgccctttgagttgcgaaagcgcaagtttgtaagatgctttgttagtcgatgcgatgaggtcggctaccgcttcggtttgcgataagtccattttgccattgagataggctcgttgggtgtattctcctggttttgcttgttggcaaccagcttcaatgagttggtgtagcacttgttcgagaatataagccgagccgtggcaggagatttcaaccgcatcttcacccgtgtaagagtggggcgcccgccaaagcgaaacgactacttcgtcaatggtttgttggtctttgtcaattatttcaccataatgcaaggtgttggcagtggcatttaagatagattttgagaaaatagaatctactatttcgatagctttactgcccgaaattctgataactccgattgctccaccgggttgtgtcgccaatgcgcagatagtttctgtggagataagaggattgttgtaagtttgcattatgtttctttttataagattttagggacacacgaaaacgtatgtccctatattttaaatggaattgaaagtcaattaaattctttcaagtacctttttaatcagtccgtcaattgtatttttgtaaccagcatttgcttctttttgtaaacgattagcgattaccatgcagcaagttaatgctttgtgtcccatgtgttgtgctaaacctgccaatgcgctactttccatttcaaagtttgtgcattggtgtcctttgtattcaaattttacaattttttcgttcaaatgtgggtcagccaaaggcacacgcaagcgacgtccttgaggtccaaagaatccaccgcaagcaattgttacgccacgaaccatatcgtcttgtgcaatttggtctaagagttctttatcggcatttgctacatatgggttgcccaatgctggtttccattctacttgtttcttaaattcttcttcaaactctgtatccaacttttctcggttggcataatagttcagcaatccgtcgaagccgatgcttttttctgatgcaatgtaagttccgataggtgtgctttcttgcaaaccaccgcaagttccgatgcgcaccaatgtgagttggcgtagttcggctttttctttacgagtttcgaagtcaatatttgccaatgcatcaagttcatttaccacgatgtcaatgttgtcgcagccaattcctgtactcaatacagtgatgcgtttgttcttatattttcccgtaatggttctaaattctctattgttcacttcgcattctacaccgtcaaagtgagaagctactaatgcaacacgtcccgggtcgcctaccaaaataactttgtctgctaagttttgtggcttcaaatgcaagtgaaaaatacttccatcttcatttataataagctcagaaggagcaaaaaatatatcttccataattctttgaatttggtaaattattagttcgttcttacaaagatagttatttttggaaattggagcaagaaaataggtatatttttgcccaaatttcctgattactaatctataaatacgaaaaatcgagttaaaacaaggtttcgacttgttttaactcgattagttttcatgaaaatattacttcaaaagatgttctgccatgttctgtgcagcctttctaccgtcgcccattgcgaggattacagtagcgccaccacgaacaatatcgccacctgcatagatttcatgaatagagctttgcatttcttcgtttactgcaatggtgttctttctgcccaattccaatccttcaatagattttggtacgagtggattaggcgaaacacctactgcaactacgacttggtcgcattcgatgtttactgtcttgcctgttgatttagggctacggcgtccgctttcgtcaggctcgccgagttccataacatcgagtatagcaccgcaaacacgaccattttcgtcagcgatgtattcctttggattgtgcaaagtaaggaagttaatgccttcttcttgtgcgtgtttcacttcttctacacgagctggcatttcttcgagcgaacgacggtaaaccaaagtaacatcagcaccaaggcgtttggctgtacgacaagagtccattgcggtgttaccaccaccaactaccaaaactttcttgcctataataataggtgtgtcggtgtcagggttggctgcgtccatcaagtttacacgggtaagatactcgttacttgacagaatattgatgctattttcacctggaatgcccatgaaattaggcagtcctgcgcctgaacctacaaagattcctttgaaaccgctttcctttaattggttcacactgatggttttaccaatgatagtatctgtttggaaatgaacgccttgcttgctaaggttttccacttccacctcaacaatcttgttaggcaaacggaattcaggaataccatatttcaatacaccgccaatttcgtgcaatgcttcaaatacataaacctcaaaaccacgtttaaccatatcgcctgcaaagctaagacccgcaggacctgagccaataacagcaacttttatgccgttagatggggctaattcaggcaaggtggtgttgccgctttcacgttcatagtcggctgcgaaacgttccaaatagccgatagctactgctggctcgttcatcttcaagtggatacaacggctttcacattgtttttcttgtgggcaaacacgaccgcaaacggctggtagggcagacgtatctttcaaaacacgagcggcattgaggaattgtccacgttcaatgttctttacaaaacttggaatattaatgtttacagggcaaccttccacacacgttggctttgcac

SEQ ID NO: 4180 - DNA, 23654 bp, synthetic construct
  misc_feature 1..23654: note = Synthetic
  source 1..23654: mol_type = other DNA
gatttctcaaaagcggtgatttgcgttccattttcaaaacgtggcagggtcttagggtggatttgtggcttccaaggtttgaaaccaagtttgatatagaactcaactatgtattgtctgaaatgggtatgccggactgtttcaacccactgaaagctaatttcaagtccatgttcaagacaccttcatgtttttctctgatcaaacagagttccgccataaaggttgatgaaaaaggcacggaagctgctactgtttccgtggggaaaatggggtatactgcttcgcattctcaaccaaacgctgtctttcatgcagacaggccgtttgtatatcttatagtagagaatagtacacgcacagtcctgtttgctggaaaatataccggaaagtaatttctttcagatggatattaaaaaggccaggctatgattcagcctggcctttttaagttaaaacggagtgccctacttctcaaacctctggttcagaagctccatcatcttgatgactgcataggagattctggtaccagggccgaagattgcagctgcaccagccttgtagagagcatcatagtcctgagcagggatgacacctcctgctaccacgattatatcctctctgccaagtttcttcagctcggcgatgatctgaggaaccagggtcttgtgacctgctgcaagagaagaaacgccaactacgtgaacgtcgttctcaacagcctgctttgctgcttctgcaggagtctggaacagaggtcccatatccacgtcaaatccacagtctgcataaccggtggcaacaacctttgctcctctgtcgtgaccgtcctgtccgagttttgcaatcatgatacgaggctgtcttccttccttctttgcaaaggcggcaaccatcttctttgctttctcgaactcgctgtctttcttaacctctgatgagtagacacctacattcatacggatctttgctgtgtatcttcctactacctcttcgcaagcgtcggaaatctctcccagagatgcccttgcctttgctgcctcaactgcaagtgcaagcaggttgcccttcttggtccttacagcctcggtgatagcggccagacactgtttaactttttcgttgtctcttgtcttgtaaagcttctccagacgtgcaacctgctgctggcgaaccttggtgttgtcgatgtcaaggatcttgatagggtcctcatgatcaagacggtagcggttgaggccgatgatggtctcttcgcctgagtcaattctggcctgctttcttgcagcagcctcttcgatcctcagcttaggaataccggtctcgatggcctttgccataccgccgagcttctcaacttcctggatgtgctcccatgccttgtgagccagttcgttggtaaggctctcaatgtagtaggaacctgcccatgggtcgattgaacggcatatctgggtttcctgctggatgtagatctgggtgtttcttgcaatacgtgcggagaaatcggtaggcagtgcgatagcctcgtcaagagcgttggtgtgcagactctgggtgtgtcccagtgcggctcccatggcctcgatacatgtcctggcaacattgttgaaaggatcctgctcggtaaggctccatcctgaagtctggcagtgggttctcagactcaagctcttaggattttcaggattgaactgctttacgatctttgcccaaagcatcctggctgctctcatcttggctatttccatgaagtggttggttccgatagcccagaagaatgacagacgaggagcaaacttgtctacaggtatgccggccttgataccggtacggagatattccagaccgtctgcaagggtgtaggccatctctatgtcgttggtagcacctgcttcctgcatgtggtagccggagatggagatggagttgaacttaggcatgaactgtgaagtgtaggcaaagatgtcgccgatgatcctcattgagaactcaggagggtagatgtatgtgttgcggaccatgaactccttgaggatgtcattctggattgttccggccatttcctcgagctttacgccctgctccagacctgctacgatgtagaaggccatgatagggagaacggctccgttcattgtcatggaaacagacatctttccaagaggaatctggtcaaacagaatcttcatgtcctctacggagcagatgcttacaccagcctttcctacgtcgcctacaactcttgggttatctgcgttgtagcctctgtgggtaggaaggtcaaatgcaacggaaagacctttctgacctgcggccaggttccttctgtagaatgcgtttgactcttctgctgtggagaaacctgcgtactggcgtacggtccaaggtttctgcacgtacattgtgctgtaagggcctctgaggaaaggtgcaacaccggctgcatagtgcaggtgctccattccttccaggtctttggccgtatagtttgtctttactgctatcttttcaggggtattccaaagaacttccttctttgctgcacccttctttgctgcaggctttgcagctgacttatatactaaatcgttgaattttggacgcatgactttttcctccccttatttgataagtttttcctgataagctttcagagtctcgagaacgttgctgcgaacgctgatgaagttctcgataccctttccgatgagttcgtccttgcatgcagggtcacctgctacaactacgatacccttcttgccgacgatcttggcaatctgaggaacctcaactgcgtattcgtcatcagaagagcatgctacgatgatgtctgcctttgccttgagggctgcctttgcaccttcctcaggagagctgaaacggttgttgtcaactacctggaatccggctactgcaaagaagttgcaggcaaactgggctcttgcacggcacattgcaaggttaccgtatgtaaccatgaatgccacagggcgttttgcagccttgtctgtcttgaacctgagttcctcaaaggccatggcgcctctgtaaacctcgagaggacggccgaccattccggccttcttcttaggagctgccttgcgggtaacggtcttcttggtaacctctttctccacaacctcggtgaagttagggaactggttggttccaaggagggtatctcttctggtagcaatgttggaatctctcttgagggaagtttccttgatgctgtcctgaatcttttcagccttgaatgcctctacataaccgcctgccttctctattgagttgaacaggtcccaagatgtcttggctacggcgtctgtgagttcttcaacgtaataagaaccggcggccgggtcaactaccttgttgaagtggctctcgtaaagcagcaggctctgtacgttacgtgcaatcctgttggagaattcgccaggtttcttgtatgcgtggtcaaaaggcagtacttccattgagtctactccgccgattgcaccgctcatggcctcggtagtgtctctgagcatatttacgtatggatcgtaaacggtctggttccaggcgcttgtaactgcatggaccttgatcttgcagctgtctgccttcttggctccgtaagcctttactatgttggcccagaggagtcttgcagcacggaactttgcaatttccatgaagtagttgccgctgatggaaacggtgaacttcatccttcttgcagcctcatctacgcttactcctgcatcctggaggaggttgaggtactcgctgcccatgttcatgccgtaggcaagttcctgggtgatgttgctgccggcgtcgttgaatgcgtaagaataaactcctactacagtgatattagggtattccttaaccagttcaacagcctttacaaggagttttactgcatctgccttgctgtaaacgcctgtagtgttcatcaccttcagagggtcatagtcaaatgaagcccttactgcagaaggttttacaccgctttcctttactatcgcgatgaaattcctgagaactgaaaggtcattgcatcccttgaagtttacttcaacggccttgagctcgattcctttaaggagagccttcatgtctgcctttagaaccttctctgtctggctcaggtcaaagccgggagcggttactcccttcatcattccgtccagggccagggcgttggctgccttgaagtcgttgcctacaaggtaatcctgcctgatcagccagttgttatcatccttggtgcctctgatgaaagggaactctcctgccattccgccaacttccttaagatccttaaggtcttctgcgcggtagtaaggctgtacggaaaatccttccatagtcctccataccagtttcttctgatagtcggcacctttcaaatccttgattatagcatcttcccagacctgtttaggaacgggaggaaactcagtaaataatttctctgccatcttattactgttgtttgataggtgtattaatattaaatgttatcttaattgcttactttataataggtggcaaatataacaattcttattgtattttttaagttttagggaggattccggctttttatttccacaattttctcaacagagcaccgggatttttttcatcgcgatttgcgtgtgcggaatattttttcatatctttgcaccccgcaaaagaaaaaggaggtggtataaagcatgataatagttccaatcaaggacggcgagaacatagagagagcattgaagaagttcaagagaaagttcgagaagacaggtgtcatccgcgagctcagggatcgtaagacctttgagaagccttccgttaagaagcgcgctcagttgatgaaggccatctatgtgaagcaccttcagataagcgaggagtaattgcggtttgcgttactcaggattaaagggaaagccgggtgctttcctttttttatgcccgggccgggcactttttgtccaaatatgtaaatttgcaatatgggtttgattactgaattcaaggattatctcctggtcaggcggagatactcttcccgcaccgcaagtatttactgcgatgtggtggaggattatctgcgattcgcttatccggaaactccttgtggccagggcggccctgacagcagtcttgaagacggagatatccttgaggctctcaggttccagctcatacgcgggtatgtctcccggatgatggacaggtctctggatgccaggacagtaaacctccatctgagtgccctgagcaccttctgcaactatcttgtcaggcagaagaagcttacttccaatccggtaaaggagatcacacggccaaaggaaaagaagaggcttccttctttcttcacccctgaggctttggcggagtactttgacagtccgtgcgcagacggttatctccccgtcagggacaggatggtggtaaccctccttttcgacaccggcctgaggcgggccgaggcagcatcgctgaggataagcgacattgacctttcaagactcacaatcagcgtgataggaaagggtaacaagcagaggattatccccattgtcggatccctggccgaaaagatcggcgattaccttgatttgcgggaggagtttgcagcaaagtctggcaaggcatcgtccgacgcatttttcctgacggacaagggagccccagcgtacgtggagttcataaaccgggtggtcaaggcagaactttccgcaataaagggaatctccggcaagaagactccgcacaccctgcgccacagttttgccacggcccttctcaacgacggggcagacctgaacagcatcaaggaagtgctggggcattccagccttgccgcaaccgaggtctacacccacaattcttttgaaaaactcaaggaaatctacaagacagcccaccctagggcaaaaaagtaaaggcgatatgggccgggatgtctccggttgtaacctgccacttgaggttgccgtcctttgaaaagcagtagagggtgccgggagttacataatcttttgcatcggcgatgaagaagtctttgctttcaggatttaccgctatgccgtaaggagcggttatcttctcccggattccgccctggatgaggttcctgctgtctacggtcctggtcctggtgttgtatatggcataggttacggtgtttttctggagggcgttgctccactctgaactgtagacgtagagggaatctccgcagaccgccatgcctgaattcggaagcaggtccagggtttccacaacctcgtcagttgcggtgctgatgacgtaggttttggatggaacctttccgtaatctcccctggatgatacatatatgtttccgtagcggtctttctccatccggtggaggtttatgccggcggttatggtcttgacaaccttgaactggtcaaggtctataacggaaaccgtgttgtcataatttggagccatatatcctccggagtttgccacatagagcttgttgccggccacaaccatctcttccggctggtagcctacgacacattcggctacgacctgcatggtaacggtgtctatcttggccacgtatccttttctggcatttgggtctagttccaccggtcccgcataggagcttacgtaggcatatccgtccttgaacgcaatgtacctgcagttaggaatggatatctgggttatgtgacgggcgtcgtgaacgtccatgacctctacaaaatgggagcagttgattacggcataaagtttaccgccgtagatcttcaggtcatttccaacatcgccgagttccctggccaggccggggttggcttttgggaagatgttcctcatatagcttccgctgcggtagtcgtagtggtccagggttgccttgttgctgcccatgttcccttcgcacagaaggtagaagccggtgcattttccaacttcggtaacaggagtaggggttacggtgggttcaatggtgccgtattccttcctgcacgaagaaaggactgcagccaccatggcagcggccgtgagtaatatgtgctttccgttcatgaataactttcccataccatccaggtcttacagatccagcctgagcctgatcttgaagttggtgcccggcatcgggtagcactgcaccacctcgtattgttggttgaatatgttgttgacttccagtgtgaccttcagctttccgctccatgacgctcctcctatgcccagactcttagtcagggccatgtcgtgggtgtaccaggccggagcgtagttctccactatgttggccacggattcgtacctttctcccgtgtatatgaagctgtaagtcagcatccatccgttatagtttcctgaaaccacgacacttccgctatgccacggaatgtaaggtatctgtcctttgtaccactggctggtcttgtcagtgacatcctgggctctctggtaagtataggtaaggcgggtgtctacatccatgcctgcgaacctgaaaagcccctggagggcggcatctattcccttgatgtccaccttgccgaagttcagcatggtccacctgaactggttggatgccggcagggccactatcttgtccttgaccttgttgtagtagaggtctgcctgggcctggatgcccctgacaactccggtcttgaactccttgccgtaaactgcgccaatgtccagctgcgcggtgtattcaggtttcaggtatttgtttcctacaaatgtgtagtaaaggtcattgaaggtaggcaggcggaagatcttcttgtagaatgccctgaaggtgaggtccgtattgtcaaaaggcttgtaggaggcaacaactgaaggagtaaaccggctgcggcttgaagcctgggctgaggctgctttggtcttgtccttcacgaaggtgtgcagcaggctagcctgcatcttgaacctcttgagagaaattgatgttgcggcggcgttcaggaaactgtatctggtaggataaacaaaatccgtgaggtctgcattgagcttgtttatggcaaaatcgtctgacagggaaacactccaccatggagttatggaaaacagatgggcaactgacaaatatccttccttctggcggaagtggctgttaacgtacatggttgtcacatcttcccttgggtctgacaggtagtgaaggtagtcgtaagcgtatttgccgttcagaagcaggctgtatcgctgagaaaactcctttttcattgatgcctgcaggaagaagttgtcgtctttctggcggtcttgatggcggaatttgccaggttcctcccttacggacgctccgggatatcctctgtctgaatcgtagaaatatgccttgaccttccagtgtcctccttccatgttgccgaatagtccggcttcaatcctctccatcctcacgtctccgttgcggcgtgtggctgttgtgtcgtagcctcccttggtggagtaggtgaatttgtagcggccattggtatacatgtactctgaagacaaactcacagacagcctgtcggtcagtctgtactcccacagcacagacggatttgccaggccgaacgagcctgtcttcattccaactgacaggttgtattttttctgcggggcaaatactggatacttgggctgaaggtacacggcgcttgcacttgcaaagtcttttgccggctggaagatggagcttttctggccgttgtacaccgatatggcttccatgttgtcaagggagaattttcccaggtccactatgccgttctgggcgttgcctatctcgatcccgtcgtagaacactcccacatgctggcttcccaggcttctgatattcacgctcttgagccctccaatcccgccgtagtcctttatctgtgctccggaaaagtaccttatggcatctgccacggagtaggaggacagcctttccagtttttctccggaaagcacctgtgcaggggaaatctccctgactatcctttctgcaaccacagtaatttcggaaagcctgcttgctgccgtggtatcttctctctggcaataagcctttgtctgcaatgacatggaccattgcaggaagatcagtacaacagttattcgcagaacatgaaacttcataattgtgctttcacaggccgcaaatgtagcaatttgattatatttgtgagaacaaagaaataacaaaggacatgaaaaggatctttctcatcgcgattgcagtattgctggtttcatcttcacttgcagctcaggcaactcagaagcctgcaggcctcaagaaggtttatgacgagcagatcaatcctctggagcagatagacaaggccgtggctaaggccggcaaggagggcaagttcgtaatctgccagcttggcggcaactggtgtccgtggtgcctcaagtttgcagacttcattaccaaagacgctgagatcagcaagttcatcgccgacaattatatctacatccacgtgaattacaatccaaggatggccaagagcaaggacgaggctgttgtcaggcagtcaaaagctcttatgaagcgtctcaacaatgccggccgcttcggttatcctgccctgatagttcttgacggcaagggccgggtaatccacatccaggactccggctaccttgaagaaggcgaaggctacaacaagaaaaaagtccagaacttcctcaagaactggactccaaaggccgtaggagcctaattagatatttatatttgttcaaatttcaagagatgctgctttcaaaggcatctcttttttttgcattgacaaaaactgtcaaagcagaagactatttttgaaatcagaaaaaaactcccaccgaagcgggagtttaggtaaaaaccttcggcatatagccttattgtgataagatgtagaatcttatagtgcaaagatagaactttttttcatttagagtaggtttttggtaaatttgaacaaataaaactatatgaattatgtctaggattctcggtcttgatttaggaaccaacagtataggttgggctattgttgacagtcagtcagatggctcttacaaactttttgacaaaggtgtaagcatttttcaagaaggagttaagattgaaaaaggtaatgagtcgtctaaagcagctgaaagaacagcttatcgttctgctcgcaggagaatatttcgaagaagattgagaaaaattgagactttgaaggtccttatagatttaggttggtgtccatttcttttaccagaacaattatctgattggcgttttaaaggtatttatccaaaggtcgatgatttcatgctttggcagcgaaccagcgatgacgagcaaaaaaatccatattatttccggcatttggctttgacccagaaacttgatctttctaaacaagaagacaggtttgtcttaggtagagtcatgtatcatctttctcaaagaaggggtttcctaagcaacagaaaagaaagtactaaggagtcagatggtaaagtaaaagaaagtatttcagaactgaacaaatcaatacaaaacagtggatgcaagtatctaggtgaatatttctataccatttatgggaaagaaagaataaggactcattatacttccaggcagaattataaagacgaatttgatgccatttgtaaaatccaaggaatcccagatgatattaagagacgtttagagagagctattttcttccagaggcctttgaaatctcaaaaaggaaatgttgggcattgtaagttcgagactagaaagacaagatgtccaatatcgcatccgaggtatgaagagtttcgcatgtggtcatttatcaacaatataaagattaaaacgccagatgaccaagacctaaggcctctgaatcctgaagaaattgtcaagattctgccactgtttttccgtaaaagtaaaaagcaattcacttttgaagacattgccaaaaccttgtcagctaaaggtcagtatgcattttataaagataaagatgaaaaaccatatagatttaactacaagatgtttacatcggtttctggctgcccagtgatagcaggactgatggatatctttggtaataattgggaagatggtctgatggcaaaatatacagctgcaataaacaagacaaaggaacaggttgttaatgatgtttggcatgccttgtttttcttcagcgatggtgataaactggtagagtggggtaagaataagcttcaactttcagaagaggaagctgtaaggtttagtaaaatatctgtaggaagtgactatgcctctttaagtttaaatgccattaataaaatagtggtctatctaaaaagaggttttaaatactctcacgctgttttcctggctaatatttccagcatagtccctaaagaaatctattctgttcccgagaatcgtgaagcaattgagagagaaattggtataattgtagataacccttcactgactaaagaaacaacagagttaagaatcaaggaattcttaatggataactttgacctaggagcatcagttcacaagaaaaggctctatcatccttctatgatagaaacatacgccaagacaaattctggattccttgaaaccccaaggaccaattctttcaagaatccgatggccatgcgggcattgttcaggttgcgggctttagtcaatgatttaatacgcaatggtgaagttgataaggatactaagatccacatagagtatagtaggtctcttaatgacgcaaataagaggaaggctttggagagatatcaacgtgacagagaaaagaagaataacgaatatcgcgaggagatacttaagcatttccatgagcatggaattgaagcggaaccaacaaaggcagatatagagaaatataggttatgggaagaacagggccacatatgtctttatactggtaaaacaattaacataagccaatttttgggttccaatcctcagtttgatattgagcatactattccaagaagccttggaggtgaagatgctttggaaaacaaaactttatgtgacaacaagttcaatcgtgaagtaaaaaaggcaaagatcccatcgcaacttggcaattatgatgaggtccttgtccgccttgaaccgataaagaatcgtatagaagaactccgtaagcagattgaaaaatataagggaggcagagcttcaaccaaggaagctcgggatggcgttattcagaagaggaggttgctggagtatgaaaggaattatttggcagataagtatggtaaattccttatgaaagaggttccttctgattataggaagaatcaagatatagataacagtataatatcaaaatatgctcgtccttatctgaaaacattctttacacacatttacaccattaaaggaataactacctctcaattccgccgaatgtgggggctgcaggaggatgagaagaaggaccgtgcaacattcctgaaccataccgttgatgctattgttattgcctgcataggtccaaagcagtattccgaaatggctcgttattaccatgcacaggaagaatatgaatggtatggcaaagcaaaaccttcaatgtccaaaccatgggaaaccttcactgaagatgtaaaggcattagataaagaggtcctggtttctcattatactccagacaacctaaagaaacgtacttttaagaagctaaggcttagaggtcaaattgtaagaggatgtctaactgatgataatggcaataagcttcctttgatggctaggggagacactgctcgtggtgcgttacatttagatacgttctatggtgcaataaaaaaggatgaccagttaaagtatgttgtaagaaaatccttgtcttctttagaaaaatcagatgtcagcaaaatagttgatgatgttgtccgccaaaaagtagagcaagctatcaatgattatggattcaaggaagtcatagggggagaagtacctgtttggatgaattatgaaaagagagtcccgattaaaaaagtcagaatttttactccttctgtgacaaatccgatacatctaaaagatctcagagataagtcaagattcgactacaagcagcagcttcatgttgcaaacgacaggaattactgcatgatagtgtttgagaagagtaagagcaataagatagatagaaaaattgtgatagtaagtaatttagaagctgttactctcctaaaagaaactgatgtgccattgaatgagaaactttctaaattgtctcctggagagggatataattttagatatttcttaaaaacagggacgcttgtaatgttctatagagagagtccacttgaaatattaaaagcttccgttgatgtgctttataaaagaatgtataaagtagtggtgctgaagaaagacggccgagtgaaatttaaatatcagcaagaggctcgtattccagatgttattaaggcagactatgaatttgaaacaggaagaagtgctcctaaaagtttaacaatcggtatctcgaatgttgatttcgaacatccggctccttttcttcttttgagtcaagtcaaccaaaatatgcttgttgagggtttcgactttacactttctccatctggtaagatccaattcatgagaggctgatattatgttaaaaaaggcattatacttttctaatccagtgaggctatctgtgaggaataaccaactgatggtggaatataaagacgatgctactccaggtcgctctgtcccaatagaagatttaggatatgtcataattgtaaacaatcaggtgtctttgacaattccattgatgaacgctttggcggataataatacagccttgatcatctgtggagataatcagatgcctcactgtatgctccagccattggagtcaaatagtgttcaggctgaggtctataaggatcagatagaagctagtgtgcctttgaaaaaacaactttggaagcaaataattgagagtaaaattaaaaaccagtcaacgcttctcaacaaacttaataaagacggttccttgcttattccatactatcgtaatgtaaaaagtggggactctgacaataaagaaggttcagcggctcgtgtttactggaagcagctgtttggggaagattttataagaaataaagaaggcgaagcccccaactctattttgaactatggatatgcaattcttagggctgctgttgcacgagctttaatgggatcaggtcttttgccttctttaggaatttttcatcgcaacagatataatgcattccctttggctgatgacataatggaaccttataggccttttgttgatgaatgtgtttacaacctgatttcttatggagaatgtgttctgaacacatctttgaagactgaacttgtcaaggtgttgttctgcgatactaaatttccagggatgaagcgtcctttagatgtagctttgtctatgacaaccgcatcgttagctaaatgttttgcaggaaaagctaagagtatagtttacccatcaatatgagcgaatatcgcttgaatgaatatagaataatgtggttgtttgtcttttttgatttgccaacaaacacaaaaactgaacgccgcaacgcatcaagattccgtactcttttaatgcgtgatgggttctctatgatgcagttttctgtgtatgtcaggaattgtgcctcatatgaaagtcttcaggttcacataagaagagtacgggcaattttgccacctagtggtagtatcagtttattgagtgttacagataaacaatatggggatatacaaaactattggggtaagattgaaagcgctaagaatgtagaatctcagcagctggaacttttttaggataatgacgtgtaccattttggtacatataatagttcttgttatatttgcaaaaaccgaattggaaatgattattattagtagcagagagtttagagccaatcaacgtaagtatcttgatttggctcgcacaaaagaagttgtcataacatcaaggactaatggcagtttccgtattgtacctgttagggatgatgatttaatcatggatcgcgtagagttacgtgccaaaataaagcgtggcatttctgaatatcaagcaggacgagcttatcctatcaatgatggcgagaatatggatgattatcttaatcgtttgctaaatgagccataagttatacagaatcgttttttcagaagacgctaggagagatcttatatctttaaataagaaagctccttacgctatggctaaacttgccaggcttcttgaagagataagtgaacaccctaggactggtactgggcaagttgaacaactcaagggttatgatgggaacgtatattcgaggcgtttgacaaaggagcatcgtattgtttatagggtatatgaagatatcgtagaggttctagtactttctgtatttggtcactacatttagttttgtatatttgaaagtcgaaaatactacatcagaactcacttcataggagagaagtactgaattttctggcctccaaagcaggcaagtgtgaaacaatcagtgtgttataaaccttatgttgtggtttgatgtagaaatcggatagataacaactgaggcagatgagtattatcgtaagtcaagttgtggtttgatgtagaaatcggatagataacaactgacctatgccacctattgcgcttggaagagttgtggtttgatgtagaaatcggatagataacaacgacgccaaaaaacttgaaaaagacgttgagttgtggtttgatgtagaaatcggatagataacaacgaagctgccgaagatttctatgacctggagttgtggtttgatgtagaaatcggatagataacaactataggccatatcatagtggccgactccggagttgtggtttgatgtagaaatcggatagataacaacttatcgcaagtatgagcgattatcattcatgttgtggtttgatgtagaaatcggatagataacaacagtttgagaggacagccaggcggacaagggttgtggtttgatgtagaaatcggatagataacaacttcaaacgaatgtaatcttgttgtgcaatcgttgtggtttgatgtagaaatcggatagataacaaccgatagcaataagccctctttgcagataagttgtggtttgatgtagaaatcggatagataacaacagcgcgttatcggagtgttgaaagcgcaagttgtggtttgatgtagaaatcggatagataacaacttcaaaaatgtgtatagcaccttcaatgtagttgtggtttgatgtagaaatcggatagataacaacactgtggacgaaagggctaacgcagccttaggttgtggtttgatgtagaaatcggatagataacaacgcaacctccgagcaacaactacgcaccagagttgtggtttgatgtagaaatcggatagataacaactcagaggtgttgccatcttccaccgcccagttgtggtttgatgtagaaatcggatagataacaacaagtgcgtcaactttgcaaaacatcaagtgttgtggtttgatgtagaaatcggatagatgggggtattgcagttattttagactttcaggcccatttcataggcttctttgaaagcagggatctgctttgcctctcctttcttgtcggctcctcctccatatatgcggcctgaacgccttatattgtcaaagcagtctgcaaatccgtcaaacacgtcaaatgcgcggtcaagctgcttcttgctgtcgtccatggcggtaacgatgtagtagaagtccttgtctttcatcttgccgtagagagggttcatcctgtccaggaagaccttcatctgtccgcatactgaataataatatacagggcatgcaaagcaaatgacatctgcctccatcatctttggcagcagggaatttgcatcatccttctggaagcattcgccttttttgaggcatacaaggcatcctttgcaatagtctattttcttgtcgcgaaggaaaacagtttccactttgtttcctgcttgttctgctccgagggcaaactggcgtgccagaaggtctgaattcccgtcttttctcggacttgctgctatgatcaatacttttttcatggtcttttcttttgagtgcgcaaagttaaataaaatagcaggttttttattaaatttgctgaaaacaaaacatatatgaataagttattttcaaggtattgtatactgtttttagcggtatttgtccttataatgccaaatgtaaatgctcaagataaggctgaggttggcaagaaacaggttgaccatattgtcaaggttggagcagggggcttgctctttgtaggaaatcatcctgacggcgaaggtgaagttcttgcaggggtgtcttacggtgctgatgtctggcttgatgacaagtggtctgttatgccggaaatcggattatgggcagactccgagataataacagggttcaatctaggatgtggggccaggtatcatttcaaagcttcaggtggtcccggaatcattgtaggactggggcctgaacttatgattctttctgaccgtggcaagtatacctatgatgctgatccaaagcacggactgaatggcaagacaaaatacagatcttgtgacatagccttgcatccgagcattgtgattgaaagcggcaagcattggctctggggtctggaaggcagtatcggaattaacaatatgaggctcaagtatcccgagtacaatatcaatggtcccacccgttttgcatatgtgatgcttacctgcggattcaggttttaagcagtttatttccgtattacatttgtttaaacgtttataatcgattatatccgagtatttttcggatagttgcattattctttcttttctttgctccataattaaagggaattaaaaataatacctatatttgggaaggaattgaagtgtcatatgattataagtaagatttggtttgaaggagagtttatttatggttctgacgagaaaggaaatgtttatcgtcagtctcttctttggtatccgaagttggctaaagctaccggtgctgagagagaggcttataccttcggatatgatggtatccattggagaggattagatgaagatataagttttgaaagttttgcgtatgaagatgcggagccttccggcatgcagagattttttttagagcacaaggagataaatatcgctgagtttgccaaaaaggcaggtattaacgctacccttctgagaaactatatcaatgggttcaagaaaccttcaaagcagagagaaacaatgataatgcagaaaattaaagagttggggcaggagtatgtgaaagttgctgtcatggatgtttagatttggttttcaggctcgttttttgtatatttaccatacagtttaaccaattaaataggaggttgattatggaaattagaatccaatcagttaagtttgatgcagatgagaagcttattgcttttgtggagaagaaggttgagaaactggaaaagttttttgacggattcatggaggctgatgttgtactgtctctgcttcctgaccagttgaacaaggaatgcaaaatcaaacttcaggtacctacagacgacattatcgttaccaggaatgccaagagctttgaagatgccgttgtagattgtgtagatgtgctcaaaggccagctggttaagctaaaggaaaagaagttcggcagataagagtaagcttgtcagaagaacaagcttacgatatcttctgaatcaatacccgagaaataggcgcccgtatcaagggtgcctattttcttttccagagccgcccttgaatgcggagtgccctttattgcttcaatgaattcttcagtagggcgcgtgaagaagtagtctcccctgatgtcgagctcggatatgatgccgtcttttatgcccagatatagttcaacgatgcctttgggaaaacgtttgaggttggtcagggtatacttcgggctttttccgtaattccattcgtcgctctggtagcggctttgtttaagctgctctatcctgcggatttcttcttttgagaaactgtatggggtaaaatccttgaaattgctgcagatgaactctcccaggtatttcctgaaccaggttatgtcagcatctggcgaggtcaggtgttcctttatgttggtaactctcttgacgttgctcctgacagcctttcctatgaacttttcaggtcttggcctgagggcttttgagaggtctgtcttgcttacgtcaaacatcagtgttccgtgcatcaggacgcggctgccatgtacgcagatggcattgccggaaaacttgagaccgtctatggccaggtcgttgcgtccctcaagtgtggcatttaccccgaggctacggagggcatccagtatgggagcagtaaaatacctgaacatctgggtggtgtcaggcctttttgaaccgatgttttggatgaaagtgaagttgaggttgcccaggtcatggaaaacagccccgcctccggtgagcctccttactactggaatgccgtggctcctggtatactcatcatctatttcagcgatggtgttctggtatctcccgactatgatggagggggaatttatccaaagacggaaaacatcctgatctgaagaggaaagcaggaactcttcttcagcaaggttgaagtaagggtctgtggatatgtctgatatgaagagcatcaatatcttgattccctgatgatcctccttctggcaagaaagaggatgattgatgaaaagatcagatagacaatgtatccgacaacgattccgtagatggctccgcaaatgacatcgccgaggaaatggcggccaagatataccctgctgtaggcaactgcaatcatcagaaggaaaatcaggagggtgtatcgccagcgcttaatgaacagagaagacaccatggccagtccggcaaggttggctgcgtggttggatacgaagctccacgctcctccctttccgtcaggtgtgcggatctgatcccagatgtagaagtcgtagccgggcctgagcctctggaagtagggcttgatgatgtcatgtccggtcatgtctatgatgaagaaagtgacaacgcatgccaggactatcatcaaagacaacatccatccgttgaaaaactcgcggcggcggatcctgaatgttttccttccaagcacataaaggaggatcattacgtagaacggaatgagtgcgtacttgtttgaaagaaaaatcattacgctgtcccagaattcggaatggcagccatttacgacaacgctgacagccctgtccaggttttgcagattctccagatactccatcatgactttttgagttaaggttaaactacttgtgcagagtttcccagatcaagtcctttagttcttttattccttctccggtgacagaagaaataaacacataaggtatttttttaggtacttttctcttcagcgatgtaataaggtccttgtcgcctcccagaaggtcagacttggtaatggccagaatcctttccttgtcgagcagttcgggattgtacatcttaagttcgttgagaaggatcttgtattcctttgctatctcgaggttctccgcggataccatgaaaagcagtatggagtttctctcaatgtgccttaagaatctgtgtcccagacctctgccttcatgggcaccctctatgataccggggatgtcagccatgacgaaagactggtcgtcgtaataccggactattcctatgctcggctccagggtcgtgaaggcgtaatcggcgattttaggatgggctgcggacaccgtagaaagcagcgtggattttcccgcgttagggaatcctacgagtccgacgtctgccagcaccttcatttccagtatgaaccatccttcgcttccaggttctccttcctgggcgaacttcggagtctggcgggtggctgtcttgaaaaaggcatttccttttccgccccttcctcctttcagcagggtgcacctctggccgtgctcagtaacttctccaatgatttctccggtttccgcattcttggctacggttcccagcggaactttcaggacaacgtcctttgcgtcagcgccagtgcacaggttaccgccgccgttctccccgttgtcggcagaaatatgcttgcggtacttgaggcttatgagagtccacatctggctgtcgccctgcatgatcacgctgccgccctttccgccgtcaccgccgtcaggaccgcctttgtctatgaatttttcccgatgcagatgcatggagccgttacccccgttgccggaggtaaggtgcagcttcacatagtctacgaaatctgtattgggcatcttgctgtgtttaagttatttcctatccaatgaccttgcagatgcagtcgaacacttcctctatgctctgttctcctggaatctcgcagtagttgccttttttcttgtagtattctatcagcggctctgtcttttcatggtaggtgtctatcctgttctggattatggccggatcggcatcgtccttcctgccctctatctttgccctgttggcaatcctgtcaaagatggtggaatcctttatggccagggagagaaccttgtctacctgccctccgctttcctggagaatctggtcgagcttctgtgcctgggctatcgtgcgtgggaaaccgtcgagaaggaaaccttcaacttcggggtgggcagcgaaggtattctggatcataccaaccacaacctcatccggaacgagctgtccgtcattgatgagctgcttggcttcaagtccgagcggtgttcccagagctatctccttgcggagaaggtctccggttgaaatatggagaaggttgaatttctctacaataagttttgcctgtgtacctttaccggctcctggagggccgaacagaatataatgtttcattttacctatcttatgtttatgctttttctcttttcagtttcctcaacgtcaagtacgtaaatgtccttgaggttgcgtccgagctggtcataatcaaggccgtatcctacgataaagtcatttgggatgctaagtgccggataatctatctttatgctgcccctgtagttgcccggttttatgagcagggacgaatacctgatgcttcttgctccggcatccttgagaatacggtcgagctccatgatggttgtgcctgtatccacgatgtcttcaactacaacgacattgcggcccctgatgctcttggtaagaccaagcatctgctttacgcttccggaagtggaagtgccttcgtacgaagccaggcgtatgaagcacatctcgcaagggaattctatgcgtttcatcaggtctccgaagaacatgaaggaacccgtaagaacgccaaggaatataggatcgtcctcgtctttgaggtcattgttgattttctgggctactgcatctaccgccttgagaatttcttcataggtaaggtagagtttgaagctcttgtcgtaaagttgaacgtttttcatggcaatggtgttgttatcggccccaaatttaggtatttttgcagaaaagacattacacatcatacaatgaatcctttagtaagcatcatcatgggcagcacttctgacctgaaggtcatggaagcggccgccaaatatctggaagaaatgcagattccttttgaagtgaacgcgctttccgcccacaggacacctgagaaagtggccgaatttgccaagggagctgccggacgcggaatcaaggtcatcatagccggagccggtggagcggcccatctgccaggggtcattgccgcttcaacaaacctcccggtcataggagttcccatcaggtcatccaattccatagaaggtctggattcaattctttccatactccagatgccttcagggataccagtagccacaatggcacttgacggggccaagaacgctgcgatatttgccgttcagatactttcactgtccgatgcagcaatcagggaaaaatccgagcgtttcaaatctgaacttgcagacaagatcgcaaaagccaacaacgagcttaaaggtctggattacaagtacaaggtaaacggataacactatcctggaataaattgtccgcatctgtccgttttccggacagggtacattttacgttatggcatcctgcttttcttgcgggatgctatttttgtcattatgagcaggataagtgttgttttgttgagaaatgccctggccgtggcagtgctttggattctgccttccggaggttttgcgcaggagtcggacaaggttgtggaggagatttcagaggaaatcggtgaagacggattgttaacggaccttgaaggagaggaacttgtctcacatcttcagaggctgaaaaagcatcctgtgaacataaattctgcatccagggcccagcttcaggcaactctcctgctcactcctttccagatagagtccatattgagccgcatagaatccagcggagccatattgtcgtttgcagaattgtccctgctttacggatttgatgaaaaaacggcagagg

SEQ ID NO: 4181 - DNA, 23654 bp, synthetic construct
  misc_feature 1..23654: note = Synthetic
  source 1..23654: mol_type = other DNA
cggttatgagccaggaaaggacgtgaagattgccatggactgtgctgccagcgagtttgccgttcaggaaaatggtgagtggtactacgattatcgccagttgaaggatggcaagaagaaggatcctaatggtaagaaactgactgctgctgagcagatcaagttcctggaagaactgattaccaaatatcctatcgattcaatcgaggatggccttgacgagaacgattgggacaactgggtgaagttgactgctgtcatcggcgatcgttgccagttggtaggtgacgacctctttgttaccaacgtgaagttcctggagaagggcatcaagatgggtgctgccaactctatcctcatcaaggtgaaccagattggttctcttaccgagacactggatgctatcgagatggctcaccgtcatggttacaccaccgttacttcccatcgttctggtgaaaccgaggatacaacaattgctgatattgccgtagcaacaaactctggtcagattaagacaggttctatgagccgtaccgaccgtatggctaagtacaaccagcttatccgcatcgaagagcagttgggcaatagcgcagcttacggttatacgaagttgaaatagaagcgatgatatgaaattggaaaacaccaatttcaccataacaaaacataatgagtaataactgaatagatcagatacgaaatagatgggcatggatgactgtgagagttgtccatgcttttttcttctatgatgtatctgtatcttcatgtgtttaactggataacttcgatatatatatatattgattatgacaaacgtattgattagtgctgccgggctttgcggtgccacgattattggtgccattttgggattcttcgttaaggagttgccccataaatggaacgacgccgtattgggatattgtgccggaatcatgctggcagcttccacgttgggactgatagtgccagccttcgaacagaccagtctttggtggctggtagtaatcggcgtaatggcaggagccttgtttctgaatgtactggatctggtaactccccatcttcatcatatcacgggactagaccccgaggagcatcgcaataatgcccgactcagtcaggtgatgctctttgtgatggcgatagccctacataaactgcccgaaggcatggctgctggagtgagtgtctgttcggcagagggagcaacggagtggggggtatccttcggtatcgccctgcagaacatccctgagggtatggtgattattgctcctttaatgatggctggtgttacagcagtccgcaccttcttcatttccatcttcatcgccctgctcgaagtgataggcattctgttgggttttggtttgggctcagcctctaccaccttcctccccgtgatgttgggctttgccggtggcgccatgctttatgtaacgagcgacgagatgattcccgaaacccatgcccatggctttcagaagcaagccacttacgctcttctcctgggattcatcacctttgtgttgatggagaaatgtgtatgattagattctgataccgaggcaggtagtatttcctaaatacagagtgtgcttaggtgtaggctttttggggaaaaaagcggagcgtgatttcacaaccacactccgcgcaaacttaaacaaccaataaaagaaatagattgatcgttcaattgttatatctgatgaagagtagctcttgttagagctttgtttttttttatctgtcagaaatatgtcttatctattttgaagacattgctgattagcggatgaacaggagttcacgatacttaggcaaggtccagagctcatcggctacagtcaactccaacttatcaatctgataacggatctcctccatctttggagctaccgtgtcatgataagctatcgccttatcgtgctcattctcaatcttgttggcaaccttgcgggcattaaccaactcctcaacaccggtctcgatgatctgagtgcgctcggcaatcttcttgatgatattgatgttgcgggctgtcaacttcttgccttcctcgtcgccgaagatgtcaatcatgttctccacattcttagccaactgactctgatagtgagtagccactgggatgatgtggttcatgctcaagtcacccattacacgagcctcaatctgaatcttcttggtgtaggtctcccatttcacctcgttacgagcttccaactcgttcttcttcatgacgcccatatcctcgaacatcttgatagtggcagggtcgagataacgctcgaaaatcttaggacagctcttctcgcagtccaaaccacgcttagctgcttcctctacccactcatctgagtaaccattgccgtcgaaacggattggcttgcaggtcttcaaatcctgacgaacgatatcgatgatggcagatgtcttgtcctcacccttggcgatcaactcatccacacgcttcttgaagtcggtcaaagcctcggctacggctgtgttcaatacaatcattgctgatgcacagttagcctcagaacctacggcacggaactcgaaacggttaccggtgaaggcgaatggtgatgtacggttacggtcggtgttatcaatcatcaactctggaatctcagggatatccaacttcatgccctgcttgccagctacggtgaagagatccttcttgtcggctttctcaatgtgctcgagaaggtcggtcagctgcttgccgaggaatgaagagatgattgctggaggtgcctcgttggcgcccagacgatgagcattggttgcactcatgatagatgccttgagcaaaccattgtgcttgtatacacccatcaaagtctctgtgatgaagactacgaaacggaggttatcctctggtgtcttgccaggaccatggagcaggatgccggtatctgtagcgagactccagttgttgtgcttaccggaaccgttgatgcctgcgaatggcttctcatggagaagtacgcggaaaccgtgatggcgagctaccttcttcatcaaactcatcaggagcatgttgtggtcaacggcaaggttggtctcctcgaagataggtgccaactcaaactggtttggtgctacctcgttgtgacgggtcttgcaaggaataccgagttcaagagcctggatttccaaatccttcatgaatgcctgaacacgctctgggatggctccgaagtagtggtcgtccatctgctggttcttggctgaatcgtgacccatcagggtgcggcctgtcagcatcaggtcaggacgtgctgcatacaagctttcatctactaggaagtactcctgctcccaaccgagattggaaataactttcttgacatctgggttgaagtagtggcaaacctctgttgctgctacgtttacagcgtgcaatgaacggagcaatggagctttatagtcgagtgcctcacctgtgtaagagatgaagacagtagggatacagagtgtatcgtcgatgataaatacaggagatgttggatcccatgcagaataaccgcgagcctcgaaggttgagcggataccgccagatgggaaagatgatgcatcaggctcctgctgaacgagcaacttgcctgaaaattcctcgatcataccacccttgccatcatgctcgatgaaggcatcgtgcttctcggcagtaccttctgtcaatggctggaaccagtgagtgtagtgggttacgccattctcgtcagcccactgcttgatgcctttggctacggcgttggcgatgttacggtcgagacgtgctccgttgtcgatgacgtctatcagtttctcatagacatctgcagggagatacttgtacatcttctgtcggttgaataccttctttccgaagaattcacttggtcgctcgctaggagcggttacctcaacaggctttctcttggaagcctctgaaacagcttcaaatcttaagttgctcataccttatataatttaaaatttctgattttcaatgtttttatattctgttggaatgtttattttcccagccatttggcaattctctccatggcttccttgcagtcctcatgctcgccgaaggcggtgagtcggatgtagccttcgcccgatggaccgaagccgacacctggagtgcagactacgctggcaccataaagcatctcttcgaagaatttccagctaggtgtattgtttggcgtcttcacccagagataaggtgcattctcaccgccatatactctcaagccgagtttctggagttctgctctcatgaaatgggcattctccatatagtaattgatggttgtcttcacctgttccttaccctcaggggtgtagatggcttcggcagcacgctggctgatatagcttgtaccattaaacttggtgcactggcggcggtcccagataggattcaatgccacttcctcacctgccaatgtctttgccttcaactctttaggaacgatggtgtaaccacaacgcacaccggtgaatccggcagtcttcgaataactgtggaattctatcgctacctttctggcaccacgaatctcgtagatagaatgaggaattgatgggtcggtgatatatgcctcgtaggctgcatcatagaggatgatgctctcgttcttgatagcatagtttacccattttctgagttcttctttcgagatgaccgtacccgtagggttgtttggataacagagataaatcatgtccacacggtggtctggaatctgagggatgaagtcatcgctctcatcgcaaggcatgtaggttacattgctccacttgccgttctcgaagattcccgctctacctatcatcacgttagagtctatataaaccggataaatcgggtcggtaacgccgatgttgttatcccatctcaaaatctcctggatatttcccgtatcgctcttggctccatcgtttacgaatacctcgttggcatcaagatgaatgccacgtggcagaaagtcgttcttgatgatagcctcgcggaggaagtcgtagcctcgttccggaccatagcctctgaaagaagcctgctcagccatctcgtctacagccttgtgcatcgccttgatgacggcagggcagagaggctgggttacgtcaccgatgcccagactgattacacgctgctttggatgtgcaatcttgtaggcgttcaccttctttgcgatgtcggcaaacaagtagttgttggccaacttcaggaaatgttcattaactaatgccatattttgtttctccttttatttgtggtcattatcgaccatttgttatttaagtttgctcttatttataattcaatttctccttcaaaggcgaaggctgcaggtcctgtcatgtaaacatgatcatcagcctcgctatattctatttccagcgttccgccatccatcacgatactgcttttcctgccagtatgcttggtaagggctgcggctacggctgtggcacaggctcctgttccgcaagccattgttattccgcttcccctttcccaaactcgtgtccttatggcgtctgtgtcagttacttgtgcaaattctatgttgcatctttggggaaatgccttgtctctttccaggattttaccatagtgggcgatgtcgatggtgtcgatgtcatccacgaaggtaacgaaatgcggattacccatgcaaacataggtgccttcaaattttctgccgtcagcttcgagcaccgaagggcctaagaattgctcgggattttcaagtttgggttccagcatgtctactgttaccgattccacaacttctttattatcctgaagatgaagtttcaatatcttgatacccgaaagtgtttccagtcggatggtgtcctttcgggtcaatcccttttcgtaaagatacttaccgatgcatcggcttgcattgccgcacatcatcgcttcagaaccatcggcgttgaagatgcgcatcgaataatctgctcttatgccgtcgtgcggctttccgatgagaaccagtccgtcgcttcctatgcccgtgtgataagcactccaggcaatggccgccttctctgggtcagggatgtcgtattgttgggtatctacatatatataatcgttacccgctccctgcatctttgtaaaatgaactgtttctttcatctgcgttgttctttatgtttgaatactcttcttttatctctcatgtcttatctcttttgagatttgactttttgctagtctttcgaatatttcgatgactatttgtttgatttcggttgcaaaggtacgacgatttgttgaagtatgcaagaaaataaatacagaaatcttgattatttttcgcaatcttacaatttgtgttataaaaatgctttctgccttacaaattgtaaggagaatatgataagcctcgataaatttaaaatgttcgacaaaaagtgaaagcgaaatgtttttattttctttaaaatgctgacaaaatgtattaattttgcagccgaaaacgaacatagtgtaaaagaaaggcttgatttggatggcaaccaatgaaggtccgttttcgaaaagagacaatcaatagaagtattaacacattattaattattaaaggattatgaagaagattgaggcaattatccgcaagtctagattcgaggatgtcaagaaggcacttttagcagcagacatcgagtggttctcttattacaatgtaagaggtgagggtaaaatgcgccaggctcgcatttaccgtggtgtgatgtatgataccagcagcatcgagcgtgtgctcctgaacatcgtggttcgtgacaagaacgtggaaccaaccatcgccgccatccagggcgctgcacagaccggtgaagtaggagacggcagaatcttcgtgattcctgtactcgataccgttagaatcagaaccggcgagcgaggcgacatcgcattgtataatgctgagaaagaggaataattttaaatgttgaatgttaagtgttgaatgttgatttaggcattcttacttatctttaataaatattatttagtattctaatttaactataagatataagtatgagcagtttattattaactacacttgatacgggtaacacagcgtggatgatcatggcaaccatcttggtgcttttgatgtcaatcccggggatagcacttttttatggtggtttggtgcgccagaagaatattctcagcatcctgatgcagacggttttcatcgtggcagtagtcagtctgatatgggtagccttcggttattcctgggcattctctacagaatatgccgattcgggcaatcctctggcttgcgtcatcggtggtttcgataaatgtttcctccacggcatcggcttggatgccatcatgcctacaggcattccggagctcacctttgcaatgttccagtgcatgttcgccctcattactccagccttgattctcggtgcctttgccgagcgtgtcaagttcagcggttatgtacttttcaccgttctctgggttatcatcgcttatcttccaatggcccactgggtatggggtggcggtttcctgcaggagatgggagccatcgactttgcaggtggtaccgtggttcatatcaatgccggtgtagccgctctggttatggcactctgtgtaggcaagcgtgatgattaccgtgcaggtcatcctatcacacctcacaacatcaccttcgtgttcatgggtatgtcattcctctggttgggatggttcggtttcaatgccggtagcggattggctgctgatggtctggcagccaatgccttccttgttacccatattgccacagcagcggcagccaccacctggatgctcatcgactggattgtgaacaagaagccaactacggtaggtgcttgtaccggtgctgttgccggactggtagccatcactcctgcagccggcagtaccgatattttcggagctttctgcatcggtatcatttccaccatcgtctgcttcttcatggtagccgtagtgaaggagaagttcaagtatgatgatgctctcgatgcctttggtgttcatggtatgggtggtattctgggatctatcctcaccggtgtcttcgccactcagtatgtaacaggagccgaaggtgtacagggtgccctctatggcgactggcatcagctctggattcaggttgtagccaccgtggtaagcatcatctacagcgttgtagttacctacattatcttcaaggtagtagataagagtgtaggtgtacgtgttgacaagcgagtagaggaggaaggtctcgacatctacgagcatggtgagagtgcttatagcaactaagatagagaatgaatatatgtataacaccttgactgtatgttttgtatggtcaaggtgttttctattataataatgtgtaaacctgattttgcctaaattcttcttgttattttatcatttgcctgcttttttatgttaaatcttataaacacttagttacaaaatcaattctttttcttatatttgtcaacaaattaaagagctgacaattatgattaatgaatcattttctataagattgcgggaagcgcgacagatgatggggctcagcatggataaactcgtagagcgaaccaacggagccatcaccaagcagagcatctcccgatatgagaaaggcattatgcgccctaagcgtgatgccctgcaagccatagccaaagccctcaatatcagcgaggaatatttcgaaggaaccaatctcaagatagatatgccgatgctccgcaccacctccaatggcaagttgtccgaagacgagttgcaagccctggaagcgaaactctctttttgggcagagcagtatctagccaaggagaaagaagcaggttttcctacccggttcaagaatccgataaaaggcaccaaggtatcaacccttgaagatgccatccatgctgccgaccttcttcgtgaaaagtggcattgcggtgatggacctatcgccagtatcctgagactcttggaaagaaaaggtatcatgatacttgctgctactctcccggattatgtcttcggaatgagcacctgggcagataagaagcatccgttgatgattctcgatttcaatccggaaaagagtagcgtagagaaacttcgtttcacggcagttcatgaactggctcatctgcttctcctcttcccggaagatagtccgctgaggttggagaagcgttgtgatctctttgccagtttctttcttcttcctaaattggcgcttatcgaagagttgggttccaagaaacgtgagaagataacgctggaggagatgatcgacatcaaggaactgtatggcgcatctctcgctgcttccatcatcgccgccagagattacggcatcatcaccaccgagtataaacgtgcatggtatgccgagcatatagagcctaatccccgtgaaataggtaatggccactatgtatttcccgagacattgggaaaggagaagagagtcaattcgatagtagattcgtgaatgttgaatgtcggtgtaaatgtcagcatttgatgatatttaaaataggaaatactaattcttaatagtgttagatatgaaggaaaaaaataatgagcaaattttcttcgatatgttcgaagaggttgcaaccgaaagcatcgttgaggctcggaatgcatacacctatgaagaaattgatgggtgctatcaggaggcgaaagagattgctgataaggcaaggatgaacttgctggagaaaatgggaggtacataaaaacctatactcccaccgaggcgggagtataggttttacaccttcggcaattactgccttattgtgataagatgtaggaaatcttattttctactgcaaatataatacaaaatatttgtttatccaataaaaaggttgtaattttacagaaaattaataattaagtatataaaataatactgatatgactaaaatactaggaattgatactggtaccaatagtcttggatgggctattgtagaaaagaaggcggatgaatatcatttgctggataaaggtgtgaacatctttcaggaaggtgttaaaatagaaaaaggcatagagtcttctaaagcagctgaccgtacggctcataaggcatcaagagtcagaaactatcgtattaaattacgtaagatacgtctgcttcgtattttaagtgatgcgcatttgtgtccaccgctttctaaggttgaactttctgcttggagactcaaaaaagagtatcctaagaacgacttgtttatgcaatggcaaggtactgatgatgaatcagaaaagacgccatacgcttatagacataagtgtcttcatgagtgtctagacttcaacagtatgactgataggtatattttggggcgtgctttttatcacatgattcagcgtcgtggctttttgagcaatcgtaaagatcagagtggtgatgatactggaaaagtaaaagaaagtatcagcaacttgactcaggagatgcatgatgatgggtatgaatatttaggtgattatttctattctctctataataaaggagagaaaattcgcaatcattatactgcacgaaatgaacattatctggcagagtttaaggctatttgtgaaaagcagaagttagataagaatcttggtccagagatagtacgtcaaatagaaaaagccatttttgatcagcgaccattaaagtcacaaaagggacaagtgggcaaatgtgtgtttgagaagaacaaaacgaaatgtccttcttcacatcctatgtatgaggagtttagaatgctctcttttatcaataatattaaaattcagacaccaaatgattcagctttacgccctttgtctgcagaagagcgagaacttattatccctttgttcttccgcaagtcgattataaaaaagaaacagtttgattttgaagatatagcaaagaaattggctccaaagaaacattatggcttttacaaaaaaagttctgatgcagaaatgccatatcttttcaattaccctatggatacatctgtttctggttgtcctgtaactgccgctttaaaagatatctttggagataattggattgattctctttgcgaaacctatacgctagccgagggtaaaagtcgtttgaatgtagtcaatgatatttggcatgcattgttcttctatacagatgatacaaaacttgcagagtttgctaagaatcgtctgcaattgaatgatgaagaagcaaggaaattttgcgagatttctttgccgggtgattatgcgtctttaagtttgaaggctatctgtaagattcttccatatcttagaagaggcttgatttattctcatgccgtattcttgggtaacttatgtgaagtgatgccgcaatacgaatggaatatggaggaaatgcgtaatgcagccattgataatattatctatgaaatgaatcagattgattctaaagatgcacgtactttcgaggtgtgtatcaaggagtatttgaaggagcagtatcatgtatctgatgagaaactccagaaactataccatccttctatgatggagatgtatcctagagtgcaacgcaccaataatcatggtgtttatcagcttggttcacctcgaattgatagtgtgcgtaatccaatggctatgcgttctatgttcagattgcgtaaattggtaaaccgcttgttggaggaaggtaagatagatcaagatacagaaattcatattgagtttgctcgtgaattgaatgatgctaataagcgtaatgctattgctgcatacacaaaagaaaatcaaaacaagaatgatgaggctcgcaagaaaataagaaatctctttaaggcagaaacgggaaatggtatagaaccaactgatgcagatgtcttgaaatatgttctctgggaagaacaggggcacatctgtttatatacgggtaagcaaatacggatatcagactttgttggagctaatccaaagtttgatatagagcatactattcctcgtagtgtaggtggcgacagtacaagaatgaatttgacactttgtgatagtcgtttcaatagagaagtcaagaaaactaagttgccaacagaattgcctaaccatgatgaaattatggcacgtattaatgactggagagaaaagtatgagtctcttgatggtcaaattcgtagacaaaagaagatgtcaaagggagcaactactaaagatcaaaaggatgcgatcattcgtaaacggcatcttttagaattgcaacgcgattactggcgaggtaagtatttacgtttcacgatggaaagtgtacctgatggatttagtcgtcgtcaaggtactgatatcagcgtgatttctaaatatgcacgtctttatttgaaatcccttttcaagcatgtctataccgttaaaggtattgcgacttctgattttagaaagatttggggtatccaaaaggtatatagtcagaaggaacgtgtaaatcatgttcatcattgtattgatgccatcgttattgcatgtatcggcttagatgaatataataagttgggagcatactatcatgatgaagaaaatcatgaatggtatggtatgtccaaggcttattttaaaaagccttggtctacatttgttgaggatgttgagaaggtgcaagatgaaataatggtttatcattacacaccagacaatatgccaaagcaaggacgccgtagaattcttattgatgggaaaaaggttttagctaaaggtgatgctgcaagaggatcattgcataacgatacttactatggagctatagagagtgatggtgtcgtaaaatacgttaagcgtataaattttgcatcaatgaaggagaatgatgtcaaaaatatcgtggatgatacagtaagaggtataattgaagctgctattaatgagaagggcttcaaagaagcgatgtctggtacaatatggatgaatgaagagaaacaaataccaattaaaaaggtaagatgctatactccttctgttactaagcctttgaatattcgccaacagcgagatgtttcatcaaaagaatacaagcaacaatatcatgtcaccaatgatagcaactatttgcttgcattgtacattggtaaggataaaaagggtaaggaaaagcgtgaatttgagataataaatatgttgcaaactgcacaatattttaaaacaagtaatgacaaagtcgctgttggaaaaaatattgtgccgttgaagagtgaacatgattatccatttgcatattctttaaagataggaacaatggtacttctttacgaaaaatctccaaatgagatatgggatgcttctcttatggataataacaaacgtctctataaagttgtgggattatctgcaatgagaatgaaaggacgaaatgttgactatgcaacaataaagttgaaacatcatgaggaggctcgtctaagtacagaacttaaagtgaaaaatggcgcatttaagcaaggagaagaattgcgcccttcaataattatgcttcatactcagctcaatgccttagttcaaggctatgatttcgagattaatgaattaggtgaaattaaaagattaagataaaaatgatatgattaagcagacattgttcttttcaactccagtttgtctttcactcaagaattgccagattgtaatctcttggaaagatagcgacgacaaggtaacacgccctatagaagatattgggtgtgttgtcttggaaaatcaaatgataaacattactttgccgcttctcaacgagttggtaaagaataatgttgctgttatcttatgtgataacaagatgatgccaacatctatgttgcaaagcttagatgctaatacaacgcaagctgaaagtttaaaatttcagcttgctgttagtgagcccatgaaaaagcaggcctggaaacagattatagagtcaaaaatagcaaatcaatccgcagtcttgggacttgctggtaagaaaaaagatattctcaaaccttattataataatgttaagagtggagattcagacaatagggagggattagcggcaaaggtgtattggaatagccttttcggtaactcctttaaaagagaaagggatggatgtccgcctaatgctcttctaaattatggctatgctatattacgtgcagctgttgcacgtgctttgttaggttctggtttacttccgaatttgggtatcttccataaaagcagatataatgcttttcctttagctgatgatgttatggaaccatatcggccatttgtagatgaaatcgtttatcgactttatggcaaaggaatttccgaattgaataaagaatcaaagcctgagataatgcgtatgttgaattgtgatgtcaatatagggaaggttaaacgacctttgcagatagctttgaccataacaactgcctctcttgttaaatattattctggagaaataaaaaaactttccttacctattatgacatgactgaagatagactaaatgcttatcatataatgtggttatttgtgtttttcgatttacctgttactacgaaaaaagagatgaaggctgcttctctttttcgtaaaaacttggagaaagatggtttctctatgatgcaattttctgtctatatccgtcattgtgcatcaagggaaagtttggaagtgcatgtaaaacgggtaaaatctttgcttccggaggctggaaaagtaagtttgttaagtgtaacagataagcaatatggagatatctataacttctggggtaagccccaaagtattaataagagtaaaatatcgaaaaaagttatcagcgaacctattcaattggagtttttttagtacttttgcattagaaattatatcctactcaccatttcttattagatagagtgtttgttatgcgctgaaaatcagtatgttcaaatctgtaggttgtggtttgatgtaggaatcaaaagatatacaacaataatacaataatataatataaggtaacggttgtggtttgatgtaggaatcaaaagatatacaacagtccatcctaatgccttaaagtacgcagcgttgtggtttgatgtaggaatcaaaagatatacaacttattcgatattttttgctgccaaaaccggttgtggtttgatgtaggaatcaaaagatatacaacttacaactcattttatatacaatttatatagttgtggtttgatgtaggaatcaaaagatatacaacttccggaagttgcgcctgcgggcaaaatagttgtggtttgatgtaggaatcaaaagatatacaacggcttctggagttcctgatggttctttgagttgtggtttgatgtaggaatcaaaagatatacaacctaaggtttttctagcagacaaaccaaaagttgtggtttgatgtaggaatcaaaagatatacaactcatcctccttaacggtagccacgtgatagttgtggtttgatgtaggaatcaaaagatatacaacactctcgggcaagtgcaggcgagtcgaaggttgtggtttgatgtaggaatcaaaagatatacaacgcaggtatggtttataacaatggcttgcaagttgtggtttgatgtaggaatcaaaagatatacaacatcttacaggctgtattgatttcccataagttgtggtttgatgtaggaatcaaaagatatacaacgacgtcaagaacggcaggaaaagaagcaggttgtggtttgatgtaggaatcaaaagatatacaacgccttctcaatcttgctggaggctcaacgagttgtggtttgatgtaggaatcaaaagatatacaaccaatcaactttgtgaagtatttgaatatttgttgtggtttgatgtaggaatcaaaagatatacaacatcaacttcagcacctcctcttcggtctagttgtggtttgatgtaggaatcaaaagatatacaacacctgatggagcacatcaagttgaaaatggttgtggtttgatgtaggaatcaaaagatatacaactgggttcggctcgtcctctgttctgagtatgttgtggtttgatgtaggaatcaaaagatatacaaccgtcgtttgtctcgattccaacctctgtacgttgtggtttgatgtaggaatcaaaagatatacaacaattatcaaaggtagaggataagactatggttgtggtttgatgtaggaatcaaaagatatacaactaaggttatgaagacttttcatttttgctagttgtggtttgatgtaggaatcaaaagatatacaacgtcttgtattcgaggtatctattttggaagttgtggtttgatgtaggaatcaaaatatatattatatacacgagaatggcataggggctggcgcagtttctgaatatcttggaatataggcaagaaagagtcttgttctccacggacttcaatcttttcaaaagaagaacggaaaagataaaagtatctctgtcagtatatgatagtgcggtaaaatgtattgaggaagtggaatgtggcaaaagaactcagcaaaactattcttctgaactaagaaacaccatttgcccaatagataagaaaaacaatgctgatgtgacgataagggccaacacgccgtagattgattggggattgttgacacagtatcctatgcaggcaacccaaacagcgaaggacaaaaggctgttgtcacccaacgctcatatttcttagagtgcttcgggggagtatcttcgcctactacttcaatgctaacgatttctacctttatttcatgttcgggcttgttcgattcttcgttgttgtttgcagcgtctgatatgctgttgttgttctgataatccttttccataacgcttagtttgaatgtttacgccacaaagatactaaaaatattgattacttcgtttttttgtacgaagaattttagcaaaagaaataaacttaacgttaaatagactttgtaagaaaaaagtggtttgtcggaaattccgacaaaccactcaccatggtgctttagaggggaaaacacagagcttccaatctgcatcgcaaaaagtgcagaaattgagtgtaattcaggaatgtttagtaaagaaattagtaaaatcgggctgtttttcttaatttaactctgaaatagagtggaatatcagagaaaatctataaatttgcatccaaatacaatattttgtaaagaatggaagatagagaactgttgctgaaaagtgacccagagttcgaacgcctcgcctttacggtgttggctatcgaggcttcggcacaaaaaatgggtatatcgccgtctgaaatgagaaagcgattggataaggtggggctaatcaagagtctcatccaagattgctatgacactctacataccgagagccaggaagctgtggcaagtgatgtggtcgaagctcttaaaaattgggaaagaaaagaataatggaaaagcaaatattatatcatggttcaaatgtcattgttgagcatcctttagtaagcattggaagaaaggacttggatttcggtccaggcttctatcttacgcctttgtttgaacaagcttccaaatgggctgtccgtatcaagaccatcagacgagccaagcaagctatagtgaacacctatgagttcgctctaccacaagacagcaaggtaaaacgatttgatgcttacgataaggaatggctcgacttcattgttgacagcagaaaaggaaagcagccttggagtgggtatgacatcattgaaggaggagtggctgacgaccgtgtgattgatgctgtagaagcctatatcaatggctatgcagatgttgagcatactcttcgccagttggtttatcacaagcccaactatcagatttgcattttaagccaggagatagttgataagtatttacaattcaaatcatatgaaaggatataattatgttggatttcttattatggaataaaatcgctcgtatcataaagcaactagctgatacgttacatatatcaaccgacagggctttacagatattctatgactctgacgtttgccgtatgttacatgacaaagaacttggcttgcatctaatgagtgatacatatattgtaaatgacttgatagaagagctaaggaataagcaatagcaaaacgatggataattagaggaggaagattatttgtactgtagcaccttgactgtatgtttagtacggtcaaggtgctatctttatgtaataatgtgcaaatgtgtctccttcagctattgcattcgactccttcagctatcgcattcgtctccttcggtcactgcattcgactccttcagctaatgcagccgtcttcttctgccaactcagccgtctccttcacctaatgcagtcgactcattcagctaactcagtcgtctccttcagccaccgcagccgtatgtgtcaactcaatgaagtagatgaactcgtgaaatgaagtggatgaagtcgtgaaatgaagtggatgagttcggcacaattgtcaatacatgcaaatggtaaagcaaaaagtggtttactcctacctttatgattcttatacgaaaatgtttttctgtttctattgccacatctgtcaccaatgcatttaactctctgattataagtgaataatgcgtggcagtaagcggtatttctgttgccacctaatgccacgcattgccacactttttttatgaggaaatgagatggaaggtgagcaggttatttcctaattaccagatactcagtaccaaatcttgttcttcggttcttcaaaccttcaatattctgaagctctctgcccaatttctgtatgctcgaaacctggagagaagagccgaatttctgcttcaaaatgtcgaaaatggcggctgccatcagatattcgccattttccggggtacttgcaggctcgaaaacctgcagaaaacattgcttgataggggaaatctgctcaaattgtctgttatgttgcatgatgatggcggtttccttggcgtcgaaataggatttttcgccactctccagagcttgcatcgcctgcgcataaagttgctcatagttcagtctgccactcacatcgataggtcccgtcagttctactcccaggaaacggcggttgccggatgggtcggaaagaatatcggtcatgttgctcgtggcgatgaaggaggctagacgagggaattcctgtacatgacttccgtatggcggcttgattttcaccgtaggcaactgcagcagattcttcagaaatccctgctgcacctgtggtgaaatctgattgaactcatcgagattgatgagcagaaattgtgacatcgcctgcagaacctgacgcttttctgagagaatcatattgtcggtaaagccccacgataattcggtagggatgagacggcggcagaaggtgctcttgttgtaaccctgcttggaaataagcagcggcatggtactgttgccatattgacggcgatacatgccgcgccactggtcaaccattcccagaaaccaggtgtaaaaccagtcttcccaatgaggattgttggtgggtacggttcgtgccagggcacggatgcggtccttgccttcccattttcccagacagtcatagagataggactctatcgggctgtagttcctgatgcggtctgactctagaaaattccttacatccttgatgcttacgtggatgtcggctatctgaacatccagcgtcatgcttttctgcacacgggcatccaccggcctgaaatcgccaacccatgagttgttcgggcggtattcggtatatttcatcacggtgttgtagcggaactggtaccggctctccaggtatctgatcatctgcagaatgtcggcacggccctttctgcctgaggctgatttctccgtcttcctgtctttggaatgggtatcgtaagcggtgcccactatctggcggagtttctcttctgtcacatgtccccagttgttgcggcggatatggatgaaagcttcttcttcgctgaggcccatgttgcagagcttgatggcgatggctgagaaaccggcaagaaaccggtcttcatcgttctgccatgagaagttggcttttttcatctcttccttcgtctcttctgctgccttgcggtagagaaattcatagtcatcgtatgtctttaaatcgtctacattcttaggggctgaggctaccctcttcatattttgtgagatgcgcatcgccactgccttgctgttataataaggagagtcatcaagcgtaagcatgaagttggatgccaatgatggcttttcgggtttgatggctgcctgtacctgcgactggtagagcgtttttacctgttcgtaggcagactggtagagtaagtcggcgtcggcttcttttgtcgggatttttccttcttcgttgcagatgcttacgagcacgatgaggcttctgccgtcggctccttcgaaggcagcgaaggtcatcggcagcagactgaccgtcttcttgacggcatctttttcctggtccgccatgaggttgatgaagtggagcatcaccagcccgtttgatttctggaagacgagattgccgctttcatccttgttgaattctgcggctggataaacgtgctgccattccttgatgcctttgtagtactggtagtcggcctccatgagcggcacactcattctgaaattggtgacactcagcttggcatcatctttagcgatgcgctccagaaaccgttctacgattttcgaactgaccatcagcttgttctgtttgttgattcttgtaatagtaaacttcatatttctgctaatttgttgatagggtgatacttagggttgtcgatgactttgcccagctttgcccgaagcgttgggcaaatgtgcccggctacgccggtcattcgtgaccttcgtgtcggtcatccgtgctcaattgaagcaatagttccatgagttgtaaacatctcctttagcgaagtagagtctgattaaatctgcttgtgtcataggtttttggaattaaaattatataaaaagtggtttcacaggagtcgtaagcttctaggtggaatcggcaggaatttttcctgttggttgcaaaaatacaaaaaaatgttcgaaaccgcatgcctttttctccacttttttaatgtttttctgcgaaaacaataagtattcctctgctttttcgctgagaatcccccgtttttcgcccgagtgtggcaataggtggcaatagatgataatagaaaatgcccttgttgcaacgcttaaatagctaaaaaccaattggttagcttggggtgtgacaatagtgatattagttttagaaaaattttctcatacataggctttcctcttttactaataaatgttatattcccgccattcctttcccaaatcatttgttttctcccgaatttacagtacttttgcagaaagtatctaattaaagattaaaagtgcgatttaaaataaggtgtagattatgcaatacaagaatatcatattcgatttaggtaatgtcctggtgaaactcaatccggaaggatgcatcggggctttcaaggcgataggaatgggggaactggtgaatccgaatccccagagtgaggggatgaagctgatgagcaaactgggtgtgggaatgattaacaccgaagcattctgcgatgcagcccgtgagttgactggagctgatgtgacgaatgaagagatcatcgatgctgccaacaagatgctggtggagattcctgatgagaaaaagaagcgactcctgcagttgaagaaggctggttaccgcctcttcctcttgagcaataccattgatatacactggaattattgcgtggagcatctcttcccttatcagaaccatggggtagaggattatttcgagcactgtttcctctctcagcgaatgcatttggctaagcctgatgcccgtatctatgaagaggtagtcaagcaggcgaacatccatcccgatgaaaccctcttcatcgatgatctgaaggaaaactgcgaggctgccgagaagctgggcatccataccttccagaacgtgaagttcgatgattggctttcacttcgattctgacggatatgtcagaatcgaagtgattcgaaaaaaatatgaatttcttcgctttttccaataaaatgttatacctttgccaactcataataactaacataacattatcaaaatgaatttttacaagacattaggattgaaaaacagccgtattgatgtggctgatgccttgcgaggattggccgtagcaggtattattctctatcactccgtggagcatttcaatatgtacgatggaaacataacacatgtttatacgctggggtgtgatgattggatggcagatgtgctggcattgctgctgtcgggaaagatgtatggcatctttgccctgctcttcggattaagcttctttatcatgaatgataatcagcagcagcgtggaaattgcttttcgggtagattcgcctggcgaatgttcctcctggcaatgctcggtatcgtgaacaccgccttctttgatggcgacatcctcttctcctatgccatctatggactggttctcatcccattgagttatcttcctaccaaatggctctggtgggtggttgccttcctctttatccaaccggtagaaatctactccctcatttcgggatggcaggtggatgcatcggcattgagagaagtgtatggaaatatgtataatggtcatcagcacggcagtttcctggagaatgcttatggcaacctgcgatacggacaggtggctacttattactggtgtatgatgaagggaagacatacgcagactatctgcctcttcatactcggaatgctggtgggtagaaagcgttggttctacaatgagaacaacaacctggctttgtggaagaaggtgctggcggtttccatcctggtgttgattgtgggaggcatagctgatgtgcgccacatggaaacatggaacaattggctttatcctatctacaacttcttcatcctctcgtttgtagtatcaggattcgtattgttgtggtacggaaaggaatggttcagaaagggattgtcgttcctgcgccagtttggcaagatgagtttgaccaactactttctccagtctatcatcggttgtggactgtttgcttattatggcttcaatctccagacgaaactcggcatcacctatgccttctttgtgggtattgccatggtggtagtgcaatgcctcttctccaacctctggctcaagtatcactcccatggtcctttcgagggaatttggaagaagctgacctggattaagttctaaattttcaagtttactgtaaaactggagactccagttttacagtcttatcccatatttccagttgccttcattcatcatctgcgctggcataaattctttcatgctgttgatgatggtgttaagcatccgttctttgatatagtcttccctaatgtatagggagatgcgtctctgggaaagataatctccttctatctttcttacattcttgcgttgtgcctcatttag

SEQ ID NO: 4182 - DNA, 23651 bp, synthetic construct
  source 1..23651: mol_type = other DNA
  misc_feature 1..23651: note = Synthetic
aaagtttcataacttttaacgtccccttgattcttttggtgctccagcacttcttctatctccatcctttctgattttgtcagattagaataggctcgtcgtgtatcctttgaggacttcttgctgtaaacgatagactttacaagcaaattgccataaagagacttgttctcctttgttgcgctattatacatagtgcgatagcgttgaatcgattctgcgtttaaacctacaatattctgatggaaagctcgaacagattcataaataggatatgagttcatgatttggctcaaaccttcattcttaaatgcgtaacagatttgttcaaatagatccaacacattacctagtttctccgcataatcagaatatattgagtttgtttcacagaaggagtagtcgttacaacctataatcttttgtccaagagttatactttccttaaacaattgactctctgctgcataaccataaggactagcaggactgatttgaatactttgttcaaatgcttcataaggatcttgagtccattcatgtaaacaatcttcagcatcttgaaggtttacatcctcagggttagtcagcatatctcttgtaaatgacttagacaaggcgctaatttttcttctcaacaacattccctgcatgtggaatagatctgcatcattagaatttaagtcaaatgccatgttgagattatcttgagcgtcagagaataagcggtcatcaatttctatcccctttagcatagatgctttttcgtaaagaaacctagcaaagtgtcctctgaaaattgcatcctcgggaaatgcatccacaagtgttttgaataaagactcggctctttctatgtcatcaagatccttaatcaacaaagaaaatttattcttgatattatctctactatcttcaatagctcggtaatcagcattctttctgattataaagacgctataaagcatatctctatcatcagaaccaagttcaccggcattttggcagagggatataaaatcttttgcgatctcagaaagaccaagttcccaattggtcttgtatgcttccaagataaactcggagaatctgttatatctaggacgccatatacctttgcctgttccatcgtcattcatctcctcaattaacaacttagaaatggcatgttgttgctcaaaagtgtaggaacgaagtgattggtggaattcatctttccagagggattttagaattgtttgatttacccccaaatccgaatatttaaaaacgaatcctacatatgcgcaaaacttgcggagattttctggaagttcgtccatccactcgctcacgtatgtagaaagattcgtactcgtttctttgtccttgagcattaatgggaaatctactacttctagaattttttgatttttcagagctccttcaaggatagaatgttcaagaccttgtgttgtgtacttttccacgaatctttgcagttcctccgtttttaaatacgaatcaagaagtatgacattctctttctgggtatggtatcgtcttgtgtaaggttctatgtaaaagaaaagaaccttctttgccgcatcagacattcgtttgacaagattctcgaatttgtctttggcaacatgctttgattcaacaatggcaagaatgaccgtattttctgtttgttctgagagctgacaaagatactgttctgtaagttttatattactacagttttttatatcaatgacggtacaagagattgcaccaatctcatcttcttttcgaatatcaaaggcaagccttcttgctaatgtggttgcaccactgcctggtctatgtcgcaaagtgtatatttgagtacgtcttgtggttctgataatttcagagactctgagtttaacattacgataaatatctcgaatgacatcatgttgcttatctaattcttcccacgtgatttctgctccagaataaaagtcccatggtctttcttctgcggtatttttcgttggtccataaaattctatgccagaagctttgtatctttcaatagattctgacaaatctaacttattattgtgaatcagcaacctcttactagagaccattgttacattgtcacgtatttctttgatatgttgtaaaaactctgagaaagatgccgaaacgaaacatacaggcacatcatagtcttctgaccatgacgtaagttcatctttataattgtcatttttggtaaatgatattattttgcatcgattggcaacagattcccaagagccaaaaacaatttccagtttttcgaatattctttgagccaacttgggaaaattgtcgcaaaaatcaataatgatgtaatcattggttttgccagtcttaactaacttcgaaaatgtatttgcaaataatttaggagtttccctaagtgcttttctgtcatcataggcgccaagatccaatcttccttttccaaaatccagttagttagattagaagtgccagagacctcacttaaattatctgtaattattcttgttgaagattttacatgagagggagcattctcgtataaaccaaattctgtcttagcgtccaagtctacaacgaaactccaatgcagttggaagaaatcagccaatcgttctttgcttagtggatgttcattatggtcattcaaaaattctggcaaaatgataacataatcaagtcccgctgcctgttccattctatttgtcagttcatcaaaaacaagaaaatcattacttgtttttagagagctctccacgcacgaactttgaaatgttacgttgctaagaggtttgtttaaagttgagagaaaagcaatagtttcattcgataaaattgttcgcaaatcgctaaaaactttaggcataaaagtagaaagattcctggcctcaatttcattttcaactgttgaaaccccatcatgcataccagcttcgctgctattcttgaaatccgatgctaacttgacaaagtcgctatcaatagcactctttattctgttaacagtcctttgtgtcgagtacaaagccaaagttgcaccttttgtgtaatatattacctgctgagcaagtgaagcgagcattgaattttctaccgctcgatttgtaggtgtaataaaagaagctgtagaatttttatagtcacaatgcaatgttttctgtccagacagtagttcctccgccaaaacagtatcaaccaaatcaaagatgaccaatttacagaatgtttctattgcaggacgaatgtttctaaaaaacaacacacaatctccactattgtaattgtcaatagcttcgttataatcgtgttgaaatcttatttttatatcttccatatgatctgttttatccatttttattaacgattaattctcgcatacttacttggagcaggtccgaaatctttgccagcgtctgcaaatcgggttgtgtggtgttggtgcaccacttggaaaccgttacgggatccttccctaactgaccggcaagccagacgccagttttacctgcatctgccaatgctcctttaattctgtttaggttttccatgcaaatttcttaatgtttgatgcaaagctactatattatctcggattaaatggggttatttgtgaatattttatgaaacaagtgggtttttgtattttgttaaggaaaacagctcctttggtgacagattttgttggtaatgagcacaacattgtgcaatatgttacatccttttgtgtgaaacgaccattttagccaataacaagataatcgtgaatgtttttcatctttgcaacatgatttccttgcaattttatcccccccaaaaaaaaaacacacacaagatattgaaatattaacacagaacatttccatattacaaaaattatttacaactttgcaccaaacacaaagaaatagatatatgaataacatcagtaatatcgataacacgagtaatgccagtaacatttcaaagggcgacattaaccgcttgaaggttgttctggtagagcagaaacgtactgcaaagtggttggctgagaagattggacgcgaccctgcaaccgtcagcaagtggtgtactaacattgtacaaccgaatcttgatactctccgtcaagtggcagtcatccttgacgtggatatcagggatttgctttgtcctacaaaataacatcgttacacattatacataatatataggtatggcattaccaataaatatagaagaactactgaaaggcaagactgtagaatgggaacgtttggattttaaacgtggatggaatccagaagatgttgtacattctgcatgtgctttcgcaaatgatattcataattggggtggtggctacatcgttgttggtgttgatgaacaggatggagtaccagtgctgcctcctattggcgttgaccttcattcgcttgataagatacagaaggagttggtaaacatctgtagtcttgttcaaccaaccgtgaatgtgatagcagaacctgtagaattcatgggcaagatgatacttgtcattcaagtgcctggaggagaagtacgcccttataaagcaccaaagcatctgggcaaggaagctttgaaggctggcaaggtgtacttcgtgcgaaagggttcagtgacaaaaattgctgaccaagaggaagaacgtattttgatgagtctttgcaacaaggttccttttgatgaccgcatcaaccagactgcaagtatcgaagtacttgaccgtatgcttattgaagatttccttaagcgtgttggcagtaaactgactcatgacgagataatgcacatgccaatgtcagaactgggatggcagatgcagattattggaggttcaccagaagatttgcaccccaaaaacgtaggattgcttctattctctcagaatcccgagaagtatttcccttattctcgcattgagatagttcacttctttgatgaggtgggtgatagattcacggagaagattctgcatggtccaatacaccttcaacttgaagctgccttgaaatacatccgagagcaggtgcttatggagaaggttatcaaagtacgtggagaagcagaggctgtacgctgctacaactatccttatggagcattggaagagattttggcaaatgccgttttccacaagtcatgggatgaccgcaatcctgtagaggtgcgcatcaatcataatagcatagagatattgaactttgaaggcccaatgcctccaataaccaatgcagacttgcagaagcctcgtgtaatttcacgcaactatcgcaatcgtcgtataggtgatttcttgaaagagctgcatctaacagagggacgttccacaggatttccgaaaatttaccaagcagtcaggcgtaacgactcgcctatgcctctatttgaaaccgatgaccgcaatatgcactttcttgcaaccatgccgattcatcaggctttcgttgacgagaaggcttatcttgcatcaaaagggaaggtattagatggggaaatcaaggatgatttcgggaaagatgaaaagaaagatttcctaaaagacttcctaaaaggtttcctaaaagaaaatgacatagaactcactgacagacagaaatatatcttgtgggcgatatccgttgataacactctttcaggaaaagctatttcccaaaagatttcggaaaagacttttggaaagatttctgtaacagataggactataaggacggacatcgcagaccttcaagccaaaggcattctaacacgtgaaggtggtcgcaaagatggtaattgggtaatcataaaaaaatgatatgataaaaattttcaagataatagagaaggtcgtttggacactggttgcaatagctgtaatcatgattcttgctttaattgcaatcagtgttgccaatagtgcagataatatctgggacgatttccggccatatacttcattgttatatggagttgcaatgcttgtcgtggtatttaaggtagctattcttggagtacagatgtatttggaaactaaaatagaggaaaagactaagcatctgcaaactatcattgaaaagcagcaatcacagcaagttgaacaagagaagaaggtttctagcaaactggacaagattatcaatgacattgctgctatcccaaacaccgatacggatgctattgtggattttctaaaagcgaatctaccaaatattgtttcaaatcttgttgaccagcaggtttgccaacaggtgtcttatgagaaacagaagttggctctggaatacgaaaacagagaagcagaattaaaacgtaaatcacttaccgttgatgcaatcatcgaaagacaagacaggattgacaaactcaacaaggcaattcaactacgagaacaacaggaacgtgaggaaagaatgaagaaaacagagaaatatacaatgcttatattctcccttgcgaaaactcctgtagaagatgtagaaaaagtatggcaggttacaaaactctttcttgaatcaggtcatgtgttggcagataaagattcaacgatagctctcaacaaaaatcttcgcaatgctgagttgaagcaatatgccatcaacatcgtgaagtacaaccgaaaggaaaaccttgatattgaatcctacctgatgaccgtcttcggagaatggttcaccggcaagaaagaaaatatttccaagaactataatgtacttccgaaagattcacttgtttctaaggatggaattgcggtggaactggaacgtttgcgtaaagacataaattcaaagatatgaaaaaagtcataacctttattgcaatactttgtgtcatcattattgggttttcaatactcaataacatttctttccacaaaaaggtactaaacagaaaatccacagaattgttaaaggatagtttattacttagacaggtagaaatgcaaggtttattgttgcaaaaaacttcggtattggactcgatatgcttatacaataaatcaagtgactctattatacaggaagaaatacagaaaataagagacaattcggataaaattctaaaatttcagaagaaaatatttcaaaatagcaaagaataattatgttcgatttcgttaactatacatatagcgggattttatctatcctttctacactatttggtttgtcatatccattagtgataggatgcattgagaaaatagatgataagtttggttccacaaagttgtcggaacgatttatgagcgaaatctcattcaaatgtttcaaaacatctttggtaatcaatcttgtcatggcagtattattcccttttcttatggatggtagtggtcatgcaagaattataattgggacacaatgcgttggcgctattattctggtttcatgtgctttgtttctcttttcaaagattattacctattataatatcactgacttgcaaagggagattttagacaattacaatagtgcagtaagcaagaaggacaaagaaaaagaggaaaaatactttacccaatgggttgacttatcggggaaacttttgaaatctgtagataatgagcttgtgcaaagtgtatatagagtattatctaattatgtggtaaggaaacacatggaaaacaagggcaaagctttggtatttgaccagtattattatgaaggcgtttcacgtataaatgaatatctgagtaagggcaaatcaaaaccgatatcagtcaacaatgggaattccatattgacctcccttattttgatggattctgtagtatctgaaaccacctatagatatctgtggaggaaccttagaacccaaatgttttataacaaggatgagtggattatggagtattggaaaatggcatcacagaagataggtctttttatgaaaccaatacaccaatatatctatgatgaggacggtaagccatatactcaggagcaaattgaagataatcagaaacagcgagagaatttcatggagtttcacatcatgttgtgttcaatgctcatccaagagaagaaacatagattgttggaacttatgctttcatttacacaatcagaacctccatcttatcctttagtgccttcaaatttaagtgatataatagataccttcaataaaataaaccataatagttttgttgatccgttctattatgaatcaagataccagatgcctaatatgcacggcattacagaaggtaaaattgttggtgctgcaaattgctatctcgcactattggcttatcgtatttatgttatacgttggaactatggatatgagtctgtactaaatacaggtgcattaccagacaacctgtcagagcttaacactttgaaggaaaatttagatgtgttcaagcgatggttagaacggattaaagataataaaaatctactcaatgttgtacgttttacctcctttgataaggaaatcgaagaaaaagcgctgatttatgacaaggtaaatcttttgcgaccagaccaattggcttcttgtatgcaaaaggaaattcttgacaaaatggaactgttaaggactacccttccattaagcgaagagaaaatcgattctgaagaacatgagttaactggtaatattataagagcaatggagccatatggcgatttgttaggaagaagattctcgcaggataagtgctacaacttgaattcgtcagtgacaatgcctttcccaaatactgcatttttgaataacccagatgtgggacatgctggtattgcaggttgtatgtcatcctatatgttacataattttcaccatatgtttgcgagttctttctttgtagaacataatattacggactatcgtttgtcatcggaagacttgttccaagctattgataaactaaatctcaacgaggaacattatattattgctttggggctttattttgactactacataggcttaataaaagatattaagaaagaaacggatcataagtactcatataaaggaattaagattctttcattggattgtaacacagaagttttctctcagatggtttatgttatgagatttgaagaccggccattcttggatttccatgagccaacagcagaagaacagaaaaaattatgtttggagaagatgaatgatttatatggtctttggctgtctcttgaaaagatatctgagcatccagaattacttgaagagccaataaagactaagtttggcgataaggctaatcaatattctttgtttactgcaatatggagtccaaagttattctttaagcctgataaatatcctataatcagcatcaaaataaaatatcgtttgacagatgaaggagaatatgataatgtggataaagttaacccctttattcctacaaaagaaactcctattaactagaaaaatgaataggtaatcgcatttgtactatctatttttgtttatgtaaagagaaataagtacctttgtacaaacaaaagaaagaaatacagagaaaaaacaaggaaaaaatagaaagagtgtcacacagatgctttgatgattattgattcctgttatttaggatgcttatggcgttccttatttgtaccatcaaaattataactcgctgattttcagtataagttaaattcgaggaggtgaagtaagtttgacttttaaggatagacattctgaataagaattaataataaggcgaacaaccgaaatcttatggatatcggttgtacgcctttttgtattatagtgctttattttttcttttgacaaacttgatacttggataattgagaataaaaaatagggaaaggtagaaaaagaaactcccaccgaagcgggagtataggtttaacaccttcggcaattactgccttattgtgataagatgtaggaaatcttatattctgttgcaaatatataatgaataatttgttcgtacaaataatttgtagtacttttatggattattaataattaactaaacaattattatatttgcatgacaaaaatattaggaattgatactggaacaaatagccttggatgggctattgttgataagacggcagataattataatctgcttgacaaaggcgtgaatatatttcaagaaggagtcaaaatagagaaaggcatagaatcttcaaaggcagcagaacgtacagagcatagagctacacgtgtaagatactatcgcataaaattgcgcaagatacgtttgcttcgcatattaagtgacaatcatttgtgtcctcctctttcacaagaagaactttcaacatggcgactaaagaaggtatatccaaagaatgaattgttcatgcaatggcaacgtactgatgacgatacagaaaagactccgtatgcatataggcacaaatgtattcatgagaaattggatttgtctgacgttaccgataggtacattttaggtagagctttttatcatatcattcagcgccgtggtttcttgagtaacagaaaagagcaaggtggagaagattctggcaaagtaaaggaaggtatcagtacccttacccatgaaatgaatgaagccggttatgaatatcttggtgattatttctatgctctttataataagggagagaaaatccgcaagcattatactgcacgtaatgaacattttctttccgagtttaaggctatttgtgagaagcaagacttggaaaaagaactgggttcggaggttgtacgtaatattgaaaaggcaatatttgaccaaagacctttaaagtcgcaaaaaggacaggtaggcaaatgtgtgtttgagaagaacaagacaaaatgtccttcttcacatccaatgtacgaagagtttagaatgctcacattcatcaataacattaagatcaaaactcctaatgatgatgtattacgccctcttaatactggggaacgtgaaaaaataatgcctttattctttcgcaagtcgaaaaaacaatttgattttgaggatataaccaagaagttggcaccaaagaagatgtatggcttctacaagaaagaagaagatgcagaaatgccattcctgttcaattatccaatggatacatctgtttctggctgtcctgttacagctgcccttaaagatgtatttggggatgattggataaccgctatttgtgaaacatacacattaggtgagggtaaaagtcgatttgatattgtaaatgacatttggcatgctttgtatttctattctgacaaagataaacttgccgagtttgctataaaccgcctgcaattatccgaagatgaagcaaagatattcagtgagatttctttgccagctgattatgcctcattaagccttaaggctatctgtaagattcttccttatctaaggagagggttgatatattctcatgctgtatttttgggtaacttatgcgaagttatgcccaaatacgagtggagcataaaggaaatgcgcgagactattatcgacaatatcatcatggagatggataaatgtgacaccaaagacaaacgcactttcgaggtgtgcattaaagattatttgaaagggcagtataatgtttctgataatagtctgaagaagttgtatcacccttctatgattgagacatatccaagagtgcaatacactaatgagcatggcgtttatcaacttggttcgccaagaatagatagtgttcgcaatcctatggcgatgcgttctatgttcagattgcgtaaattagtgaaccgtttgcttgtagaaggaaagatagatcaaaacactgaagttcatattgagtttgcacgtgaactgaatgatgccaacaagcgaaatgccattgctttattcgtaaaagagaaccaaagtgccaatgatgaggctcgaaagcaaataataactctattcaagaaagaaaccgggacggatattgaacccacagacaaagatatattgaaatatgttctttgggaagaacagaatcacatatgtctttataccggaaagcagatacgtatatctgatttcattggagcaaatccaaagtttgatattgagcacaccattcctcgtagtgttggtggtgatagtactaagatgaacttgacgctttgtgatagccgtttcaatagagaagtaaagaaaaccaagttgcccgtagaattgccaaaccatgacgagattatggagcgcatcaaggagtggaaaaagaagtacgagttgcttgacattcaaatacgcaaaaataagaaattgtcaaaaggtgcgacaacaaaagagcagaaggacacaattattcgtaaacgtcatctgctggaacttcgtcgtgattattggcgcggtaagtacgagcgtttcacaatggaaagtgtacctgaaggctttagtcgtcgtcaaggcaccgacattagtgtgatttcaaagtatgcccgtctttacttgaagtctctcttcaatcgtgtctataccgtgaaaggcatagcaacttctgacttcagaaaaatatggggaatacaagacatctatagcaagaaagaacgtatcaatcatgtacatcattgcatagatgccattgtaattgcatgtattggcttggatgaatataataagctgggtgcatactatcatgacgaagaaaacaacaaatggtatggaatgtcgaaagcatctttcaaaaagccatgggctacatttgtagaggacataaagaagatacaagacgaaatcttggtgtatcattacactcccgacaacatgccgaagcaaggacgcagaagaattaagattgatggcaagaagattctttgcaaaggcgatgccgcaagaggttctttgcataatgatacttattatggcgctattgaaaatgatggggctgttaagtatgttaagcgtatagacttagcatcgttagaagaaaaagatgttaagaatattgtggatgatacggttaggagtattattgaagctgccataaaggagaaaggctttaaggatgcaatggcaagtacaatatggatgaatgaggaaaagcgggttccgattaaaaaggtgagatgcttcaccccctctatcaccaagccattgaatattcgcaaacaacgtgatgtctctatcaaagaatacaagcagcaatatcatgttgctaatgatagcaattatttgcttgctctatatattggtacagataacaagggcaaggaaaaacgagagttcgaaattgttaatatactccaagctgctcaatactatagaacaagtaatgataaggaggtggttgacagacatattgtgcctattaagagtgagcatgattatccatttgcttatacattaaaaataggaacaatggttcttctttatgaaaaatcacctaatgaggtttgggatgctacgatcaaggaaaggaatagacgtctttataaggtgacaggattgtctacaatgagaatgaaaggacgaaatggtgaatatgcatatgccacagtaaaattaatacacaatgaagaagcccgtccaagtaaagatataaaggcaaaaaatggagaatacgagcaaggtgaagaattccgtcctgcaataataatgcttcacacgcagctgaatgcccttgttcaaggttatgactttgagataaatgaacttggtgaaataagaaggcttagataatatgataaagcagacattattcttctcaactccggtttgtctttcgctaaagaattcacaacttgtgatttcttggaaagacagtgatgacaaggtaacgcgccctatagaagatatagggtgtgttgtcctggaaagtcaaatgataaacattactttaccgttgctcaacgagttggtgaagaataatgttgctgtcattttatgtgacaataaaatgatgcctaccgcaatgcttcaaagcttagattccaatactacacaatctgagaatataaagtctcagattgctgttagcgaaccgatgaaaaaacaagcatggaaacagataattgaagctaagataaagaaccagtctgcagtcttggatacgtttggtaaaaacggtagcagtcttaaacctttctacgctaacgtgaaaagtggtgataccgacaatagggaaggcattgcagcaaaaatatattggacccaactgttcggtaaagactttaaacgtgacaggtgcggagattcgccaaatgtactgcttaattatggatattcaattttgcgtgcagcaacagcacgagcgttacttggttctgggctgttgcctaatcttggtatattccataaaagcagatacaatgcctttccgcttgctgatgatgtaatggagccttatcgtccttatgtggattcaatagtctttaatctttatgcagatggcattacggaattaaacaaagattccaaaatggagataatgcgccttttaagctgtgacgtaaaaataggcaaggtaatgcgtccgctacagattgcattgacttttacgacagcatctcttgttaagttttatgctggtgaaattaagaaaatatcacttccctttatcttatgacggaatacagacttaatgcatatcatattatgtggctatttgtgtttttcgatttgccggtttctaccaaaaaagaaatgaaagcagctgcacttttccgtaagaatttggaaaaggacggcttttccatgatgcagttttctgtttatatacggcattgtgcatcaagagaaagtttggatgtgcatgtgagaagagtgaaggcattattgccagaaacgggaaaggttagcatactaagtgttactgataagcaatatggggacatctataatttttggggtaaaccaaagagcattaaaaagagtaaaatcactcagaaaattttaggtgccccaattcaattggaatttttttagtacttttgtagcgtaataattcttacacgacgatttcttataacaaagcaagaactataaaatattggttctctgacatttaatagttataggttgtggtttgatgtaggaatcaaaagatatacaacatgcaaaatgtgcggtcgatgtcgtgatggttgtggtttgatgttggaatcaaaagatatacaactgccgaggttttctgcgtgttgtattgcaagttgtggtttgatgtaggaatcaaaagatatacaacgctgttttcaaatccttaacgatccttgtgttgtggtttgatgtaggaatcaaaagatatacaactatattatctttgcaagcgtaaatcagaagttgtggtttgatgtaggaatcaaaagatatacaacgctgttttcaaatccttaacgatccttgtgttgtggtttgatgtaggaatcaaaagatatacaactatattatctttgcaagcgtaaatcagaagttgtggtttgatgtaggaatcaaaagatatacaactagttgactaaacactatttcgtaacgttagttgtggtttgatgtaggaatcaaaagatatacaacaattttgtataaaaatgatacaaaagtagggttgtggtttgatgtaggaatcaaaagatatacaacataaaatgcgttatatataatgttattcagttgtggtttgatgtaggaatcaaaagatatacaactccttgttgtcaatcgctatggttgtcaatgttgtggtttgatgtaggaatcaaaagatatacaacaggatacctgggggtattgttgaaaaagcgttgtggtttgatgtaggaatcaaaagatatacaacgctcatcaacggcatattctgcacctatagttgtggtttgatgtaggaatcaaaagatatacaactgtgggcgttgggtatttttaccatattcagttgtggtttgatgtaggaatcaaaagatatacaacttatataatcatttcgtttaagtgcataggttgtggtttgatgtaggaatcaaaagatatacaacttaggactcgaaagaatacctaatgcagtggttgtggtttgatgtaggaatcaaaagatatacaacgcagcgttcctcctaaaggagcacctacagttgtggtttgatgtaggaatcaaaagatatacaaccttgcgtatgatgttgagagggttggcgaggttgtggtttgatgtaggaatcaaaagatatacaacatctgcacgttttatcttccataaagtaagttgtggtttgatgtaggaatcaaaagatatacaactggaaggcacagcttcaatgagtcttcgcggttgtggtttgatgtaggaatcaaaagatatacaaccgaagaggaactttctacttatggagcgctgttgtggtttgatgtaggaatcaaaagatatacaacggaagggtatgtcttggaagagctacaaaggttgtggtttgatgtaggaatcaaaagatatacaaccacaaaacaaataaatacaagattatgaaggttgtggtttgatgtaggaatcaaaagatatacaacttttcagttccattttaccaaatgtaggagttgtggtttgatgtaggaatcaaaagatatacaacatcaccctcaaaaggtaacactaggccaaggttgtggtttgatgtaggaatcaaaagatatacaactacaacagggtacgctgtagccatcgcaggttgtggtttgatgtaggaatcaaaagatatacaacaagacctacgccggcaccatcaaaaaaaccgttgtggtttgatgtaggaatcaaaagatatacaacttgacagtaacaacacccttttttgtagggttgtggtttgatgtaggaatcaaaagatatacaacccgcatgttaattgtagcgatggcaaaggtgttgtggtttgatgtaggaatcaaaagatatacaactatttgtttcttgtttacgggtgcaaagggttgtggtttgatgtaggaatcaaaagatatacaactaggtgaagtgttggcgttacgagaacaaagttgtggtttgatgtaggaatcaaaagatatacaaccattccacttgtggttcgatgaatttcattgttgtggtttgatgtaggaatcaaaagatatacaactgctgcgtatgctttcagatgaatattgtgttgtggtttgatgtaggaatcaaaagatatacaaccttatttcgaccgctcggcttcatggttggttgtggtttgatgtaggaatcaaaagatatacaacctatttcagtgtactcaccgagcgcaagggttgtggtttgatgtaggattcaaaagacatacaacttttgtggctaatcttgtccgtatattataaaattgtgctaactttgatggaaaatacgaatgttgatgaagaaataatattgttttatatggagctgcgttataatggtgcaactcttttaatattatgaatgatatgaatacataccacttgtcgcgatttcttacagctcaggattcttactcacaatataagacggctcttgaggagattcgaaacgggcgaaaaaggagccattggatgtggttcatttttcctcaattgagggggctggggcacagttgtaatgctgactattatggtattgctggtgctgatgaggctcgtgcttattggctgcaccccgtgctcagagaaagattgctggagataacggaggctctgcttctgttggacggtttgtcggcaagacaaatctttggagaagtagacgcaatgaaacttaggtcgtcgatgactttgttttggacagctacgggcgaagggctgttccgtaaggttcttgataagtattacgaagggaaaatgtgtgacagtactttagaaatgcttagatgatgcaacgtagctaactaccgatatgataacaagatgctatctcgaaataactaatgtgtgtaacctcagctgtgtgttctgcccgaagactgagagggcgaagcacacgctgacgttggacgaatttgacgctttgacctcgcaaattgagggcaaggtgaagtttctgtatttccatctgatgggcgaaccgttcctccatccgctgctgccgcagtttgtgctgatggctcgccacaaaggttttgtacccattatcaccaccaatggcactctgctctcgcgacgtgcagaccttctggatgctctgcctcataagattcagatttcgctccactcgcacgagggcaacgctaaggagaaccttgctgggtacgtcgacgaggtgatggcgttctcgttagaggctgcgcgccgcggctgtgtcgtcgtgctgcgcctatggaacgagggcggacacaaccggcagaacgacgatatcctcaatctgcttgcgcttcatgtgccgcgcccgtggacggagcgtcacgacggctggcgacttgccgacaatctgtacatcgagaacgataacatgttcgagtggcccgaccttcagcacgccacttacgacgagcaggaggtgttctgctacgccttgcgcaatcagattggtgtgctcgtcgacggcactgttgtgccgtgctgtctcgaccataacggcgacatcgcgcttggcaatctgttccgtcagagccttgccgatattatcgtctcgccacgagcacgtgctctgtacgacggcttcacaagccataacgctgttgaaccgctctgccagcgctgcggctattcggctgtgtcgaaaaggttcagaaagtagaagtgcgattatgatttgttatcagtaggttgcgtggaggaacgccgtactctcctataggttgagtgggtatggcaaggatgccataccatcctgcaattaccataaataataaagccgtaacggaggagttccgctacggctttttgtttgtactaacagtttatcttctactgtttattgttgtcgatttgccttttttcgcctttgcatcgagtctgtatctgaagctcaggttcagatagtggtgtatatagtttgtggagtactcctggcgttggaaggctgagtattcgctttcgtaccagatgtccttgttgaagatgtcgtcggcaaacaggcgcagcatacacttgttcttgcagaagctccagctgacggatgccatcgacttgagcttgtgtccgttcatagccgatgtggcgtatcccgagcggtagtcgtcagacagttgcacgaacacctcgaacggagcgagatgcaggttggcgcttatgcccacgctgttgaagagcggtgtggtgttgtacgaagcgtcgtcgtagcggtagcggttgctctccagtcggtcgaagagtgtgagctgcagcttctcggtctcgtacgagaactcgaagtcgttgtttatgcccagtcgcttctgcttgttcagttcgggctgagcgtcggcagcgttgttgtcgacgatggtgaggaaaccgtacgacttcgccgtctctaatgcgaacttgttcatcagtcggaagtagaagccgatgccctggtcgtagttgaatgcgaactgccacatgtcgccgcccttcacgttcatcggtttcgacgtgtagacgccggtagccgagttgtagctgtagagcgtagcttgggggttgatgtccttgttgtacgaagcggtaaagcccagcacaatctgcttgcgcagccacatgcggtggtagttgtatgtagtggtatgactgtgcgagttgcgcagcagcgggttgcccatgtatatatgcagcgggtcgatggtgttgcggtagccgagcgttctcacgaggtcgggtacggtggtgttgtatgcgaaggcgatgtccatgttgcgcactcggctcatcttccacttcaggaagatagacggctcgtacgtgttgcttgtgcgtacggctgtggtgtcgagcggtccgtagtggtagtcggtcttttcgcgactgtagttccatttgaacataggcataatcatcagcgccttcaccggcgtgatggtcgacttcacggtcagctcgttcgtccatttgtgcgtgaggttgcgcatggagttcgtggggtcagccgttgtaggcgtgccgcccaccacgttctgctcgtcggtgtcgctgaagaagtcgcgtgcgatgcgtgagcggtttaatctcacgttgtcgaatatgttgaagtacgccttcttgccgagccagtattcgaacgaagcgccgaactgcgtattcagattgtgttcgctgcggtcgtagaactgccacagcgtctcgttgcgctgttcgcgcagatactccacgttgcggttggtgtgcgtgtcctcgttcgttccgctcaggttggtgaagccctgcagcgtgaacgagcctttcttgccgatgaagtgcttccatgcgtacgagatgttcagtccgcgttgctgcagttcggtcgactcgtactcgctgtcgcgcgtgatgagtcggtcgtagagcgcgtcgccgggctttgcgccgagtgcctccttcagcgagtggtaggcaaactggtcgggctggtagccgtacgaagccgacctctcctcgtacgatttgcgagacttctcgtatgaggctttcaccttcacgtcgatggtgttggcagagtcggtgtaggcgaagagctttgcctccagctgcggcttgaggttgtgcttgtagcggtaggtgtctttcacgccgaacgtgtgctcctggttcgggaagaacgtctcggttgacgcctttccgctgttccatccgtcgctgtgtcccatgttggcactaatgttgaggcggttgcttgtgtattgctgcgtgccctttgtctgccagttgtgctgatagttgtacgagccgtactggctcttgccgtcgccgtcgatgttgcggttcatggaagagccaatcgtcttgtcaacgtagcggttggcgttgttagcctgggcgtatatcatgtgcgggtcttggtcgctcagccggcttgcggtgagggctgcgctgtagcgtttcttggtctggtattgtgcctcgatgtcgccgtaccacttgtcgaggaagcccggcttcacctgtatgtcgagcacatggtcctcatcgccatcgtcgttgcccgtgtggcgtgccagctccgacttgcggtcgtacaccttcagcttgtcagccacgtcagccggcagctgttctaagatttggtcgccgccgaacatgtccttgccgttcatcatcaggcgtatgggcttgtcgttccagtatagcttgccgtcgcgacgctgcacgcccggcaatttcttgataagctcgtcgaggcgcgcgccctccttcagcttgaacgcctcggggttgaacacgatggtgtcgccacgcatggtgatgcgcggcaccttcgccttcacctccacctcctgcagcatgagcgccgtaggctgcagcctgatggtgccaaggtcggtggtgtctttcacctcagatccgtacgcatagtccaccttgcgcgagttcttgtagccgatcatgctgaacgtgatcatgatgcgtccctcccattcggagtcgagcgtgaagcagcccgtgctgtcggtctccgtcgagttctgcatcgaccaacccggctctgggtttatctcgctgcgcaccgttgctccgatgagaatttcgcccgtctcggcgttaacaatctttcccttgaacgtgtcggctgtgcagacggtggtctgcatgaggcagagcagcgcggcgacaaacagtttcttcagtacatttttcataagctggttattaaaagtattatgggtgcaaatgtatagaattttcttcaacaggtaaagtctttactttgaaaaatctatggcatacagtttgcacaggtacgatatttgtcatttttaccgctcaggagtgcccggaaaatgaaaaggaaaacctttggttggtttttcgcgagttttgagaggtgaaaagtgtgcaatggtaagcggttgatatttagtttgttgaggctgtgcgtacgaaagtgtgcagcttttgtgccactttcgctgagtactaccgctgcaaaactggagtactacccccacgagtactgggtagaagtggcactttcgccgtgtgaaagtgccacttacgctgtgcaaaagtgccgctttcgctgtgaaaaccatcgaattttgtgtttttgaggcaaaattttggtgcaaaagagcggaatatggtgcgtcagagtctccagaatgtgagtttcggtcggaggtgtctgaacaatatttgtatacagtcatacccccttgacctcccacaaaagcaatgggaggtttttgttcgtatgtttaaaaaatattagtagttgtcgccgaaaatgcttttcagttgacggtcgaagtctgacattatttcgcggtcttgaatgatgcggaatttgtcgtattctgttagtgccttttctacggcttgttcgtgtgtcacacgtcctgtatttgggagcactggacggttgttgaggtccatgtatttttgcaagaggtcgaaccaatcagccatagtcattagtatatggtcttctgctcgttgctcggcaatgtcgatgaaggcattgctcagtcggttaagtgcatcgacctccttttcgctcaaatagttcttggctatggtgacatccgactttatcaccctaccttctggtgcattcttccatgttgttagccccatgtgtgggcgctcagcatcggcgcggtcgtagatgatttctgcagccgtctgttttgttacggcgtagtgcatcatgttctgcaccatcttgaagaacttgcgtgtctcttccgcatccttactatagtcgacactacattcgctgtatatatctgttattttttgataataacgacgttcgctgatgcgtatctctcggatacggtcaagcaagtcgtcgaagtagtcggctccgaaaacattcttgccttttagccgctcatcatccagcgcaaaccctttagtgagatactctttcaatacgctcgttgcccatatgcggaactgtgtagcttcgtaactgttcacacgatagcctacggcaatcaccacatcgaggttgtacatcatcacttcgttggaacatttgtccgagggtattctaatttttctaattgtatcgggcaaatgtatttctccgctttgatttatctgagtaagatggtaattgattgtcggtacagttactccgaacagttctgccattctctgttgcgaaagccaaaacgtattggtgtcgaaaacaacctgcacctgcacttttcctcgtccgcctctatacattagtattgacgactccatgctttttgccattacatcagaagccattgttgaactgaagtattgctgggcagctttcaccatctcctttttcttatcggcattcataaccacagccatacatgcggtgtgtgagagcatgatgcttgtcacttctcttactgcgccattgccgagttctgccatctcaatagtttctacgaagtgttcgccgaggtgataacccttttgcgaagtccatgcctgcgctttagctataacacgttcgaagttccagtatttgccataacccatcactcgtgccaatttgcgtgagttccaccattccttaccatccgcatccagctctcgtagctgttcgaagggcgattgaagttcgggtatgttgtttgtgtcttgcatattctttggttttgttatatttgaggctgcgtgggtatggcag

SEQ ID NO: 4183 - DNA, 23645 bp, synthetic construct
  misc_feature 1..23645: note = Synthetic
  source 1..23645: mol_type = other DNA
tcgacgaggtgatcctcgtgggcggttcaagccgtataccagccgtacagacactcgttaagaactacttcggcaaggagccttcaaagggcgttaaccccgacgaggtggtagccgtaggtgcttctatccagggcgctatcctcaacaaggagagcggcgtaggcgacatcgttctgcttgacgtaacaccgcttacactcggtatcgagacaatgggcggcgtgatgacaaagctcatcgacgccaacaccactatcccggctaagaagagcgagacattctctacagccgtcgacaaccagacagccgtaaccatccacgtgctccagggcgagcgcccgatggctgcacagaacaagtcaatcggtcagttcaacctcgaaggcatcgcaccggcacgccgtggcgttccgcagattgaggtgacattcgacatcgacgccaacggtatcctcaacgtatctgcaaaggataaggcaacaggcaaggagcaggcaatccgcatcgaggcttcttcaggtctgagcaaggaggaaatcgagcgcatgaaggcagaggcagagcagaacgcagcttctgacaaggctgagcgcgagaagatcgacaagctcaaccaggctgactctatgatcttcaccaccgagaacttcctcaaggataacggtgacaagattcctgccgaccagaagccgggcatcgagcaggctctgcagcagctcaaggacgctcacaaggctgccgacgtagctgccatcgacaccgccatcgccaacctcaacaacgtcatgcaggcagcttctgcacagatgtaccagggtggcgcacagccgggcgcaggtgctcagccgggcgcaggtgctcagccgggcgcagacaacggcgcaaaggctgatgacaacatccaggacgcagacttcgaggaggtcaagtaagtactttgaaattgggacgtaaggaattagcgaactgataaattctaaatgaggcatgattaattataattgtgcctcattttttattataacattatgagtaaagtttttattaggaaatcaaaagaaagtaaaccagttgttgcaatatgttatgattttgataagacattatcaccagatgacatgcaagcacaagggtatattcaatctgttggagatgaagtcgaatctttttggaaagagtccaatgggttagctgaagagaatgaaatggatcaaaatttagcttacatgtttaccatgattcaaaaggcgcgtggaagattcatattcaatcgaaagacattgatggattatggtgccaaagtgagtttgtttcctggagtagacacttggtttaagcgtatcagagagtatggcgaaaccaagggggtgattgtagagcattatatcatttcatctggtcttaaggaaatgatagaaggtacaaaagtcgctaatgaatttgaaaagatatatgccagttccttctattatgacaaggatggcgttgctcaatggccagcacaagttattaattatacgagcaagactcaatttctttttagaattgaaaaaggaactttagatgtgaatgattctggtgtcaatgactattttaagccagagaacattcgtattccttttagaaacatgatctatataggtgacagtgatacggatataccttgtatgaaactcattaattcttattctggtcattctattggagtttataatccagaaacaaaagataaacgaaaagtctataaaatgatggaggataagcgcataaaatattatactcctgcagactatacagaaggatccgaattggatgaattagtcaaaaccattattaatacaaccgcatcaaatgaaaaactgatgtatatccattaccaaaacaaacaagaacaggtaagccacaatggtcagccagacaatctggaagagaaagagaaagagaaacttataatggatttggaaaatagcaatagttttaagcaaactcattctataatttccaaactaaaaaaaataaaggattggactttagaagaaaaaatacaattaaaaactatagcggagaagaacacacagatttgttcgataatgaaggatggcgatattgcctctttctactcctctcttgaataagctgttcccttattctattccgcaaaccatcacaagttccaaggcttcttctccacctacgttgaaatcatggtggctctacaaatggaacagattcaaacaaaggactgacaaatggggattgctccaatggtatcttatcattctcggcatcattgccagtattttcttttcatccctatatcaaagcagggttatggaccttgacagaaccaaccgcatcttttacaaggaggtcatcatggatgagaagagaaaggaacgttaccatgagctggattcgttgattcactcggattcgttcttcaaaacgtattggaatttggggcattgaatacctctacaaaagtaaggtggcaataaactttgtatctaataagtcgtaacaaaagataggtggctaatccaaacattatggttagccacctgccaatgttagattttcttgtcaaactctttgccaatactagtaaactcacgaaccacatcatatattaaaacctcatttgcatcaatatcttcatcgacaacaatcatgtttcccattaaatctgcaaagaagtttttttgctcttcgtcaaatagtttaatttgcgcaagagccgttaatgagcttttttcttctacatctttctgagactcttcaggcaacttgaatttctccttcagttgattgaaatagaacttttcacgagcatcaatgcgtccatcggcatggattatatctagcagaatgcgcatcattgcgaccttttgttgataattaaataagttcatattactactattatttttttgattttgaaaagcgtctcttttcttgttctgggttatatccccatcctgcaatagctttcataacggtgtcattaagctttttgacatatgtataaccaagctttatgagattttctttctcatcatcactaaatacaggtcgaacatcttttttcttatttctcatccatacaataggaagatgttttccctgtgattcagaaccgttgttttcgcaatccattggtgcattttctaaagaatgttccgtttcttcatgattatttgaatcttctctaaatactttaaaatgatttttatcatcacccacaacctctttgatatcagaaatttccttgctgttagctaaatcatatggaattgtggtttgcgtgctttttttgaagaacgacagtttcgctgattcatagaatgcatcatatgttttatcgaaacctaaagaaagccccaatagatatatggctactgaacactcaaagtcaccaatttttttagtgtatttgataaaattgtcatctggtttatgttccattccgtctgcaaattctgctctaaggtataaaaacaacggagcgactaccgcaaatctacagcctgcaacatcttctgttagtttgtataatggagatgactccacaatcgttattaattggtgaaacttcgcctctttgcatttcacaatcaaagggaatagttgcgttgtttccgcaacctctccacccaattcctgttttttagagtaattacaaaaaacatgaataaagtcacagaaatagccaatcattcctttcggataaaaactatgacgttcatatcttaaaagatatgtccaaattgactgttcgcctattgggcgctcgtagttatatagttctcgaaagacttcctgaacaatagatggtgttattaattccttacatctttcaatgtcttcgtcaggtaagttaaatatcgtccaaagattgtctatgcctcttaagctttgcttgatagacaaatcccgctgaagttcattaaacttatctgtccaaggtgatacatgaagttgtattcgagaatcaaatgaaatagacatttctttcttcgcttcttggtcaaatgtatacaatgcacagacatccctaatgtcaatagaaatatattgttcattgttgtcatttgctttgaaatgtattaccagatactcaaaagagtattcatacatattcattttgctggtaagcctattaaatagttccatatcattagcatgtaacgacatgtcaccatcgaatggtacagcataacttatagaaaaatgaccatacttaaataggtcaataaaatctaccttgcgtattatagctaaataatctttcataattagaatccccatgcattaccgctacctgattgcggagtttgaatagttgaagaaatatctatttgcgaacaattggctttaaaagcatcaagataatcacttggatacccactatatgtaatatacagattccttcttgaacgcgtcattgcaaccataaacaatgtcttagccaaagattcattgggactgatatacatgcttacattagcataaggtatgaaaacattctcaaaatcaagtccttttgcactatgaaatgtcatgataacaattcgatggtcattttcgtcaaaacaaccatacccattgccaacatattgcaacttaatgccatttctttgcaaatgagaattcaatgccccataatcaatttttccccatgagttggttgtttcgctccattctggcttacctgcatctcgaagtgcttgattgacgaactttagaatcttttgtgcagtgggaattagtattgcagtggaatcacctacattaactgcttttattgcctgttccattatatacttgacttcctgagattcagaagtggcttcacatagacggatttgagtatcttcttttgtcatgtctctttttgtggagaatatattcatgcgtggcaaaaagcgttgaactgcgtcaataatagaacgtgaaagtctatgaatgatgcctaattcatatggttctccattaataagacgcccaatttcagatggcgttactgtagcttccttccatcgtgggtcgctttcatagatagactgatttgagtcacccgaacaataacgttagaagcacgatcgttcatttcacggacaacccttggcgttagatcttgaacctcatcacataagatataatcataatgtgcgtaacttttcataaagccataataggtatcaatagtgaccttagaggctacccctaggtctttaaaatcagctttaaacatttctacaagtgaccgtgtaaaaacgacaactaagattcttgagtttggtttctttgcgagaatagtctttgcagcataagcaagtaaaaccgatttaccagaaccagcaaaccctttaatccattgattacgaaaacttgaacttgactggtctacgaaagtgctaaccttgtcaaggaaagcttgttgttgtgggtctaatttgttaattggcggtatatgcatattgataattattttgttgttaacatatttgtttttgtttttgataaattgtctggattataataagcttcaccttctgcgcctggtgttgaatgacgaatttcctttgcgaattcgttttcgccaagttcttcagcgacagatgcaaaccatccgtaagcatatttcggtaaagaattagtcttccattgttgttgatatctatcatatactttctgaaacttctcttttgctccttgccaatcaccttctgatttctgtattcttcccaattcaataagagcaatgtctagttcgggatctatagcgatagctcgttgaagacattctttagcacgtttggggtctcgaagacggagggtggatcctaagttcgaatttgcatacttatggtttggattctcttccaacgctttttcgtaaaactctatagctttgtctgttgctcctgcattattataaaggacggcaatactattatacatgtctgattctggatacaactcattttgaagttcgtatgtctcagctgctttaaacgtatgtcctgccttatcataggcttttcttaatgcaataagagtttcttttgatggtacgccaccatttttctccgcctcaagatttgcttgtctttcagcttttagagccgctcgctcttctgtgtttaattccttatttgcaaagggacttaatggttcgacatgacaaataacgcccatacaggttgcacgagcaataagcattttgtcactgttgacttcgatagctaattgaataggagtattgactgggaaaccatttggaagtggggactcaattttcaaattgaataacaatttacgaatatttcccacacaaataggtagttcaacaaccttttgttcctcacggcttgttacaagatcatctattacgattgtgtcgcaaggtatctgagtaccagcaggaaggattacttttggatgctcgtcttttgtaataatgagtatcggttcacttgtgattggctgtatcaagcatttattcattccattgaaaagaagactatgtatcgctgctccttgcgatacatgagtttgaaggttagatggaaccagtatctcagagtcttcaaagtgtcttttcaattcttcttgaatatatggactctgagcacttccaccaataaggagtatgtaatcaatttcttctttgggcgtatttgctttttttatcgcactttctataggcgagtagatactgttatactcgtcttccccttttattcgtgttgttttactatatccttttctgagaaaaacgctcatacattctgttaactccctgttggtcagatagaaactactttgcataagctttcccttatttgtgttcaccacaacatcggtctcaattgttgttttggtctcactatcttttaatgttggaattttaaagtcggtggttaaggttgaaagagtcttgttaattctaatttttaagcgttctgccaccttgtatagtgcggatgctatctgttttttctcatttgtgcgaaattgctccatcttttttccattcgcatcgagaaaacgtggcataagataatgataggttatatacctatctatatcgtcacctcccagtctagtaaactttgatattgctatattttttgagaagaaaccattagcactatatccaatttcaagaattgaaatatcacaagttccaccaccaaagtcgaaaacaagaactttagaattgtagtcaggattaacaaacattggttgaccttcagatgcacgtgatacggcataacttataaatgcagcattcggttcatctattaaagcctgctttgataccttcatatcgttagccattaatgcgtcaagaagatcttttcgttgatttgcctcaaaagaagcgggaatgctaactgcatatgaaatatcattgctgatattattctcttgacaatagcatgaaagcaaatattttagataggcaaagaaaacgcgagcagcatcctttgggttgcgtatattgaaaggagctttatcccgaagctcactttcataatattttgctcccaaatcttcaccgagttccattttgaacgaataccaaatgttctttcctttttttaattggtattttaactgagaagcaccttcgcctacaagaatttgattattgatccatgctattactgaaggtattatctctgaggaatataatgttccatctggtaatttctgttttaaacgaagcgaattcgtatgtattaaactattattatcatcgtatgatgcgatagaaaccacggttgtggacgttccaaaatcaatacctacgaaagtcttgccacgaattatagaaaaattcttggctgaaggtaaaaaagatgatgtggttattttattcatatcaaagctctattaatttattataaattatacaactccaaaaattactcctcattgggcaatttcttcataacgttttcctgacccaattcttttgcaatatccaaagactttcgaatttgcttgatgagcagttctcttggcggtaattctgtcatgtattgcgccactttaattcctgccttgtcaagttggagtagttctatttgctctttactgccctctgtgcagagtaaaagacctaaaggggattcctcgccaggttccatctcatgggcttcgagccaacgaagatagagttccatttgtcccttatattgtggcttgaaccgtcctaacttcaaatcaatagcaatgagacgatgcagtctgcgatgatagaataaaaggtcgaggtaaaaatcttcaccatcgataatcattcgcttctgtctcgttacaaaagtgaaaccattgcccaactcaagcataaactgctccaaatggacaatgaggctatcctcaagattcttttcgctatacattcctttcagtcctgcgaactccaaaaaataagggcttttgaacacaaggtcgggagatacgacattgttttcacgcaggtctgccagttcacgctttactagttcgtcaggcttggtggctacagcagtacgctcgtagagcatagagtcaatctccttacgaagctttctcacaccccaccgttcggatgcacatagagtaagatagaactcacattgtagagtatccttcagaggcaagacctcgataatgtgcgaccagctcaattggcgtgacaacgtagtgacaattttctcgtcatcaaatcttgaagcaaactgcatcatacgcctgatgctacgagcctcaaatcccttgttgccatagagacactgtaattgtgtcgacagcgtcgacacaatctgctttccatactccgcccgttggtttccaagaatctcactgttgattcttttgccaatatgccaatacatcattgtcagttctgcattggcgacagatgctacacgaacctttgttgaattgataatcaattgtaagtcatccatcagctgcgacatgccaatagaatctatagattcgtttttctcgaaaggttgaagagagtctttgtttgtcatacttgtcgtccttttcttgttactttttatatgtacaatgtagttcattcctgctcttgcttaagacaagtggattgcatagattgaatatatcttgtcaatcaacattgtcattcctaagaagatctacgacctcaacttcaagcaattttgaaattttcatcagactgcccaagtcaggctgacaggtgtttgtacaccattttgaaatggttgtcttgtcctttcccagttgttcagcaagccatttattggtcttcttcttttctgcaaggaccacttttagcctgttcaattctctatttgccatattcaaatatatgttttgcttacaaaggtagctataaaacacgacaatcgtgaagaaattatataatattttatgattattcgccaacttggtgagaaaatttcactgtaaggtaagacgcttctggtttatcaaaagaagcaataatgatgttgaatagaagagtaagaagatgataaaccgattctctatttgtctatccttcccagcttttacctatcattataagtattcatatttgtaccaagaaatactaacacactgatattcagtatgatttattttcgaggaggttaagtaagcttgacttttaaggatagacattctgaataagaataaataataaggcgtacaaccgaaatcttatagatatcggttgtacgccttttttgtattatagtgctttattttttcttttgacaaacttgatacttggataattgagaataaaaaatagggaaaggtagaaaaagaaactcccaccgaagcgggagtataggtttaacaccttcggcaattgccttattgtgataagatgtaggaaatcttatattctgttgcaaatatataatgaataatttgttcgtacaaataatttgtagtacttttatggattattaataattaactaaacaattattatatttgcatgacaaaaatattaggaattgatactggaacaaatagccttggatgggctattgttgataagacggcagataattataatctgcttgacaaaggcgtgaatatatttcaagaaggagtcaaaatagagaaaggcatagaatcttcaaaggcagcagaacgtacagagcatagggctacacgtgtaagatactatcgcataaaattgcgcaagatacgtttgcttcgcatattaagtgacaatcatttgtgtcctcctctttcacaagaagaactttcaacatggcgactaaagaaggtatatccaaagaatgaattgttcatgcaatggcaacgtactgatgacgatacagaaaagactccatatgcatataggcacaaatgtattcatgagaaattggatttgtctgacattaccgataggtacattttaggtagagctttttatcatatcattcagcgccgtggtttcttgagtaacagaaaagagcaaggtggagaagattctggcaaagtaaaggaaggtatcagtacccttacccaggaaatgaatgaagccggttatgaatatcttggtgattatttctatgctctttataataagggagagaaaatccgtaagcactatactgcacgtaatgaacattttctttccgagtttaaggctatatgtgagaagcaagacttggaaaaagaactgggttcggaggttgtacgtaatattgaaaaggcaatatttgaccaaagacctttaaagtcgcaaaaaggacaggtaggcaaatgtgtgtttgagaagaacaagacaaaatgtccttcttcacatccaatgtacgaagagtttagaatgctcacattcatcaataacattaagatcaaaactcctaatgatgatgcattacgccctcttaatactggggaacgtgaaatcattatgcctttattctttcgcaatccaaagtctaaaaaacaatttgattttgaggatatagccaagaagttggcaccaaagaagatgtatggattctacaagaaagaagaagatgcagaaatgccattcctgttcaattatccaatggatacatctgtttcaggctgtcctgttacagctgctcttaaagatgtatttggagatgaatggacggatgctatttgtgaaacatacacattaggtgagggtaaaagtcgatttgatatagtaaacgatatctggcatgctttgtatttctattcagacaaagataaacttgccgagtttgcaataaaccgcctgcaattatccgaagatgaagcaaagagattcagtgagatttctttgccagctgattatgcctcattaagccttaaggctatctgcaagattcttccttatctaagaagagggttgatatattctcattctgtatttttgggtaacttatgcgaagttatgcccaaatacgagtggagcataaaggaaatgcgcgagactattatcgacaatatcatcatggagatggataaatgtgacaccaaagacaaacgcactttcgaggtgtgcattaaagattatttgaaagagcagtataatgtttctgataatagtctgaagaagttgtatcacccttctatgattgaaacatatccaagagtgcaatacactaatgagcatggcgtttatcaacttggttcgccaagaatagatagtgttcgcaatcctatggcgatgcgttctatgttcagattgcgtaaattagtgaaccgtttgcttgcagaaggaaagatagatcaaaacactgaagttcatattgagtttgcacgtgaactgaatgatgccaacaagcgaaatgccattgctttattcgtaaaagagaaccaaagtgccaatgatgaggctcgaaagcaaataataactctattcaagaaagaaacaggaaaggatattgaacccacagacaaagatatattgaaatatgttctttgggatgaacagaatcatatatgtctttataccggaaagcagatacgtatatctgatttcattggagcaaatccaaaatttgatattgagcacaccattcctcgtagtgttggtggtgatagtactaagatgaacttgacgctttgtgatagccgtttcaatagagaagtaaagaaaaccaagttgcccgtagaattgccaaaccatgacgagattatggagcgcatcaaggagtggaaaaagaagtacgagttgcttgacattcaaatacgcaaaaataagaaattgtcaaaaggtgcgacaacaaaagagcagaaggacataattattcgtaaacgtcatctgctggaacttcgtcgtgattattggcgcggtaagtacgagcgtttcacaatggaaagtgtacctgaaggctttagtcgtcgtcaaggcaccgacattagtgtgatttcaaagtatgcccgtctttacttgaagtctctcttcaatcgtgtctataccgtgaaaggcattgcaacttctgacttcagaaaaatatggggaatacaagacatctatagcaagaaagaacgtatcaatcatgtacatcattgcatagatgccattgtaattgcatgtattggcttagatgaatataataagttgggcgcatactatcatgacgaagaaaacaataagtggtatggtctgtcgaaggcaactttcaaaaagccatgggctacatttgtagaggacataaagaagatacaagacgaaatcttggtctatcattacactcccgacaacatgccgaagcaaggacgcagaagaattaaaattgatggcaagaagattctttgcaaaggcgatgccgcaagaggttctttgcataatgacacttattatggcgctattgaaaatgatggggctgttaagtatgttaagcgtatagacttagcatcgttagaagaaaaagatgttaagaatattgtggatgatacggttaggagtattattgaagctgccataaaggagaaaggctttaaggatgcgatggcaagtacaatttggatgaatgaggaaaagcggattccgattaaaaaggtgagatgcttcacaccctctatcaccaagccattgaatattcgcaaacaacgtgatgtctctaccaaagaatacaagcagcaatatcatgttgctaatgatagcaattatttgcttgctctatatattggtgcagataacaagggcaaggaaaaacgagagtttgaaattgttaatatgctccaagctgctcaatactatagaacaagtaatgataaggaggtggttgacagacatattgtgcctattaagagtgagcatgattatccatttgcttatacattaaaaataggaacaatggttcttctttatgaaaaatcacctaatgaggtttgggatgctacggtcaaggaaaggaatagacgtctttataaggtgacaggtatgtctacatcaactattggtaattgtgtctatgcgagaataactatgctgtacaatgaagaagctcgcccaagtaaagatatcaaggcaaaaaatggggcatacaaacaaggtgaagaacttcgtcctgcaataataatgcttcacacgcagctgaatgcccttgttcaaggttacgactttgagataaatgaacttggtgaaataagaaggcttagataatatgataaagcagacattattcttctcaactccggtttgtctttcgctaaagaattcacaacttgtgatttcttggaaagatagtgatgacaaggtaacgcgccctatagaagatatagggtgtgttgtcctggaaagtcaaatgataaacattactttgccgttgctcaacgagttggtgaagaataatgttgctgtcattttatgtgacaataaaatgatgcctaccgcaatgcttcaaagcttagattccaatactacgcaatctgagaatataaagtctcagattgctgttagcgaaccgatgaaaaaacaagcatggaaacagataattgaagctaagataaagaaccagtctgcagtcttggatacgtttggaaaaaacggtagtagtcttaaacctttttacgctaacgtgaaaagtggtgataccgacaatagggaaggcattgcagcaaaaatatattggacccaactgttctgtaaagactttaaacgtgacaggtgcggagattcgccaaatgtactacttaattatggatattcaattttgcgtgcagcaacagcacgagcattacttggttcagggttgttgcctaatcttggtatattccataaaagcagatacaatgcctttccgcttgctgatgatgtaatggagccttatcgtccttatgtggattcaatagtctttaatctttatgcagatggcattacggaattaaacaaagattccaaaatggagataatgcgccttttaagctgtgacgtaaaaataggcaaggtaatgcgtccgctacagattgcattgacttttacgacagcttctcttgttaagttttatgctggtgaaattaagaaaatatcacttccctttatcttatgacggaatacagacttaatgcatatcatattatgtggctatttgtgtttttcgatttgccggtttctaccaaaaaagaaatgaaagctgctgcacttttccgtaagaatttggaaaaagacggcttttccatgatgcagttttctgtttatatacggcattgtgcatcaagagaaagtttggatgtgcatgtgagaagagtgaaggcattattgccagaaacaggaaaggttagcatactaagtgttactgataagcaatatggggacatctataatttttggggtaaaccaaagagcattaaaaagagtaaaatcactcagaaagttttaggtgccccaattcaattggaatttttttagtacttttgtagcgttataattcttacacggcgatttcttataacaaagcaagaactataaaatattggttctctgacatttaatagttataggttgtggtttgatgtaggaatcaaaagatatacaacgaataaaacatagaggtgtaactacgtgtgttgtggtttgatgtaggaatcaaaagatatacaacatactatcacgctgaacactcaaataatcggttgtggtttgatgtaggaatcaaaagatatacaacatttatactgttttcttgcagcattgccagttgtggtttgatgtaggaatcaaaagatatacaactttttggcgatacttcagttactaacatagttgtggtttgatgtaggaatcaaaagatatacaacgcaactgtctacaacatcaacgccacgaacgttgtggtttgatgtaggaatcaaaagatatacaactctgcagactttccgtcttgccaatatccagttgtggtttgatgtaggaatcaaaagatatacaactttcaatagcttcaccacgttcggcgtaagttgtggtttgatgtaggaatcaaaagatatacaactatctttgctcacaaagcgtgttaatctggttgtggtttgatgtaggaatcaaaagatatacaacttcgacttcctcgtacgtttcggctatacggttgtggtttgatgtaggaatcaaaagatatacaactccaggttaatggttatgcttgcatcgttgttgtggtttgatgtaggaatcaaaagatatacaactttacctaaaaaatagatgataagtcttggttgtggtttgatgtaggaatcaaaagatatacaaccgttaggcatcatcatacgacacataagagttgtggtttgatgtaggaatcaaaagatatacaacgaaagccgacagatacaagagaagaagacgttgtggtttgatgtaggaatcaaaagatatacaacgaagctctataacaagacgctcgaaatgagttgtggtttgatgtaggaatcaaaagatatacaacgctgcgccattgtctgcatattgtactgagttgtggtttgatgtaggaatcaaaagatatacaacctggaatcaaaggtggtattgatacgctgggttgtggtttgatgtaggaatcaaaagatatacaactaaggtaactgctaaccatgcccttgaaggttgtggtttgatgtaggaatcaaaagatatacaacgctccaagaacagagacaaaataccattagttgtggtttgatgtaggaatcaaaagatatacaacttctgaacataattagtcatacgctgcagcgttgtggtttgatgtaggaatcaaaagatatacaacttccatttttccaaatgtcggaaaaacaaggttgtggtttgatgtaggaatcaaaagatatacaacacatgatataatatacctttgagtccattgttgtggtttgatgtaggaatcaaaagatatacaacgcgaaaactcaaaagaacgcaagggatgagttgtggtttgatgtaggaatcaaaagatatacaaccaaaacgcttcacctgcttaaatcctcaaggttgtggtttgatgtaggaatcaaaagatatacaacgagttaaaggaatacccgaagccaaaagagttgtggtttgatgtaggaatcaaaagatatacaactgaacggaatgaagtcaacaaggatgagggttgtggtttgatgtaggaatcaaaagatatacaacgcgtctctggcgttgacactcttcacactgttgtggtttgatgtaggaatcaaaagatatacaacgtcgtaacatggggaacgattgacatatagttgtggtttgatgtaggaatcaaaagatatacaactaccaccattcttgtaccattcggcaacctgttgtggtttgatgtaggaatcaaaagatatacaactaaacctcgctacgaggtagtactgaaacagttgtggtttgatgtaggaatcaaaagatatacaaccttgggcgacatcaccaagattgactggcagttgtggtttgatgtaggattcaaaagatatacaactttgcttttaattaaacttttggattaaggttgtggtttgatgtaggaatcaaaagacatacaacttttgtggctaatcttgtttgtatattataaaattgtgctaactttgatggaaaatacaaatgttgatgaagaaataatattgttttatatggagctgcgttataatggtgcaactcttttaatattatgaatgatatggatacataccacttgtcgcgatttcttacagctcaggattcttattcacaatataagacggctcttgaggagattcgaaacggacgtaaaaggagccattggatgtggttcgtttttcctcaattgaaggggctggggcacagctataatgctgactattatggtattgctggtgctgatgaggctcgtgcttattggctgcaccccgtgctcagagaaagattgctggagataacggaggctctgcttctgttggacggtttgtcggcaagacaaatctttggagaagtagacgcaatgaaacttaggtcgtcgatgactttgttttggacagctacgggcgaagggttgttccgtaaggttcttgataagtattacgaagggaagatgtgtgacagtactttagaaatgcttagatgatgcaacgtagctaactaccgatatgataacaagatgctatctcgaaataactaatgtgtgtaacctcagctgtgtgttctgcccgaagaccgagagggcgaagcatacgctgacgttggacgaattcgacgctttgacctcgcgacttgagggcaaggtgaagtttctgtatttccatctgatgggcgaaccgttcctccatccgctgctgccgcagtttgtgctgatggctcgccacaaaggttttgtacccattatcaccactaatggcactctgctctcgcgacgtgcagaccttctggatgctctgcctcataagattcagatttcgctccactcgcacgagggcaacgctaaggagaaccttgctgggtacgtcgacgaggtgatggcgttctcgttagaggctgcgcgccgcggttgtgtcgtcgtgctgcgcctatggaacgagggcggacacaaccggcagaacgacgatattctcaatctgcttgcgcttcatgtgccgcgcccttggacggagcgtcacgatggctggcgacttgccgacaatctgtacatcgagaacgataacatgttcgagtggcccgaccttcagcacgccatttacgacgagcaggaggtgttctgctacgccttgcgcaatcagattggcgtgctcgtcgacggcactgttgtgccgtgctgtctcgaccataacggcgacatcgcgcttggcaatctgttccgtcagagccttgccgacattctcgcctcaccacgagcacgtgctctgtacgacggcttcaccagtcataccgccgtagagtcgctctgccagcgctgcggctattcggctgtgtcgaaaaggttccgcaagtagaagtgccattatgatttgttgttagtaggttgcgtggaggaacgccgtattctcctatagattgcgtgggtatggcaaggacgccgtactctcctacaggttgcgtgggtatggcaaggacaccgtactctcctacaggttgcgtgggtatggcaaggacaccgtactctcctacaggttgcgtgggtatggcaagatgccataccctcctactgtactgacagtttatcttcttctgcccatcgttgtcgatttgccattctttgccttcgcgtctaatctgtatctgaagctcagattcagatagtggtgaatatagtttgtggagtattcctgacgttggaaggctgagtattcgctttcgtaccagatgtccttgttgaagatgtcgtcggcaaacaggcgcagcatacacttgttcttgcagaagctccagctgacggatgccatcgacttgagcttgtgtccgttcatcgccgatgtggcgtagcccgaacggtagtcgtcagacaactgcacgaacacttcgaacggagcgagatgcaggttggcgcttatgcccacgctgttgaagagcggcgtggtgttgtacgaagcatcgtcgtagcggtagcggttgctctccagacggtcgaagagcgtgagctgcaacttctcggtctcgtacgagaactcgaagtcgttgtttatgcccagtcgcttctgcttgttcagttcgggctgagcgtcggcagcgttgttatcgacgatggtgaggaagccgtacgacttttctgtctccagcgcgaacttgttcatcagtcggaagtagaagccgatgccctggtcgtagttgagaccaaagttccacatgtcgccgcccttcacgttcatcggtttcgacgtgtagacgccagtagccgagttgtagctgtagagcgtagcctcggggttgatgtccttgttgtacgaagcggtcaagcccagcacaatctgcttgcgcagccacatgcggtggtagttgtacgtagtggtatgactgtgcgagttgcgcagcagcgggttgcccatgtatatatgcagcgggtcgatggtgttgcggtagccgagcgtgctcacgaggtcgggtacggaggtgttgtatgcgaaggcgatgtccatattgcgcacgcggctcatcttccacttcaggaagatagacggctcgtacgtgttgcttgtgcgcacggctgtggtgtcgagcggtccgtagtggtagtcggtcttttcgcgactgtagttccagctgaacttcggcattatcatcagtgccttcaccggtgtgatggtcgacttcacggtcagctcgttcgtccatttgtgcgtcagtctgcgcgtggtgttcgcagggtcagccgttgtcggcgtgccgcccaccacgttctgctcgtcggtgtcgctgaagaagttgcgtgcgatgcgtgtgcggtttaatctcacgttgtcgaatacgttgaagtacaccttcttgccgagccagtagtcgaacgaagcgccgaactgcgtctccagattgtgttcgctgcggtcgtagaactgccatagcttctcgttgcgctgttcgcgcagatactccacgtcgtggttggtgtgcgtgtcctcgttcgttccgctcaggttggtgtagccccccagcatgaacgaacccttctttccgatgaagtgcttccagatgtacgagatgttgagtccgcgttgctgcagttcggtcgactcgtactcgctgtcgcgtgtgatgagtcggtcgtagagcgcgtcgccgggctttgcgccgagcgcctccttcagcgagtggtaggcaaactggtcgggctggtagccgtacgaagccgacttctcctcgtacgatttgcgagacttctcgtatgaggctttcaccttcacgtcgatggtgttggcagagtcggtgtaggcgaagagcttcgcctccagccgcggattgaggttgtgcttgtagcggtaggtgtctttcacgccgaatgtgtgctcctggttcgggaagaacgtctcggtcgacgcctttccgctgttccatccgtcgcggtgtcccatgttggcactaatgttgaagcggttgcttgtgtattgctgcgtgccctttgtctgccagttgtgctgatagttgtatgagccgtactggctcttgccgtcgccgtcgatgttgctgttcatggtagagccaatagtcttgtatacgtagcggttggcgttgttagcctgggcgtatatcatgtgcgggtcttggtcgctcagccggcttgcggtgagggctgcgctgtagcgtttcttggtctggtattgagcctcgatgtcgctgtaccacttgtcgaggaagcccggcttcacctggatgtcgagcacatggtcctcatcgccatcgtcgttgcccgtgtggcgtgccagctccgacttgcggtcgtacaccttcagcttgtcagccacgtcagccggcagctgccctaagatctggtcgccgccgaacatatccttgccgttcatcatcagtcgtatgggcttgtcgttccagaagagcttgccgtcgcgacgctgcacgcccggcagtttcttgataagctcgtcgaggcgcgcgccctccttcagcttgaacgcctcggggttgaacacgatggtgtcgccacgcatcgttatgcgcggcaccttcgccttcacctctacctcctgcagcatgagcgccgtgggctgcagcctgatggtgcccaggtcggtggtgtctttcacctcagatccgtacgcatagtccaccttgcgcgagttcttgtagccgatcatgctgaacgtgatcatgatgcgtccctcccattcggagtcgagcgtgaagctgcccgtgctgtcggtctccgccgagttctgcatcgaccaacccggctgcgggtttatctcgctgcgcaccgttgctccgatgagaatttcgcccgtctcggcgttcacaatctttcccttgaacgtgtcggcagtacatacggcggtctgcatgaggcagagcagcatggcgacaaacattttcttcagtacatctttcataagctgattatttaaagtatcacgagtgcaaatgtatagattttgcttcaataagcaaaacctttgctttggaaaatctatggcatacagtttgcacaggtacgatatttgtcatttttaccgctcaggagtgcccgaaaaatgaaaaagaaaacctttggttggttttttgcgagttttgagaggtgaaaagtgtgcaacggtaagcggttgatatttagtttgttgaggctatgtgtacgaaagtgtgcagcttttgtgccactttcgctgagtactaccgctgcaaaactggagtactacccccacgagtactgggtagaagtggcacttgcaccgtgtgaaagtgccacttacgctgtgcaaaagtgccgcttgcgttgtgaaaaccatcgaattttgtgtttttgaggtggatttttagtgtgcagaagcggaaattgagctcgtaaaatctccagaatgcaagtttgggttggagtggtgtggtcaaaatgtcgtgtgcaagttacgggggtgaggaaagaaatttgaggggcttttcagggggtgcacttgtctcaagtgcaccaacgtagcagatagcgttattagtgttgttggtttaggttgtgctatgtaggtgcacagtttgctcggttggtgcacttgagacaagtgcaccccctgaagctacctgcgtgcccccaccagcaactccgtcttgccctcgtccacgagcttgatgatgagttcgccgaagagcgtgttctgccatgcgaaccactcgcgcgtgaacttctgcgcgtcgtccacgttgaacgactcgtggatgaaccccgtgccggcatcggtgcgctgcaacatacgcagacactccgctatctcggcatcgtcggtgctcgtgaaggcacgcatcattatcgacataggccacgccatgtcgtagcccacgtgtggactgccgatgccctcgccagccttgccgcggaagaagtaggggttgtcgtcgctccacacgaagcggcgcgtgttctgatatacggggtcgtttacgtccacatcgcctaaatagggcagggcgagcagcgacggcacgttggcgtcgtccatgaggaagcggttgccgaagccgtccacctcgtaggcgtaaatcttgccatacttcggatggtcgaccacggcgtactgcttgagagccgtgctcacctcgtcggcaagcgccgtgcagtcggcagcgagcgttgcgtcggcgttcaccttgttgagtatctccgccgccttgcgcagcgagctgaccgccatgaagttagacggcacgaggaagaggaacgtcgaggcgtcgtcggaggggcggaagacggaggcgatgagtccgcagggcttcacggggttgccccagccgtggttgcagaccgtgtcgagctggtcctccgtctcgcgttggaaacgataggtgccgagcccctgcttgcgctgctgctcgcggaacacgcgcagtatgttgcgcaccgcctgcagccactcgtcgccgaacaccgacgcgtcgcccgtcacctgccagtagtggtaggcgaggcgtatggggtagcagagcgagtcgatctcgtacttgcgctcgtgcagctcgggcttcatgtcggtcatgtcgttagcccacatgccgttcggttctggctcgcggttgaacgcattggcgtaggggtcgatgttgatgcacttcagctggcggcgtatcacaccgcgcagcatcttctgcaacttgcggtcaccattggcaagctgtacgtagggccacacctgcgctgccgagtcgcgcagccacatggcgtgtatgtcgcccgtgtagacgaaggtgtcctccttgccgtcctcggcatcggtgaagtggacggtggtgtcgagcgtgttcgggaagcagttctcgaacatccacgctaagtaggcgttctccttgatgcgcttctttatctcgcgaatcttcttctccaccgcgtccgacacgaagaggcgttcagcgggcgcagggcgctttgtggtgagggagaagggttgagagttgagagttgagagttgagagttgaggtggtgagagttgaggtgttgagagttgaggtggtgagagttgaggtgttgagagt

SEQ ID NO: 4184 - DNA, 23645 bp, synthetic construct
  source 1..23645: mol_type = other DNA
  misc_feature 1..23645: note = Synthetic
ggttaccttgattatatagtccatctttggtaaagccaggcttgatgcgagccgagaaagtgaaaggtttggtgttgtctatctccgcaaacagcaccttggctgtagttgcagtgagtttgccaccattggggtcgatgaaaaggtctgtgccttctggggcggtaaagcggataaccccttccttctcgctcacctgtttgtctgcatcgttaatcatcttggtaaaatgaatgcctccaagcgtgaggtcgcaatcctggacctcaaaagctggtttgtaacttgcttctgccatttcctcttcctttgtctgttgacatgccataagcgtaactgctaacaaggcaagaactattgctttttttctcttcatactgaatattttttattgttatacttttgtgggtacaaaaataatcagcgtacggaaaatgcacaatagtcatttctaaccatttttacagccaaacgtgaccgctgacatataatataaggtgcaaagttcatagacaaacgttgccaaggtcacaactataattaaccataaaaaacaaatggttttgggcaatccgaagtataggttgcatcattgtttttgaatagagtctcttgacacgtaaactaatgccataatacaataggctggggtcttgaccaatcatgctctccaaggagaaaaagattcataaactgtttattctaagctattccgagattgccgacaaattatctgggcagtgctttgggcggtatatatgccggcggtgggctgaggggctggtgccacgataatgaaataatcggagacttggtacgggacttcgggaaataattgctatatttgtacgtgataatataaaagcctatgcgcaaggcatataaagcagacggaagccccgcgctttatatcgccacggcacagtctatgtacaataacaaacaaccaattgacaaatcattatgaacaaatcgcttatcctatcggcagcgctcttcctcgcgtcgctcttcgcttcggcagagaacacccccaccccacgtcgacaacttgctccgaagccaccaatgggatggatgacatggaacctcttccaaggcaatatcaacgaacaactcatacgcgaaaccgctgacgccatggttgaaggcggtttccgtgatgccggctacgaatatatcttcatcgacgacctctggcaaggcggacgcgaccgtgagaacaacatcatacccgacccggagaagtttccgtcgggcataaaggcgctcgccgactatgtacactccaaaggactgaagctcggcatctactcggatgcggcacaactcacctgcggcggatggacggcgagtctgggttttgaggagcaggacgcacgcacctttgcctcatggggcatagactatctgaagtacgactactgcaacgctcctgccgacagtgccaccgcccgacagcgctaccgcactatggctaccgctctgcagaactcggggcgcgacatcgtgctcggcatctgcgagtggggtcagcgccaatgcgaagagtggtgcgaagaggtgggaggacagctctggcgtacctcaggcgacgtgcgcgatatgtggaaggacatcgtgaaacaaggcggcatgggtattctggacatcatcgacataacggcgcctctggcaaaacacgcccgtcagggacaatggcccgacatggatatgctggtggtcggcctgtacggaacgggcggcccgtcgagcgacctcggtggcgtaggctgcaccacgaccgaatatcagacacagatgagcatgtggtgtatgctgtcgtcggtgcttgccatgaccaacgacctgcgcaaggtgaccgacgatgaccgccgcattctgctcaacaaggagattatcgccatcaaccaagacgcgctgggcaaggctgccgaacgcatcgtgaacctgcctaggcagcaggtctacatcaaaccgctcgccgacggttcgcacgctgtggccatcctcaacccctcggacgaagcccaacgcataagcctcaactttgcaagcctcgggctcaacggcaagtacaccgtgcgcgatgtatggcagcaccgagacatagcccggaaagccaagagctggaaaggaagcgtggctgcgcatgagaccaaggtgtttgtggtgaagtaagaagacacctaaccgacgaaaaacgaataacaggagcatctggcggcaagctaaaaacgctgcagccatgatgctcctgtcatcttatagcatgcagacatcaaccgcgacaacctcccctttgccttcggtgaccgttgcacaggaggaagggcgcagctatcgtctgcggacatcccgaaaacaagccgtgtggtcacccgagaccagtcacaatgacctcgggaaaccacacggcttgtcaattagactcgcacgccatcggggcgcggaggaagaggaatcagagagcagccacaacctctacctctacgagcgcattcttgggcagcgtcttgacagccaccgccgaacgggctgggtaaggctcgctgaagaaggtggcatagacctcgttcatggcagcaaagttggccatatcagagaggaacaccgtggtcttgaccacatggctcaagtcgatgcctgcctcggcaagcacatgggtaacattggtgagcgactggcgggtctgctccttgatgccgccctcggcaaattcacctgtggcaggatcgatgggcagctggcccgacgcaaaaacgaagccaccggccacgatggcctggctgtaaggccccaccgctttgggggcgagttcagaatggattactttcatcatattatctgttagtgtatatattgtccttcgggttacaaaaatactatttttccacgacaaccaactatatttccctgtatttctacagctgcatggcagaagcggaagcagagactctggagccgtaaaggaagcagacaagacaagcagcgggtgtgtcatatcctatggatgacacacccgcttcctctatgtagactctcttattacggtttcgcctctcagagctatctcctctatcggcttgtctgcatcggcaagatgctccaacagcagtcggcacccctcctgcgccatcttggcgataggctgttcgacagccgtcagctgaggatgtaccaaggtggccagggtagtacccgacatacagcagagcgccacatcatcagggatgcgcaagccgtgcttctggatgacgctcttggctcccaggacagcggtctccgtaaatccgaagacggcgtcaaaaggcacccccttggccagatactgctccatcacccaactgccctcttcggccgacaatgccggcagcaggacatcatgcgactggtactcgacatgaaacttctcaagcgcctcacgataacctctcaaccgttcataactgttgcggatataagacggaccgggaatatggatgatgtgcttgtaacccttgcgcagcaaagcctcaaccatgaaaaacgccatgatataatcgtccatgcgcacctgggaagcccagaccctctccacggttctgtcaaaaaacacgatggggatgcctcgctctatcaccttattatatagatctacgttgcgctccttgtcacaggcactcatcaggatgccatcgacgcgcagctgctccatcatcaggatattctcacgttcctgctcgggattctcattggagatggctatcatcaccttgtagccctgtctgcgcaggatggcctgtgcctcgttgataaaggtcatatagaacgtggtgatgatttcggggatgatgatgccgatgttgtgggtactctgctgcctgagatgtactgccagttcgttgcgatgataccccatctgctcagcggttgccaaaatcttctgcagggtttcggccttcacattgccggtatctcccgagagggcacgggagacggtggacttggagatgcccaacacccttgcaatatccataatagttacgtattttgccatatctctttgggtcttttgtctatgcgcttgtaaagatacttattctccatgagagcaacaacaaaatgcggatctttttgggaacggttgcagaaaatgggaacggttgcgggagcggttgtgggaaaaaagacgctttttttcttgaattgcctgcgaattcacgctacctttacagcgtgataagggaaaagcaggttctctctgagagtactacttcccaacacctaagaattaaaaacaacaatacactacccaaacctaaaaaagatggaacaagacagtaaatgtcaagcgaactgttcacagatgaacgactcgcagaaaaacaatgcagaggggaaagttcccttcatcagcaagctcgcctatggcatgggcgacgtgggctgcaacttcagttggatgtttgtaggcaacttcctcatgatattctacacagacgtgtttggaatcagcatgagcgctgtagccaccctgatgcttatatcccgattctgggatgctatcaacgacccaatcatcggcgcactcaccgacaagacccatactcgctggggacgattccgcccatggctgctcttcggagcccctatcacggcactggtgctgatactcactttctgggcgcaccccgaatggagccagaccgccaagatcatctacatggcagtgacctactgcatcctggtactgggctatacctgcgtcaacctgccttatggcactctctgcggagccatgacacaggatatcgacgagagagccaaactcaacaccagccgctcggtaagcgcgatgatggccatcggcgtaatcaacatcgtaaccgtgccactcatcagctggtttggcgccggcgataccaaatatggctatctcgccgtggctgtgctctatggcatcatcttcgccgcctgccatctgttctgtttccgcgaaaccagagaggtggtggagatacctgtgggtcagaagctcccgctgaaggtacagctctgtgccatgatgaagaacaagccctatctgctcgctctcttaggccagctgctcttcggtttcatccactatggacgcaacgccgacatgctctactatttcacttatgtagaaggttcggccacgctcttttccttctattcgatggccatcatcgtgccaagtatcatcggtgcagcctgcttccccatggtattcaaaaagaccggcaataagggcctggctgcagccatcttcgccttcctcaccggtgtcacaatgatagctctgtacttcttcagtcccaacggtagcgccatcatgttctacctgttctcagcattgtcatggttcttcttctctggattcaacactgccatctatgccatcatcccagactgcgtggaatatggtgagtggaaaacgggcatcagaaacgatggattccagtatgctttcatctctctgggcaacaagataggcatggcgctcggcacatcgcttctcgccattgccctgggcagtgcaggatatgtaagcaacgctgtgcagaacccggaagtgctgagcatcatgcaccacgccttcagcaccataccaggagtgttatggatcatcaccgcagggtgtctctgtctatacagactcaacaagaaacaatacaaccagatcatgacagaactggaaaacaaaaagaaataaaactccatcggtcatcaggccgatgggtgggacaagacaagcgaaaattgcccaacacactaacattaacgataacaaccataaaaaaacaatacaactatgagacaagcaatattggtagaacccaagcgtatcgagtttaaggaaatagcagaacccaaggcagctgacctgacagcccatcaggtgctcgtcaacatcaagcgcatcggcatctgcggcagtgagattcactcttaccacggtcttcaccccgccacattctatccagtggtacagggacatgagtactcgggagtggtagtggctgtaggcagcgaggtaaccgtatgcagccccggtgaccacatcaccgcccgcccacagctggtctgcggcaagtgcaacccctgtaaacgcggacagtataatgtctgcgagcatctgcgtgtacaggcattccaggctgacggcgcagcccaggacctcttcgtcgtagacgatgaccgcgtagccaagttgcccgaagggatgagcctcgactatggagccatgatagaacctgccgccgtaggcgcccatgccagcaaccgcaccgaggtgaaaggcaagaatgtagtggtgagcggtgctggaaccatcggcaatctcatcgcccagttctgtatcgcccgtggcgccaagaacgtactgatcaccgacgtgagcgacctgcgtctggccaaagcccgcgagtgtggcatcgagcatacgctcaacatcaccaagaaacccctcaaggcagctgcccaagaactcttcggcgaagaaggctatcaggtaggctttgaagtggctggcgtagaggtttctatccgctcgctgatggagactatcgagaagggcagcgacatcgtggtcgtggctgtctttgccaaagacccagcccttagcatgtttcacctgggcgagcacgaactgcgcctgatcggatcgatgatgtaccgccacgaggattatctcaccgccatcgactatgtgagcaaaggcatcgtcaacctcaagcctctcataagcaaccgtttcgcctttgaggaatatgatgacgcatacagattcatcgacagccatcgcgagacgagtatgaaggttatcatcgacttagaccagaaaccacaagagaagaaatagcagacaggcaagaagagacagtctgcacaccattggcagatacagagaaaggatgtactgacgtgtacagactgtccaaaagattggaccgtagcaatgggcaccgccagaaagatgcccacgcaacggaagacagacaatatatccagcaatctaaaactaaagacgacaatggaaaagaaacaatcagtaataggtatcggcgaagctctctttgacatgctgccaagtggaaagaagctcggtggcgctccagccaacttcgcctatcatgtctctcagtttgggctcgacagttgggctgtcagcgcaatgggtgatgacgagttgggcaaagaactggaaaaggaactcgacgaccatcatctcaactatgagatagaaaagacagactaccctaccggcaccgtacaggtgacgctcgacgccaatggaataccctgctatgacatcaaggaaggagtagcctgggacaatataccctatacccccgccctggacagattggccaagaactgcaccgccgtctgctatggctcgctggcccagcgcaacgaggtgtcacgcaataccatctaccgatttctcgacaatatgcctgaagagaaagaaactctcaaaatctttgacatcaatctgcgtcaaggattctataacaaggagattatcaccgagagcatcaagcgatgcaatatcctcaagatcaacgacgaggaactgatcaccataagccgcctcttcggctatccaggcatagacctggagaacaaatgctggcttctcctgggcaaatacaacttgaagatgctcatcctgacctgtggcgtaaacggcagctacgtatttacccctggcgagatatcatttatcgagacacccagagtggaagtggctgacaccgtgggcgccggcgattcgttcacaggcgcatttgtggcaagcatcctgaagggcaagagcgtaagggaagcccacgaactggcggtgaaggtatcggcatacgtctgcacacagcatggtgccatgcctgtattgcccgaagaatataccagatgacacctcttctgccccatagcggctgaaagcggccgtgacattggggcagaatcagcatgcggaccgctggactcggacacacgcagagcaggaagcgttatgagcacttgttatgccaacgacaaccaactatatttccccatattttatttgcggatgatgaggaggtgatggctgggaggaagagggaaaactgcagataatcgcctggatataaaaaaaatatggcgattttgttgacaattcgagatattatcactaaatttgtcaacaaatatcctattaagatgaaacacaactgctttagcatacgtctgcgggcggcgcgcctgatgagcggcctcagcatggcacagctggctgaccgatgccgaatcgggctgacgcggcagagcatatcacgctatgagcaaggggcgatgactcccaagccacctctgctgcacgccctcgccgaggcgctcgccatcagtactgactatctgatgggccacggcgtagagatagaccgccccatgctgcgcacggggataggaagcggcatgggagacgaggcgacagagatgatgtcggcccaagtggcatattgggctgagcagtatctggctgaagaacagcggactggcatagcccatacgtttgtcaacgagatagcaccggtcgttgtgggcacccaagatgaagcactcaaggcagcacaactgctacgcaagtcatggcgctgcggcgagggtcccctgccccatctgctgcggctcatggagcgcaagggcataaagatactcgacacgcctctgcccaaggatgtctacgggctcagtacctgggcagacgccatccatccgctcatcatcatcgactcgcgcccggagaagactaccgtcgaaagactgcgtttcaccgcctgtcacgagttagggcacctgatactcaccattgccgacggcacagaggctgcgatgacagagaaactatgcagcaagtttgccagctactttctcttccctcctgacacatatatagaagaggtgggcgagcaccgcgacagcatcaccctcgcagagttggccgacctgcgcggtgtctatggtacctcgatagccgcaatggtgcatcaagcctacgatctgggcatcatcagtcgcgagcactacgactggtggtatgacgagatgatcaagaaaaatccacgggaagaaggatggggacaatacgacatcgccgaaaccataggcagggaaaatcgtatcaagtctatcgccgaaaagagtataccgagaacccaataacaatcaactaacacatacaactatgaaacatctattatgtacattgctgctgacattgacagtatgcctctgctcagcccagaccgaacacatgaagtttaagggcatccctatggaaggaaccctgcagtcgtttaccctcaaactcaaggccaaaggatatgtgcccttaggcaccgaagacggcgtatcagtgctgaaaggcgaatttgccggttacaagaattgtcatatctatgccgtggccgacaagagtggcatgatatgccgtgtctgcgtagagttccccaaaatggacaagtggagtgacctcgaaagctgctactccagctacaaggacatgctcaccgagaaatacggcgagcccaaagtatgtgtggaggaatttcaaaacaagtatgcagatgacgacaacagccgcatgtacgaagttaagtttgaccgctgcaaataccacagcacctttgcctgcaagaacggagatataaccctcgagataacccatcagaaattcgactgcttcgtgcagctcagctactacgacaaaaccaaccaggacaagctgagacaaaacattatggaggatttgtaaagtcaaggaggctaaaaacaaaaaactcccaccgaagcgggagtataggttttacccttcggcattactgccttattgtgataagatgtaggaatcttattctctgctgcaaatatataacaaataatttgtacaaacaaacaattttctgtatttttaccgaaaataactaagaaaacatcatcataactcattatggcacgaattcttggcatagacaccggcaccaacagcctcggctgggccatcgtagataaggacgagaagggctatcatctgaaagaccgcggtgtaaacatcttccaggaaggtgtaaagattgacaaaggtatagagtcatcaaaagcctcagaacgcacgctgcacaagagtacccgcgtacgctattaccgcatcaagctgcgcaaaataaacctgctgcacattctgagtgacaatcatctctgccctccactctcacatgaagaactgagagactggcgcctcaaaaagatatatcccaaaaccgagctcttcatgcaatggcaaagcaccgatgacgcagctggaaagaatccctatgcatgcagacacagatgtctgcacgaagtgctggatatggacaagctgacagaccgctacgaacttggtcgcgccttctaccacatcatccaacgcagaggttttctgagcaaccgcaaagaacaggactctgatgacagtggcaaggtaaaggaaggcatcagtgaccttaccaaagagatggaaaaagccggctgcgaatatctcggcgactacttctatacattatataataataaggagaagatacgcaatcattatactgcccgtatagagcattaccatgccgagtttaaggctatctgtgagaagcagaggctccctgaagacctcgcgcagcagatagaaaaagccatattcaaccagcggccgctgaaatctcagaagaagcaggtaggcaaatgtgtctttgaaaagaacaaggctaaatgtccggtgtctcatcctaaatatgaagaattcaggatgctggcgtttatcaacaatatcaagataaagacacccgaagacgcaacgctgcgcccactcaatgcggaagaacgggaaaacatcatgcccctgttctacaggaagtcaaaagcgaatttcgactttgaggatatcgccaagaaacttgcccccaagaagatgtatggctgcatcaagaaaagcaaagatgccgaaatgccatatttgttcaattacgatatggacacctcggtttccggctgtcccgtaactgccagcctaaaagacatattcggtgatgactgggaaaaaggcatcagcgaggtatatacattgggcgaaggcaagagcggaagccagataataaatgacgtatggcatgccctgtttttctattcagacaccgacaagctgaaagagtttgcccaaaagcggctgcagctcgatgaagaggatgcaaagaagttcagcaccatcaagataccgtctgcctatgcctcgctcagtctgaaagccatcctcaagattcttcctttcctgcgtagaggtctgctctattcgcatgccgtattcctggcgaatatggggaaggtcgtgcctcagtatatatgggaattgccggaaaccagagaaggtgcaatagaaaatgtcatcaatgagataaatagatatgacgcccacacagactcacgaacgctggaggtctgcatcaaagactatctgaagcagcagtataatgcgacggatgacgcgctgaaggaactgtatcatccctcgatgaccgaaacctacgcacgggtcatgcccaacgaactgggcgaataccgcttgggctctcctcgtctggacagcgtacgcaaccctatggctatgcgctcgatgttcagactgcgcaaactgataaaccgccttctggcggaagggaaaatagatgccgacaccactatacatatcgagtttgcgcgcgaactgaacgatgccaacaagcgggctgccctgcacgactaccaacgcgagaaccaaaatgagaaggataaggcacgcaaagccatcatcgacctgtacaaagaggaaacgggattagaaatcgtgccgaatgataaagacatactgaaatatatgctgtgggaagagcaagatcacatttgtctctataccggagacaacatctcgatagccagcttcatcggcgccaatcccaagtatgacatcgagcacaccataccacgcagtgtgggcggagacagcacgcgtatgaatctgactctctgtgactgcagattcaatcgcgagaccaagaagaccaagttgccttcagaattgcccaatcacgaagaaatcctctcccgaatatccggatggaaaagggaatatgaagagctggagaccaaaatacgcaagaacaaacgcgccaccaagggttgcagcaccaaagaacagagagacaagatgatacgcaagcgccgcctacgggagatgcaacgcgactactggaaaggcaagtatatgaggtttaccatgaaggaagttcccgaaggcttcagccgcagacaaggagcagacatcagcatcatttccaaatatgcacgcctgtatctgcagtcattgttccatcatgtgtataccgtcaagggcatagccacatcagacttccgaaagatttggggtatacaggaaatctatgacaagaaagagcgtgtgaatcatgtacaccactgcatcgatgccatcgtcatcgcctgcataggaagggatgaatacaacaagttaggagcctactatcacgatgaggaaaactcggaatggtttggtgcgtcaaaagctcatttcgacatgccttggcccacatttgtcacggatatgaaaaccatccaggatgatttactggtctatcattatactcccgacaatatgcacaagcaagggcgtaggcgcatactcatcaatggcaagaaagtcatgagtaaaggagatgctgcccgtggcagcctgcataatgatacatactatggagcaatcgaacacgatggagaaatcaagtatgtgaaacgcgtggatctggcatcgctcaatgtggcacaactcaatgttgatagctttataaagagcattgtagatgaaactgtaagggaaatcataagaaaagccatagccgagaagggaataaaagaggctatcgccggcccgatatggatgaatgaagagaaacggatacctatcaagaaggtaagatgctacatgccctctgtaacatcacctttgcacatccgacagcatcgcgaccagtcggtcaaagagtataagagaaccttccatgtagcaaatgacagaaactatatgatggctatctacaaggggaaagaccaaaaggggaaagaaaagagcgagtttgagcttgtcaatatgctggaagccgcacgatacttcaagaccagtaatgacaaagaggcagccgactacaatatagtacccgtcaagagcacaaacggctacccattggcttatacactgaagataggaaccatggtgctgctctatgaaaacaatccctcagaaatctgggaaggaacaaaagctgagattagtaggagattgtataaggtgacgggattgtctatcttgcctggcaaaaataattcctatgggaaaattacgcttacgttccatgaagaagcccgagcaagcaaagaaattaaggcaaaaaatggagcctataaacaaggggaggatttacgtccttcgatactgatgctgcatacccaaataaaagcccttgtccaaggatatgattttgaaatcaatgaagctggtgaaatcaaaagactaaggtgatatgataaagcaaacattattcttctccactccagtaaggctttctctgaagaattgccaattggtaatctcatggaaagatagcgatgatgtagtaacgcgtccgatagaagacataggatgcgtgatattggaaaacctgcagacaagcatcagtctgccattgctcaacgagttggtgaagaataatgttgctgtaatcttatgcgacaacaagcagatgccaacagccatgctgcagcctttggacgcaaacaccactcaggcagaaagcatcaagagccaattggcagtaagcgaccctatgaagaagcaggtatggaaacagattatagaagcaaaaatcaaaaaccagtcgctgttattaaccaagttgggattgaatggagctgctctcaagccattatatatagctgtaaggagtggcgacactgacaaccgtgagggaattgccgcaaaagtatattggaatctactgtttggtggaaacttcaagagggagagagaaggccccgtgcccaacgcaatgctcaattatggttattccatccttagggcagctactgcacgtgcgctactcggctctggcctcttacccaatttaggcgtcttccataaaagcagatacaatgcttttcccctggcagacgatgtcatggaaccctatcgcccctatgtcgatgaaatcgtctatcaactgttccgtgacggtcaccatgaggtaaacaagacaactaaagaactaatactgagagtcctcaattgtgatgtaaagataggaagcaagacaaggcctctacaagtagctctgacttttacgtctgcatcgctcatgaaatattactcattagaagcgaagaaactgacattgcccgaggtgacatgacagaatacaggctaaatgcataccatatcatgtggatattcgttttcttcgacctaccggtcacgacgaagaaggagctgaaggcagcctccctatttcggaagaacttagaaaaggacggcttcgccatgatgcaattctctgtatacatcaggcactgcgcatcacgtgagagcatggaagtgcatatcaaaagaataaaatctatgctgcctgaatcagggaaggtaagcattctgactgtgacagacagacaatatggagacatctacaacttttggggagttcccaagagtactaaactaagcaaaatcacaaaaaaaatcatcagcgaacctgtccagttggagtttttttagtatttttgcgatagaaacaaagcctacacggccattttttataataaaaaatataagtaatatattagtatatagcttattagatattataggttgtggtttgatgtaggaaacggacgatatacaacgatgcgctgaaagccaatcagtagcaagcggttgtggtttgatgtaggaaacggacgatatacaacttatcataccatggggcgatatcaccgcagttgtggtttgatgtaggaaacggacgatatacaacataccgccctgcatgctcttcgagcaaaaggttgtggtttgatgtaggaaacggacgatatacaacatacttgattgtaacgaatttgaagatgcagttgtggtttgatgtaggaaacggacgatatacaacttgcggcataaaaagaaagtccagccgtaggttgtggtttgatgtaggaaacggacgatatacaaccggtcaagcgagaatattatgaagattctgttgtggtttgatgtaggaaacggacgatatacaacgtagcatctttgcaccgcttttcgagttgcgttgtggtttgatgtaggaaacggacgatatacaacattcatcagattaacagtaatagcagcaggttgtggtttgatgtaggaaacggacgatatacaaccaatcaatacgactgcgatggccgtcaggcgttgtggtttgatgtaggaaacggacgatatacaaccagcacgccgacgtacatggcgccgagcgcgttgtggtttgatgtaggaaacggacgatatacaacgggctatcatcaaaagacactttgatagaagttgtggtttgatgtaggaaacggacgatatacaacataaatttttccataatgtttaatgtttagttgtggtttgatgtaggaaacggacgatatacaactaattgtagtgacgaatgatagaaaaaagggttgtggtttgatgtaggaaacggacgatatacaacatgtgtcatgagcgaattccacataaggcagttgtggtttgatgtaggaaacggacgatatacaacttaactcttttaggcctcgttcctttgttgttgtggtttgatgtaggaaacggacgatatacaacacgttcttgtgctttacgttcactctggccgttgtggtttgatgtaggaaacggacgatatacaaccgagttaaagcaaggtgagacgcacatgcgttgtggtttgatgtaggaaacggacgatatacaacgaaattgcaatacatctttacggctaaagcgttgtggtttgatgtaggaaacggacgatatacaacagatattgatgaagtgagagataaacagtagttgtggtttgatgtaggaaacggacgatatacaacacattcctatcatggttatcgacaaactggttgtggtttgatgtaggaaacggacgatatacaacatgttgcggtgacatgtgcagccaactgctgttgtggtttgatgtaagaaacgaacgaggaactccatgtgaatatcggttctcagctatgttgtggtttgatgtaggaacagacaacacgggatgccattctcccccaagcgactccaccagcggatggcaaagcggatgcgacgcctcctatatatataataaggtatatatccgcgtccaatcccgcccctttgtgcatggcagaagaaaaaatggggattgagggattgggggtcaatgttttttttgtaactttgtagcgtctttatggcagacctggggcttgacggcgcaagcagttatggctgtgggatagacacggagcggaaagaaatgttatcaagcgatatttctatttatactgatatagttatgacaaattctacagagaatctctatcagcttgacggtagagtaccattgggcaaagcagtcccattcggtcttcagcatgtactggccatgtttgtcagcaacattgcgcctatcatgattcttgccagcgccatagggttggacaaatcagtcagtgcggtgctcgtacaaaactgtatggtaatagcgggtataggtacgctggtgcagctctatcccgtatggcggataggttcgcgactgcccatcgtgatgggtatttccttcaccttcctctcgctggccatcagcattggcgcagcctatggcatgggcaccctcatcggagcggtgattgtgggcggcgtgctggaaggactgctgggacttttcgccaaattctggataaaactgattccgcatgtcgtggcagccactgtggtgacagccatcggattctcgctgctgccggtgggagccaactcctttgccggcggactgggcgcagccgacttcggcagcatggacaactggattgtgggcagcgtgacgctgttggcctgtctgctctgccaggtgtttgccaagggtttcctgcggtcgctgtcggtactcatgggcctcatcgcgggctatatcctcgccctcttcatgggcatgattgattacagcggactcagcgatatatcgattgtggcactacccaagctgctgccctttacgcctgagttcaacatcggcgcgatactctcggtgacggcggtctatctggtctcggcgacagagacgataggcgacacatcggcactctgcaacagcgcgctcggacgcgaccccaagcagaaggagatggggtctgccatctgctgcgacggttttgtgagcagtgtatcaggactcttcggctgtacccccatcacctcgttcagccagaacgtgggtctggctgccatgtcgggcgtagtcaaccgcttcacgataggcgtgggtgccgtggtaatgattgtgggcggcatattcccggctataggctatgtgcttaccactataccccaggccgtacttggaggctgcaccatcatgatgtttggcagcatcctctttgccggtttcggcatgatggcccgctccggattctctcagcgcaacatgattatcgtgagcctctcgctgagcgtgggactcggtttcacccaggccacagacatgttcaacatcttccccgagattgtgcgtacggtatttgccgacaactgtgtggctgtggtattcctcctggccgtggtgctcaatctggttctgcccaaggagaaggaagacgctgctgacaagcaataacgatacaagacactccattactgaagagacgacagccgacgatgggccccacagcgccctgccggttgtcgtctcttcggtttcaggggtcggcgtgtctatcataatcatgaaaaatcaagcattttgccattctttcgttgcataaatcaaaaaaaactcctaattttgtaaactttctgcaataaacgataataactatggacgacgacaagaccaaagaggaaacagacgatatactggacaacgaccagcactccgactatcgccccgccgaccgtttcgacgcttctgccgtgcatcacctttcgggaatgtacaagaactggtttctggattacgccagctacgtgatcctggaacgtgccgtacctcatatcgaggacggtctgaagcctgtgcagcgacgcatactgcacaccatgaagcgcatggacgacggcagatataataaggtggccaacgtggtgggcgaggcgatgaagctgcacccccacggcgacgcgtcgataagcgacgcgctggtgcaactgggccagaaggagctgctcatcgacacccagggcaactggggcaacatactgaccggcgaccgtgctgctgccggacgatacatcgaagcccgtcttaccaagtttgccctcgacacggtgttcaaccccaagaccaccgactggcaactgtcgtacgacggccgcaacaaggaacctatcacgctgcccgtgaagtatccgctgctgctggcccagggagccgaaggtatagccgtgggtctggcgtccaagattctgccccacaactttaccgagatatgccaggctgccatagcctatctgcgcggcgagaagtttgccctctaccccgacttccccaccggcggttcgatagacgtatccaaatataacgacggactgagaggcggagtggtcaaggtgagagccaagatagagcaggtagacggcaagacgctcgccatacgcgacatccccttcaccaagaccacatcgacactgatagacagcatcaccaaggctatagagaaaggtaaaatcaagatacgccgcatcgacgacaataccgccgccgaggtggagatactgatacatctggcgccgggcacaagccccgacaagaccatcgacgcgctctatgccttcaccgactgcgagaccaacatctcgcccaactgctgcgtaatcaaggacaacaaaccctgcttcctcaccatcagcgacgtgctgacccactcggtcgagcacaccagagacctgctgaggatggagctggagatacgccgcaacgagctgctcgagcaactgtttttcatctcgctcgagcgcatcttcatcgaggaacgcatgtacaaggagacccgcttcgagcaggctcccaaccaggacgccgttgtggagttcctcgacgagaagtttgctccattcaagaagaagctggtgcgcagcatcacacgcgacgacctgctgcgtctgctcgaaatcaagatgcagcgcatcctgaaatatagcaaggacaaggccgacgaactgctggcgcgtatcaagaaagagctcaaggagatagagcacgacctggcccacatgaccgacgtgaccatcaactggtatgagtatatcatcgagaaatatggcgccgaccatccacgccacactgagatacgcaactttgacaccatcgaggctaccgaggtaatcgaggccaccgagaagctctacatcaaccgcagcgacggattcatgggcaccggactcaagaaagacgagtttgtgtgcaactgctccaagatagacgacatcatcatcttctaccgcgacggcaaatacaagatagtcaaggtggccgacaagttcttcgtgggcaagaacgtaatctgggcgcaggtgttcaagaagaacgatgtgcgcaccatcttcaacgtggtctatcgcgacggccgcaagggcatgtgcttcatcaagcgtttcttcgtcaacggctgtacccgtgaccgcgagtacgacctgacccaaggcaccgaggggtcgcgcatcatgtacttcactgccaaccccaacggcgaggccgaagtgataaagataacgctcgaacccgactgtacagccaagaagaaggccaatatattcctcgaaaaggatttctccgaaatacttatcaagaaccgtacggcacgaggcaatatcctcaccaagaagcccgttcaccgcatctcgctcaagagccgcggccactccaccctaggcggacgcaaggtgtggtacgacccctatgtgcgacgcatcaactatgaagagcggggcaactacctcggagagttcagcgacgacgaccgcatactggttatcctcaacgactacagctactacttcaccgacttcgacgccaacaaccactatagcgagggcatcgtcgtcatcgagaagtggaatcccgagaagatatggaccgccgtgctctatgatgccgacaacaaccgtctgctctacatcaagcgatttgcgctggaatactcgcgcaagccgctcaacatcatgggcgaaaaccccaagagcaagatggtgctgctcaccgacacgccctatccccgtctgagggttaccttcgagggcgtcgatgtcaagcagccgccgctggaggtcgaggctgccgacttcgccaccattcgctcggtcaaggcccacggccgccgactcaccatctacaaggtcaagacggtagaagagcttgagcctacccgccagcctgaacccgagcccaatgccagtgacgccgacgacagcaccgacgacaccaatctggaccccgatgccggcaagagccagcagcaggtcatcgacgaaatcaccggccaactcagccttttcaccaatgacgacaattaagaccatcctcctggcgctcctggcagtcgtgcccagctccatcgcttgggcccagagcgagcgcatagtcaccaatgcccgcatggtgggcattggaggcgccgaggtgctcgacacctatctctccccgctccattacagaggcaccgaactgagatacatctcacacaccctgcgcgagaaaaccgacaccacgcgcctcttccatgaaatcatccaccagggcagcctctctcttctcgaaaacaagagcggctacggtggcgagatggcaggcagctacaatttccagtacggatggcactggcatctatgcgatttccatttcaaggggagcaccctgcgactcgatgtgggtggaaacatcgacgccaacataggtttcatctacaacacccgcaactccaacaatcccgcacaggccagagcctatctcaaccttacgcccacagccgccgccacctacaccctgcactggcgccatccgctagcagtgagatacgaggtgtggctgccagtcgccggcgtcatgttctcgcccaattacggccagtcctactacgagatattctccaagggcaactacgaccacaacgtggtgcccacctgggtaggcaacgcgccgtcgatgaggcagatgctcaccgtcgattacaacctgtggggcaccaccctgcgcgccggctatctgggcgactaccagcaagccagcgtcaaccacctcaagtcacacatctacacccatgcgtttgtcatcggtgtggtgcgcaagttcagcatccaaaagattaaacagccatgacccttccacgactttctcccttgttccgcctatgcctggcatgccttgtagccatcagcatgaccagctgcgtagatgaagacgaatataccaactcgccgagcggcaactttgaagccctatggcgcatcatggacgagcactactgcttcttcagccagaagggcgtagactggaacgaggtctatcagcgctactcgcgccagatagacaaccacatgagcgagaaccagcagtttgaagtgctctgcaacatgctcagcgaactgcgcgacggccatgtcaatctctactccaccttcgacgtcggccgcaactggagttggcgcgaagactatccctccaacttctccgacacactctcccgacgctatctcggcaccgactaccgcatcgcgtcgggcatcagctaccgcatcctcgacgacaacataggctatatgcgctgttccacctttgccaacggcttcggcgaaggcaacctcgacgacatcatggcctacctgctcacctgccgcgccctcatcatcgacatacgcagcaaccccggtggaatgataagcgccgccgagcagctggctgcccgctttaccgacgaagacatcctcgtgggatatgtgcagcacaagacgggccgcggccacaacgacttctctgccatgaaggagcagcggttgcgcccgagccgcggcatacgctggcacaagccggtggcagtgctcaccaaccgcaccgtcttcagcgccgccaacgagtttgtcaagtacatgcgctgctgtccacgcgtcatcaccgtgggcgaccacaccggtggcggaggcggcatgcccttcagcagcgagctgccctgcggatggagcgtgaggttctctgcctgccccatctacgaccgcaaccgccagagcaccgaagacggcatagcccccgaccatgtggtgagcattaccgacagcgacctccagcgcggcatcgacaccatcatcgaggaagcccgtaaaaaattgaatgacagcaaataaaaactcacgcatcgtcacgtttctcatttttttatcgtaactttgcaccgttattgcgcttgtggcggaattggtagacgcgccagacttaggatctggtggcccaggtcgtgtaggttcgagtcctatcaggcgcaccattcagaatcctaactgcttgaatatgagcagttaggatttttgcttttatgaaattgccgagtttttgccgagttattaagggcttaccaatataagcctcggcaaaagtgtcataatatcaatttcaacatattattttcacacataaaagagaaaacaaccctatagttgtgctttctcattaaaatcagttatctttgtaggcgaaatggcaatagccaaatataaatggtacaaagcgaaatacgtctaagatgataaaggaaacaacatctcctgttcaaaatataggagcacaaatgagccaagaagaaaaaccttggtttaaccattcgcagatgatagccaatatcatgtccgcaagaatgaaggaacttggaatgactcaaaagatgttggcagagaaaatgaattgtacccaacagtacatttcaaaaatcttaaaagggcgtgagaacctttcgcttgaagccataagcaaaatagagaatgccttggatattcatttcctgcaaatgaatgaatagccatgttcttataagtataacgataaaaaagataagatatgccagtacaaagtgaagctgctctcgaaaacggacttatagatactcttcaaaagatgaactacgagtatgttcatattgaagaggagaagaacctgtctgccaatttcaaaaaacagttggagaaacacaacaagaagaaattggaagaacttggtcgcactgag

SEQ ID NO: 4185 - DNA, 23636 bp, synthetic construct
  source 1..23636: mol_type = other DNA
  misc_feature 1..23636: note = Synthetic
aacaccctgagtaattgacgatttacgaattttcgattttcgattgattaccatgcaatgacagaattggaattaaagcaaaggttcagatctttttccaataggattgtgaaaatggtggactctatgcctaacaccatatcttctgttgcaattgccaaacaaatcgtacggtcaggtacgtcaccctacgccaactatcgggctgcttgcctgggtaagtcagacaaggattttctgaacaagttgaagatggtggaagaagaattggacgaaaccggacaatggctggaactgatcatggacactgagaagttgccgcacaatcgcgtacagcctctctatgaagagagtcaggaactacagaaaatcattgccagttctatcctaactatgaagcggaaacttggtgaatacccactaccgccaaacaaataaatcgaaaatcgaaaatctgtaaatcgaaaatataaattgtaaatttttaaatagtaaaatagtaaaattaaaaaatgagcaagcaattagaaaagattaagcaactcatcgagaagcgcgaacaggcccgtctcggtggcggtgagaaagccatacagaaacagcacgaacgcggcaagtacacagcccgcgaacgcattgacatgttgctcgaccagggatcgttcgaggagtatgacatgttcaaggaacatcgttgccataacttcggtatggagaagaagcagttccctggcgacggcgtggtagctggttcaggtaccatcgacggccgactggtgtttgtcttcgcacaggacttcaccgttcatgccggttctctgtctgagacgatgagccagaagatctgtaaggttatggatatggccatgaagatgggcgctcctgttattggcattaacgactcgggtggtgcccgtattcaggagggtatcaacgccctcgccggctatgccgagatcttcgagcgtaacattctggcttcaggtgtgattcctcagatttctggtatcttcggcccctgcgccggtggtgctgtctacagtcctgcactgacagactttacgctgatgatggagaacacctcatatatgttcctcacaggcccgaaggtggtgaagaccgttactggtgaggacatcgaccaggaacatctcggtggtgccagcgtacactcaaccaagtcgggtgtgactcacttcacagctaagactgaggaagagggtcttcagatgatcaagacactgctctcctatattccgtcgaataacatggagctggctccccgtcgcaagtgcgatgatcccatcaaccgcctggaggattcgctgaatgaaatcattccagagaaccccaacgaggcttacgatatgtacaaggttattctggccgttaccgatgatcatgagttcttcgaggtgcagcctaagtttgctaagaacatcatcgttggctttgcacgcttcaatggccagagcgtaggtatcgttgctaaccagcctacctgctatgctggtgtgcttgacgtgaacgccagccgtaagggtgctcgtttcgttcgcttctgcgacgctttcaatatccccatcatttcgtttgttgacgttcctggcttcttgcctggtactggtcaggagtacaatgccgtcatcctgcacggagcccagttgctctatgcctacggtgaggctactgtgcccaagattaccgttacactccgcaagtcctacggtggttctcacatcgtgatgggttcgaagcagctccataccgacctcaactatgcatggccctctgccgagattgccgtgatgggtgccagtggtgctgctgccgtgctctacgctaaggaagccaaggctaagaaagaggctggtgaggacgtgaaggccttcatcgctgagaaggaggacgagtacaacgagctgttcgccaatccttatcaggcagccaagtatggctatattgacgatgtcatcgagcctcgcaacactcgtttccgcatttgcagaggtctggctcagctggctaccaagcgcgatgctttgcctgccaagaagcacggtaatattccgatgtagtgacatttgacaattagacaatctcacaattggacaattctaatgtaaattgtaaaatagtaaaattgtaaaatagtcaaatagtaaaatagtcaaatatgaagaatgaagtatatgctgccatagctcttgctctgcatgagcatttaggtaacaatgtccatgacgtggaacccggcatcatcacgattgccgagcatcctacgcagtggaatgcctatgtacagacaatgacagctcacccctaaatcatttgtgaacatgaaagaatataaatacaccattaatggcaacaagtacgaggttgctattggtgaaatagtagataatgtggctacgctgactgttaacggcgaggaattcaaggttgagatggaacgcgagccagagcctgagaaaaagaagcctgttgtacgtcctgcagctgctgccgctgaacccgctgatgctcctgccgacaaaggtgctgccgtcaataaggccaatgccgtgaaggctccgctgcctggtgttattactgatatcctggttgaagtagggcaggaggttgaagccggacagaatgtcatcgtgctcgaggctatgaagatggccaacaacctgcagaccgagcgtgctggtaaggtaactgctatttgtgtgaaagttggcgaaagcgtcatggaagacgacgctttggtagtcattgaataacaacaacagaaattagtaatgaacaagaacgaactgaaacccgctgccgtctttgagcagtttgcgaagatcaacgcgattccccgcccttcgaagcgcgaggaaaaaatgattgagtacctgaaagaatggggcgagagccgcggacttgacacgaaagtggacgagacgggtaacgtcatcattcgcaagggagccacgcctggcatggagaatcgtaagacggttatcctgcagagtcacatggatatggtgtgcgacaaactggtcgacgtggagtttgacttcgacaatgaccccattaaaacctatatcgatggcgagtggctcactgccgagggtacaactctgggagctgacgacggcatcggctgtgctatagaactggctctgctcgacagcaaggaggtggctcacggtcctattgaatgcgtctttacccgcgacgaggagactgggctcagtggtgccgagggtatgaagtcgggtttcatgacgggcgactacctcatcaaccttgattctgaggatgagggtgagatcttcgtgtcctgtgctggaggccgcaatacgcaggcctgcttcaccttcaagcgcgaggatgctcctcaaggttcgttcttcctgcgtggccagctgaaaggattggttggcggacattcaggcgacgatatcaacaagaagcgtgccaacgccatcaaggtgcttggccgcttcctgttccagaccatgcgccgctatgaaggtgtctctctggctcagttccattctggcaagctccacaatgccattccccgagatggtgagttcattattgccgtgcccaacgacttgaaggaaaatgttcgtgccgactggaatgtctttgctgctgaggtggaagatgagttccatgttactgacacgcagatgcagtggctgatggaaagtactgatgcccagactgtcatagaaccttcggtggccaagaatttcgtgtgggcactgcaggctgtcgacaacggcatctatgctatctgtcaggatgaggctctgggcggtttggttgaaacttcgagtaacattgcaagtgtacataccacagagacagagatcaacatcttgtcaagtcagcgctccaatgtcatgtctaacctcgacaacatgtgctccaccattcaggctgtgttcgaactggctggtgccaaggctgtgtcttccgacggctatcctgcctggaagatgcgtgcagattccaaactgacggaaattgtggtcgatacctacaagcagctctttggcaaagaccccatcgtgcgaggcattcatgccggactggaatgcggactcttctcagagcgttatcccaatctcgatatggtgagcttcggccccacgttacgctttgttcatacccctgatgagcggcttcacatacccacagtacagatggtatgggatcacttgcaagctattttgcggcaaataccgcaggaataaacttgattttgcacttttctgaaaaaaagtcgggaaaatatttggagaatccaaaatttctctgtacctttgcacccgcaatcaaggagataacaatccggaaggatgggtgagtggctgaaaccagcagtttgctaaactgccgtacgggttcccgtaccgggggttcgaatccccctccttccgcaggggttctcgcgggttgcaggatggtcgattcatctaatggttaggatacaagattctcaatcttggcataggggttcgattcccctatcgactacaaaagagagtgctgagaatcagcactctttcttttttaacgaggattagattagatgaactcacaaaatacgcctgttcacgtcagactgtggcatcgcgacttttggctgatgtccatcgctaatatgatgttggcgatgtctgtttatatattggtaccctctatgcccatatggttaatggagaccgagaagttcactcaagtcgaggttggtctatccatgggcgtctttgccttgggacttttccttttgggacctttctgttcatggttagttcagcgcttccgccgcaataggatatgtatttattccattgtgggcatgattggctgctactctctgctgtattattctcagggtgtacacaacgatctcttggagtttggtaccatccttctgcagagattcctgcttggcgccactttcggcttggcacagatggtgttgttaagtaccttgattatagatacctgtgagtctgacaaacgcacggaggccaaccattcagcagcgtggttctcacgtttttccatgtcgcttggccccattgtgggtatcatcatgttctattataagaattttgatgccgtgctgctctcttcgctgtcttgtgcagccattgccattatactgatactgacagtcaatttcccgttccgcacacccagcgatacttatcatatcttcagtcttgacaggttcttccttcccagcagcatgccgctgttcctgaacctgctgctgataggcattgtggttggcatgctgatgtcgttgggattgagcgaccgattctatgccgtcatcatggttggtttcctgatggcactgcttgcacagcgtttcatgttccgtgatgctgaactgaagagtgagattgttacaggtctcattctgttgctggccgttcttgtcatgatttatacgcgtccgttgccgattatttggtatattgcccccatgttgttaggcatgtctatcggcattatctgttcccgcttcctgctcttcttcgtgaaactgagccgtcattgtaagcgcggaacctcccagagcatgtatttcttagggtgggagagtggtattgcgttgggcgttggtattggctatgcccttttcatgaacgatgtcaactcgctgcttgtcgtttccatggtgttaacggcagtagccttgcttatgtataactattatacccataactggttcctgaaacataagaatcggtaggacggttacaaattgaaagagatgatatgaatttagacctcacatctcagattaagatgcccgaccacaagctgcgccgccaggtcattgctctgtgcgagaaggttgggaaaccattgttgaaactttccacgaaggattatgtagacaacggccttggacaccttgttgaggagttcgatggccaggctggtcttgtcaacatcgaagtgttcaacgaactgcagcatactatcaccggatggccaggcggtaagcccaatgtcgacgacacataccgccctgagcgcgccacaccctatcccaagcgtgtcatcgtcttctcaccccatcccgatgatgatgtgatttccatgggaggcactatacgccgactgatgcagcagggtcacgatgtacacatcgcctatgaaacctctggcaatattgccgtaggcgacgaggaggtgtctcgtttcatgcattttatcaacggcttcaacaagatttttgccaacggctccgatgaggtcatcaagcacagctaccagtcggtcaaggctttcctgaagaataagaagtcaggcgaccttgacaattcgaccattctgcgactaaaaggactcatccgtcgtggcgaggcccgactggcttgtagctacaatggtatcaatagcgaccacatccacttccttgacctgcctttctatgagagcggaaggattgagaaactgccgatgacagagaacgatgtgttgcccattcaggagctgatagctgaggtgaagccccatcagatttatgtcgctgccgacctggccgatcctcatggtacccataagaaatgcacggatgctgtgctggctgctatcgacgaagagaagaaggcaggtgcagagtggctgaaagattgtcgagtgtggatgtaccgcggagcctgggccgaatgggacacggctgatattgagatgtgtgtgccgatgagtcctgaggaattgcgtgagaagcgtaatgccatcctgcgtcatcagagtcagatggagagtgccccgtttttgggcaacgacgagcgtttgttctggcagcgtgctgaggatcgcaaccgtgatacggccaagcgctacgacgatctcggcctggcctgctatgaagccttagaggctttcgtagagtatcatatcccatgaatccactttataggattcacttctcacatttaagcctcctggctcgctaccaagtaggttagttccctatcataaccaataaagttaatttaaaaattgctccgccatcagatgtaagtctttggatttcagttaattaatggcggagcaattttcttatctctcactttttgaaactttctgctttcactcttcactccgaaccttcaccattttttcatgccgtttttactcatgccctgtgcccactaaacgacccctatgcaccctctaaacgaacctgccacttaagttccagctatctaccacttatgtcgcagtatctctcgacttatgttctaacacctcccgacttaagtcacagatccgtttactgcctcctttccatccttttactgtcccctcttcctccgttagcagcccctcatccctccccaatacaccttcattcccgtcctccacattccaagttccgtcccccaaaaattcctccgccatgataatcttgacagtcagttacttataccgcatagcggagaaatattgtttatggaacaaatcgataaatagccattgaaataatgctgttttattgaataatatagaaattaatgtgcaatattgtgaatattctcgatatttttttgtatctttgcacctaaatatcggctaataatcgcaaaactacaatgagctatataccaccattcacagttagtgccgaggccatcaatctgatagcagagatttctgcccagatagagcgttatgccattcggttggaacaggaggacggtctgcggcttcgcaaagcaaaccgtattaaaactattcattcctctctggctattgagggcaacacactctcagaggatgaggtgcgcgacatcatcgatggcaagaacgtggtggcgcccatccgtcagattcaggaagtaaagaatgccatcaagacctacgagttgtatcctacgctcgatgccttcaaggagaaagacttactgaaggcgcacggtgtgatgatgcaggctctcgtggataatgcaggacactaccgcagaggtggcgtaggcgtgtttggtgagaaagggttggtacatctggcacctcctgccgatcgcgtccctatgctgatgggcgacctttttgattggctgaagcgctctaaggaccatctgctcatccgttcctgtgtgttccattatgaatttgaatttatccatccctttatcgatggtaatggacgtactggacgcctgtggcagtcgctgatacttggcaagcttcatcctctgtttgagcatctgcctgtagagaacatggtctatagcaatcagcaacagtattatgatgccataactgccagcactaatgcaggtcaatctggtccattcattgactttatgctgggagagatctataagacgctgaaagagcaccagggcaatcctttgccaaatactgatgacgagttcgatgtaaagttcgggaaagagttcggtgtaaagttcggtgtaaagttcggcgtaaatgaaagaaaggtcttgttgcttttggcatccaatccatccttgtctgctgaaaacatagcagcacagataggattgactaagcgcggtgtggagaaacagctaaagaaattccgcgaccttggaattatcacccgacatggaagtgacaagactggtcattgggagatcgtaaagtaggaagaggtttggaagtgtggaagtgacgatgatgacgcaatggatagtgaattataaagtgtaaggatatgacaaagaaacaagcaataaagctctttgaagaaaagaaagtccgcacggtgtgggacgatgagaaggagcaatggtatttttctattatagatgtgtgtgctgtgctaacagacagtcctaatcctcgtaactattggaaagtcttgaaacacagacttttaaaggaaggaaatgaaacggttacaaattgtaaccagttgaaacttcgtgcagacgatggtaagatgcgccttacagatgttgctgacactgagcaacttttccgactaattcaatccattccttcgcctaaagccgaaccatttaagcaatggatggcacaggttgccagtcagcgtatagaccagatgcaagaccctgagaagagtattgaccaggccattgttgactataagcgtttgggctatactgacgcttggattaatcagcgcatcaaaagcatagaggtacgcaaggaactgacagatgagtggcaacggactggtgtgcatgaagggttggaatatgcatccttgacagatatcattactcgcgaatggagcggattcaccaccaagcaatacaagcatttcaaggggttgaagaaggaaaacctgcgagacaatatgaccaatctggaaatcgcccttaatatactggcagaggcttcgaccacagagctttcaaagcagcgcaatcccaagggctacatgcagcagactaaggttgccaaagaaggtggcagcgtggcaaaagcagcccgtaaccagttggaaagcaaacttggacggtctgtcatatccgaggtcaaggccagcgactacctgttgccaaataacgaggaagaggagaaataaccagaaaatccttgcagctatgcgccgcaatccttctgttaccattaaggagatgtaagatgaaacaggattgtcagaaagcggcgtcaagaagattgtccgccagctgcgagccgataacatgattcagcgcataggcggagcgaaaggtggccattaggagatcgtaaagtaggaagagcaatgaaaagaacagtggggacaggtcagcgtctcactctggcagcagaatagtgctgcgtcggctgaatcctgatgattccgttacctcctaaaaattcataaaaaaactcccaccgaagcgggagtataggttttacccttcggcctaatgggccttattgtgataagatgtaggaaatcttactgggtgcaaaattagaaaaatattttgttacttcaaaatttatttgtacctttaccgcactttttaacataatattactactcatggaaagaatactgggaattgacactggtacaaatagtcttggatgggctattgtagataaggaagaaggttgtactcaactcattgctaaaggtactaacattttctctgaaggtgttaagatagagaaaggtatcgagtcatcgaaggcttcagagcgtactgaacatcgctctgttcgtaaacactattggcgacggaaaataagaaagataagactgttggccgtgttgtgtgataatcacttgtgtcctcctctggaaaagtcgagcttgcgagaatggaggctaaagaaagtctatccgaaaaatgatttgtttatggagtggcagcgtactgaggataaggccaatgtcaatccttataagttcaggtacatctgcttaacacagaagctggatctgacagacgttactcaacgttatatcttgggacgtgcattatatcacctgaatcaaagaaggggtttcctcagcaaccgcaaggaaacgacaaaggagtcagagggtgctgtgaaggaaggcattagcacgttgactgaggaaatgaaagcggcaggttgtgagtatctgggtgaatatttctatcagctatatcgggagggaaagaaaataaggaatcattatacagcccgcaaggaacactatctgaaagagttccacgctatttgtgccaagcaggaacttgacgagaagctggccaaggatctggaaaaggtcattttcgaccagcgaccattgaagtcgcagaagggtcaggttggaacatgtacgtttgaaaaaggcaagtctcgttgtccctcgtcgcatcctttatatgaggatttccgaatgtatgctttcattaataatattaaggtacaggtacatacactttatgagaatgcagaaagaaacctgacagctgaagaaaagcaaagaatcattcctttgttcaagcgcaagtctaagcggacattccttttcgaggatattgcaaagaaactggcgggcaagaataactattgctactataagagtaatgaggagaagccttacaagttcaattaccagatggatacgcaggtttcaggtagcattgtcaatgctcagttggaggaaatatttggagaagattggctgagtggtgtatctgaagtctatacccttacaaaggataaaacacgcttccaaatcatgaatgacatttggcatgcgttgttcttctatgacgacgaggacaagctgaaggagtttgccgtcaaccgtctgcaattggatgacgaggatgcagaaaagttcagcaaaatatctatgcccaacgactatgctgcacttagcctgaaagccattcgtaagattctgccttttatgcgcgactatggcttgacatactcagaagctgtattccttgccaatctggtagaggtgctgcctcaacatatctggggtatcaaagaagtgcgggaagctacaatagaaaagataatagaagtgatgcactcctacgacaagagtaatatagacggattgactcttgaacaatgtgtgaagggatttttgaaagagagatacaatgtcagtgacgatgatttgaagaaactttatcacccttcgatgatggatctctatccacgtcagcgtcctaatgacgaaggcatctatcagttaggttcacctcgtatcagcagtgtcaagaatccgatggctatgcactctctgttccgattacgtaaggtggtcaaccttctactgaaggaacggcagattacgccggaaacgaagattcatatagagttctcgcgtgacctgaacgatgccaatcgccgttcggctatccaggcttggcagcgtgacaatgaaaaagatagggagagatgtagaaaggagatagaaaagtacgttgccaatccatcagataccgacatcctgaagtatcagctatgggaagaacaaaaccataaatgtctatatacaggagaagaaatcggcattaatcaattcttaggtgagaatcctctgtatgacatagagcacaccataccgcgtagtgcaggaggcgacagtaccaagatgaatctgacactctgcagcaatcgttttaatcgtgatgtgaagcgaactaaactcccttctcagctgacgaatcatgaagatattctggaaagaatagccagttggaaggaacgatatgaggaattggacaagcagataaggaagattagtaccaaaggggcatcatctaaagacgagaaggatgctaagataaaaagacgtcatctattatcattgcaacgtgactattggcgaggcaaataccagcgtttcacgatgaaggaagtaccagagggcttttctcgccgtcagggtacggatatcagcgttatttcccgttatgcccgaatgtatctgaagtcagtcttcaagcaggtgtatatcgtgaagggcatcgcaacgtccgacttccgtaaaatgtggggcatacaggaagaatatacgaagaaagagcgagtcaatcatgttcaccattgcattgatgccattacgattgcatgtattgacaaagcagaatacgacaaactggctcagttctatcatcagtcagacgaatacaaatttggtaggggtgagaaacctcagtttgagaaaccttggccgtcgtttgtcagcgatatcaagcagattcaagacgaactactaatagcccattattcaaaggacaatatgcctaagcaagctaagcgatatgttcgtgacagtcgaggcagcaagatactcacacagggtgatacggctcgtgcttcgctgcataatgaaacctattatggagcaatagaggtggatggcgaagtgaagtacgtggtacgcaaaagccttgacgggttagatgagaaggatgttaagaacattgtcgatgaagaggttcgctcaaaggttgagaatgctattttgcttcatggctcgctgaagaaggctttggaggaaaccatttggatgaacgaggcaaaacagatacctattaggaaagtacgtgttttcacgggttcagttacacgtcctattaacatccgccaacagcgagatcagtcaaagcatgagtataaacgccaatatcatgtgcagaacgaccgtaactacatgatggctatctatgtgggacaggataaaaaaggcaaggaaaaacgggagtttgaactggtcaacaacattactgccgttaacttctatcgcaggagcaatgacaggataccaacggacaaccaacttgtaccgttaaagagcaaaagcggatatgagctacgttacaaattgaagataggtacaatggtgctgctatatgagaacagtccagaggaagtgtgggagctcgacagaaagaatcttcaaaagaggctgtataaggtgacgggaatgtcatcgatggttattcaaggaaagtttgagtatggtacgatagaaatggtacatcatcaaaatgcgaaaccaagttctgagattaaaaaagtgaatggcgagtataggtctaatgaagaattccgtccaggaataaagatgcttcattctcagataagagttcttgtccaaagtgttgactttgagataaacgatttaggcgaaataagaagattgatatacaattcaggaaaaatcttatgaaagatggttttgtgatgttgcagtattccgtctatatcagacattgcgcttcatacgaaagtcaaacggtacatgttaaacgggttaaagcaatattacctgagactggaatggtgagtattttgagcgtgacagataagcaatatagcgatatcgtgaacttctggggaaaggaaaagaagaaaaaagtgccatcagaacctctccaattggaatttttttaataattttgtggcgagaatccacatcaagagccacttcttaggctagaataattatataagaccttgatatacaggatatatagaatcttaggttgtggtttgatgtaggaatagacagataaacaactcctgatacgaccgacgggttgctccgatggttgtggtttgatgtaggaatagacagataaacaacacattctggatggctgagaccttcaacaagttgtggtttgatgtaggaatagacagataaacaaccgtaccaataacaacggtacaaagaatgagttgtggtttgatgtaggaatagacagataaacaacatcgaagataatttaaatgaatcgcacctgttgtggtttgatgtaggaatagacagataaacaacacctggacttcattctgaattctactcatggttgtggtttgatgtaggaatagacagataaacaacgccatagcagccgtgaccataggttgagagttgtggtttgatgtaggaatagacagataaacaacaatcctttctttaagaaccagcccaaacctgttgtggtttgatgtaggaatagacagataaacaacaattgaagttgacattgaaccgtctgacggttgtggtttgatgtaggaatagacagataaacaacgaaccaggtgagcccattcaggttcctgcgttgtggtttgatgtaggaatagacagataaacaacctctgtcacagccagctggtatttgcccatgttgtggtttgatgtaggaatagacagataaacaacgcgtgccgcatacgcccgtaagcctgagaagttgtggtttgatgtaggaatagacagataaacaactggggtgagccgaaggaaattacggatacgttgtggtttgatgtaggaatagacagataaataaccactattgccgacttcggaagctatgtctagttgtggtttgatgtaggaatagacagataaacaacgactaaccattgaaacaatacaagacaatggttgtggtttgatgtaggaatagacagataaacaaccgacaagacgaagaagtgggctgacaccgagttgtggtttgatgtaggaatagacagataaacaactctcagattggactttctcacttccggttgttgtggtttgatgtaggaatagacagataaacaacaggaaaaggaggcgaagattaaggagcttgggtgtggtttgatgtaggaatagacagataaacaacattgattggtgtttcgtttcttcgggaatagtaggtcagcttctcactctggcagcagaatagtgcagcgcctgctgaatccagacgatgatgtgacagaacagaagcgaagatagaaactaaaaaactatacatatatgataggattaatagtttggatgatatattaaggtgtgtcgaggctcacctttttaattattcttaaaagtatttctttgttgtatattatttcagtatttatatttatctttgcagaaataaatacgaagggtttaattatgactacaataaatacagcaaatatttctcctgttgatgccttgtgggcattgtaccagtctcaatccaaggctaacaaaaagaagttccgttcccttcttgcagcagaggatgctcaaaaagaagaggctgtaaaagctgtttgctatgtatctttgtcctccaaggcagaaaaggagatgagagagggtaagactgttcattttgaaaatgccgctgatgctcaaagatggatggacgaactatgaagtataagatagactatacaaaagaggctgtcaaaattcttaagaaatggaaaaagtccaacccacagtcttttaagaaattatatgatattctccctgaactagaggaacatccaaagacaggtacaggacacccggaacctttaaaaggaggtagaaatattacatattcaagacatttgtcaggaagggatagggttatatatgatatttatgaagatgtggttactgttctaatatttcagctggaaggccattataatgataaataaggtgagtcaaaatggctcaccttttaggtgtgtcagatgtgtcacttcagtgtgttaggggaattaatatgaaacagatagaagtagtagcagcaatcatacacgatgatgaaggacgtatcttcgccacgcagcgaggatatggcgactataaggacggctgggaattccctggcggaaagatggaagcaggagagacaccagaagaggctttgaagcgtgaaatttgggaggagctggaaacaaaaattgttgtagagcggctggtgcagaccgtagaatatgattatccaaatttggcctccggccgagcctactcacgctcggaagagccaaagcaagctttgctctcctctcgctcaaccgtagcctttcatcttacgatgcattgtttctggtgtcatgtagagagtggaagtctgacgctgaaggagcatgaagccgcccgttggctcagcaaagaacaactcgatagcgttgactggctgccagctgataaagttgtggttgaacggttgcaggaacacaagggtcagcgtctcactctgccagcagaatagtgcagcacctgctgaatcctgatgatgaagtgacagaaatgacatagctctccctctttagagagagggggcatcacttaaggggtgaagcaagaatcgaaacgatacgctctgaagtgcgtccgtcccaatactcggggagggcgcactttttccattggccttttaccatatcgttgacagaggacctaagcaggtcgatgtcaccgccaactaacacgttggagcctatgctaaccgtttcctgatgttctgtatagttgttgagggtgatgcagggcacaccattgaacgtggcttcctcggccacatttcctgagtcggtaataatgcccttggcatgagccgtcagccaaccgaactctaaatagggtaggggctggcacagaggaaatgaaggcatgagctgttgcactacctcataagccggggtacgcagcggagcgataattggtgttgatgccgcagcctcagtaatggttttgagaataagtgtaagctgttctgtgtcagcgagtaatgctcgacggttcaatgtaagaaccagatagtttcctggctcaatatcgaagttgggcttcttaaaccgttgcaggttaaaacggagcgtgtccataagtatattgcccaccaagaaggtttgtgaactgtcatccgactgctcacgcgaggcaatgctctttgacttgatgcctgcagtaaacagatagtcgctgagggaatcgataaccaggcgattcacctccttaggcatgttgatgtcgaacgagcgggtgccagccaccaggtgagccagcttcacaccccgtttcttggttgtgatagcggcagccatcgtggaggccaaatcgtcgacgacaatcaccacatcggcaggatgctggtccagataacggtcgaatgcgcccattacctgtgccgtgatatcgtttagattttcgctgtctacaccaagaaagacgtgaggacgaggcatctgcaagtcgtcgaatatcgacggttcaagcgatggatcgtcctcacgtccagtatagactaattcgaatgtagcgtcgttactgtttccgatagcacgaacaagtggtgccaactttacgaaattggggcgtgccccagcaacgacacaaattcttttcatccgcgtgagatcttatttgttgacctggaactttgtgtcgccgtccttgaagaaggcgttgatctgcttggcagcagcaataccggcattgatgttggcctcagcagtctgggcacccatcttcttcggagtcgagaagtaacgaccctcgaacttcaggaagtcctcgttggcatcgggcataatgtcggtcacaaacttcaggtcttcgcgctcagccatcagcttcagcaggccagcctcgtcgataacctccttacgggcggtgttgacgagaatgccacccttcttcatcttgccaaccagagcgtagttgatgctctgcttggtctcaggcgtagcggggatgtggagtgaaacaacgtcgcactgctcgaacagggcgtcctgattggcaacggccttgacgccagccttctcgataacctctgcagggcagaaagcatcgtaggcataaacctccatgccgaagcccttggcgatgcgggccacgttgcgaccaacgttaccgaaggcaaggataccgagcttcttgccgagcagctcagagccgctcttgccgttgtagaaaccacggacagccatcaccagcagaccaaacacgagctcggccacagcgttggcgttctgaccaggtgtgttctcggccactacattgtgagccgtagcggcagcgaggtcgatgttgtcgtaaccagcaccagcacgcaccacaatcttcagctgcttggcagcgtcgagcacctcggcgtcgaccttgtcagagcggataatcatggcatcggcatccttcactgcgtcgagcagctgtgccttctcagtatatttctcgagcagcacgagctcattgccggctgcctcaacttctgctttgataccattgacagctgctgctgcaaatggcttctctgttgcaactaatactttcatttctaagcccacccaagccctccccaagggaggggtgtttaattacattatgggtgctccttttttatttggttatacttgtgtttaatcttacaaacccaccttttaccatagatgtgtatctcgacacccctcccttcgggagggcttgggtgggcttttctttaatgattactctcaaactccttcatgcaggcaacgagagcgttgcagccttcgatggtctgggcgttgtagcaagaagcgcggaagccgccgacactgcggtgacccttgacaccaaccatgcccttgctgacggcgaagtcgaggaagtccttctccagctccttgtactcgtcggccatcacgaagcagaggttcatgacagaacgatcctctacgttggcagtaccacggaacatcttgttacggtctatttcgccatagacgatttctgcacgttgctgagccagcttgtccatagcctcaacaccaccattcttcttaatccagcggagggtttcaagagcagagtagatgggcaccacaggaggtgtgttgaacatagagcccttgtcgacatgtgtgcggtagtcgagcatggtgggaatctcacgaggagccttgcccagcttctcatccttcaggataacgatagtcacaccggccatagcgaggttcttctgagcaccggcatagatagcatcgtacttcttcacgtcgatgggacggctgaagatgtctgacgacatatcggcaatcaggggaacattcacgtcgaggtccttgcgaatctcagtaccatagatggtgttgttggtggtgatgtgcagatagtcagcatcagcaggaacggtccagtccttggggatgaaggtatagttggcatcagcagaagaagccacttcaaccacctcaccaaacaacttagcttccttcatggcctttttggcccaaacaccagtgttcaggtatgcagccttcttgataaggaagttgtagggaatcatgcagaactccagggaagcaccgccaccaaggaagattactgagtagccctcgggcacttgcagcagctccttaaccagagctacagcctcgtcgacgacgggctggaaatccttagcacggtggctgatctccatcagtgagagacctgagccattgaaatcaagacactgtttggcggtattctcgataacctcgcggggaagcatcgaaggaccagcgttaaagttgtacttcttcattgtttgttgttctttatttaatggttttaatactacgtttcaggaaaaacgctgcgaaattacacttttttcttgaattaggcaaatatttaagcagaaattcaccaaaatagtgtattttcctttcactttgttgagtcaacatgccattttactggctccattgtcgaaatgaatgttccctacgagtgaaatgcgtttttatttcttctcttcctttttgtcctctttcttacctgcagcaggcttgtagcgcttgttcagaccgttgatgacatcctttgtgatgtcgtacttgctatcggcaaacagaatgttgtcgccagccttcgacaggatgatgtcatatttcttgtccttgttataggaagagaggaaattgttcagcgagtcgcgtaatgcctcattgaacttctgggtctcgttagccagttcaccttccagacgagcctgcagctcctgaaggtcgcgctgctgacgctcaatggctgtctgaacgctctgggcctgttcgcggctctggaaaccgttcgactgcagcttctgctggaagttgttgacggcagtctgcagctgatttcccttctgagtcagcgtgttacgagcattattgctcttcttctgcagggttacactgtaatccttagcgaagtcatactgtgtcatcagtgagtcaacttcgacataggcgattttcattcctgacacattctcagaacctgttgcctgaggtttctcgtccatcttgggacttgcattgttgcacgaagccatagcgacagcaaaagccagtgcaccgaaaataatctttttcattttttgtaattataatgtttgttctttaaccttcaagtttcagctgtttctggttacgtagttcgcggtcctgatccataacgcaatgaatgcctcgctcccgcatggcctcactatcatgaatatgctgcgaggagaatgtgccgtcctttcgtcccagcactttcaccagcagcaatgccattcccacagctaacagcaatccacttatgagtatagtctgaatcatttcgcgtgcaaaggtaagcaaaataattgagaaacgaaaaatgctacaagcataattcgctgactttaatgtcttttagcacgacacttatcaaaccagtcgcgtaacaagccaaaaggaacgccccgttgcacggcattttccagttccttaagtgccgcttccctttgctcaagctgaagcagcaattcggttttcgtaacaatatagtcaacgttctttggttggagtgtaatagcctggctccagtcatagagagccgtctcgtattgattgaccgatgtttcgaaagccgcacgtgaggcgtagcaaacggcagagtcgggaaacatctggaccagctgattatactggtccatagcatcagtacgccgccctaacttctcgtcagccatcgccagaccgaggcgggcctccatgttgatgggaacaatcttcagcagggtctcgtaatcgtttttggccagtgcatactgacggaggtgcatgtttacgtaggccctgtaaaagagagcggcaggattctgggcatcgattttcagtacattaccatactcctcggcagcgtattcccattgctccaactgaatattgacggcagcctttttaagtcgcaggtcggtagagtggggatgcctctctatctgctggttgagtacggtcaacgagtcgcgccactgttgtgatgtctgtgcgaaagccgctacagccgccatgaatccacatgcaacaacaaaagttcgaaatgccatcatgcttcccttatacctattaatattataggaaagcaatcagacatgctccaggtctttcagccagagtacggcagaggcatcggtaggcatgcgccaatcgccacgcggagaaaggctgacgctgccgacctttggtccgtcgggcatgcaggaacgcttgaactgctggctgaagaaacggcggcagaaagtctgtagccatttttttatgacttcgtcgctgtagtttccatcgaaggctttcttggccagtaagaatatcttggcagggctgaagccgaagcgcaggaaataatacaggaagaaatcgtgcaactcgtagggacctactaagtcttctgtcttttgtcgtatgtggccattctcgtcggcaggaatcagctctggcgatatgggcgtgtcaacgatatcgagcagcacctcagtagctatcttacttgcaatgaatgtcaccaagtatcgcaccagcgtcttgggcacacccgcattaacgccgtacatcgacatgtggtcgccattataggttgcccatcccaatgccagctccgacaggtcgcctgtaccaacgacaagggcattctctttgttggctatgtccatcagaatctgagtacgctcacgggcttgtgagttctcgtaggtggtatcatgaatgttgacgtcatggccgatatcacggaaatggagcgtcacagcctcggcaatgttgatttcacgaatagtgacacccagctccttcatgagcttcagagcgttatgataagtgcggtcggtagtaccaaagccaggcatggtgatgccgatgataccacgacggtcaaggcccagcttgtcgaacgatttaaccgttaccagcaaggccagtgtagagtcaagacctccactgatgcccaccacggctttggtggagttcaggtggtaaagtcgcttggcaagtcccgcaatctggatattcaggatttcctcgcacgattcctgcatcttgtcttcttctggaataaaaggatgaggatcgatagtgcggatgagctcaaagtcacggggcataacaggcttacagttaatgagatagggctggcggtcgaccgctgcctgagctgtgataaacgtggaattcgtgcgccgttcagttcgcagtcgctcaacgtcaatctgcgagatcttgatctgaggctggaacgagtaacgttcgccctcgcacaagatatgtccgttttccagtatcatggcattgccgccatagaccacatcttgagtagactctccaaatccacagctggcgtagacatagccacacatagtgcgggcactctgctgacagacaagctgtctcagatactgatgcttgccaacgagttcgttagaagccgacagattaaggatgatgtctgcaccagccaacgacaactcattgctgggaggcgtaggtgcccacacatcctcgcatatctcaataccaaagcgcacaccatcgcaagtggtgaagattgtcggctctggcgttacatgtacaggactgccagccagataaatatcctgcggtttcaagtcctgggaagaggcaaaccatctcttttcataaaactctccatagttaggaaggtatgtcttcggcacaacacctaacaaggagcccccctgtactactgcggcacagttgtaaagtagggagccaatttgcacaggcattcctacgacgcagataatgtcgagcttgcgagtaaagtcaagcagcatcaccaggccctcttctgcgttgtcgacaagaagctgttccttgaacaagtcttgacatgaataacccgtcaggcacaactctggcaaaaccagcagttctacgccctgaccctcggcctgggcgataaggctctctgcttgctgtacattatagactacatcggccactttcacggcaggcactccagcggccactttaatatacccgtatttcatagctttacaaattgtcggtcgttttcaatgatggtatagataagagcaggttgctcaaagaattcattctcacggaatgtatgcaacttatagaacttcacagggtctactgtaaagagcgca

SEQ ID NO: 4186 - DNA, 23624 bp, synthetic construct
  source 1..23624: mol_type = other DNA
  misc_feature 1..23624: note = Synthetic
actggattgagcgtacaggaggtaaactctcacacgccacactgcgtttctcatactctctcgtaggtgagcagacaacagcatctaacgcgctacctatttacaaagcgctgaacgtatggcgtcctcagggtgaccagcaggaagtaggtatcacactctacgaacttggaaactctgaccttacatacgagaagaagcatgagttcaacatcggtgttgaccttggtttcttcaacaaccgcatcaacttggtttctgacttctactggcgtcgtaacttcgaccttatgggatacgttaacactcagggtgccggcggtcagatacagaagttcggtaacgtagcaacgatgcgctcacacggtatggagttcacgctgtcaagtaagaacatctctaataaggactggacatggactaccgaccttacactggcttacagcaagacaaagattaccgacctgctggcacaaagccgtgttatagacctcgtaggtatcaacggatacatgcgtcagggatatgaccaccgtgcactgttctctattcctttcgtaggaatcaacgatcagggtattcctatgattatcaacgaggacggtaaggttaccacaacagatattaacttccaggagtatgagaagttaggtttcctgaagtacgaaggtcctacagaacctactactaccggtggtctcaacaacaccctgcgttggaagaactggcgtctgaatgtgttcgtaacatattctttcggcaataagattcgtcttactccgacattcgcagctgcttactctgacctcgacgctatgcctaaggaattcaagaaccgctggatagctcctggcgacgaaaaacagacaagcattccaggtattgccagtctgcgccagtactacagcgacacacagattcgttatgcttacaacgcatacaactactctacagcacgtgttgccgacggaggtttcattcgtctgaagaacatctccctgacttacgacttcccacgcacatggattaacaagattggtcttaactctgcatcactcaaggtggacgctaccaacctctggcttatctatgctgacaagaaacttaacggtcaagacccagaatatgctaacgtaggtggtgtgtcttcacctcttgctaagcagttcacattcaccgttcgcttgggaatgtaatatgtatatgagtaaaactaagtttattgagaagaaatgaaagcaattaaatatataaaatacactttggcagcaacgatggcggtgacgctggcttcatgcagcgacttccttgaccagctgcccgatgagcgtacagaactcaatacagacgacaaggttgagcagttgctgatgacggcataccccaacactaactacagttggctgtgcgagctctcaagcgataaccttattgacaatcaggctcctcacctgccttcaggtccatgggacccacaggtattaggtcactataactacagtgcctacgaccgtatggacgacgagatattccgttttgatccagctaactcagcgacacacaactcttgggactctccaggtatggtgtgggacggttactatggttcagtagctgctgccaacgctgcactggatgcactggacaagatgcgcactccagatggcaagttgacaaagcaccaggagaacctgcgtgccgaagctctgctgatacgtgcatatagccatttcattctcgtcaacatcttctctcctgcttacaaggacgaagagacaagtgctaccgaggtgggtattccttacgttacagagcctgagacaacactccgtaagaactacgaccgttctaacgtaaagaacgtctatgacaacatacagaaggaccttgaagagggactggcaaacgtaagcgatgcatattacaagaagcctaagtaccacttcaacactcaagctgctcacgccttcgcagcacgcttctatctctacaagcgcaactacgagaaggttatagagcacgccaacgctgtgcttggtaccgactctgcttctgttggtaacatgatgatgaactacgcagtattcacagactgtgctactgctgacgactacgctaacgcttggcatagccctgaccgcaacaacaaccttctgttgctgacgacatactctgtttacgagcgtcgttgcttcggctaccgctactcgctggcaagtaccgtagcacgtgatgtgctcatgattcacaactctccactgtggagcggctactatgcttcgccaatagctcttgtcggcggatttatcttcagcagctctatggctgactacggtttcttcaccacaaaggtgggtgagcacttccaatactctaacaaactggctggtatcggctcgcctcgtaacatagtacgcgccttcacatctaacgaacttctgttagagcgtgctgaggctaacattatgttaggcaacatagaggctgctaaacgcgacctccgctggtactggaactgttctatcgacaacttctcagctgccgacagacaggcttactttgacacaggacacattaagtacctcaccgacgacatattctataggtactatatgccaggagagaacaaccctaactgtttcgacgactggaacttcacacagcagaacataagcagcagcttcatcgttcctcaggaccgcgtgcagttcatgaactgtctcaacgacttccgtcgcttcgagacatgtaacgaaggtcttcgtttattcgacctcaagcgttggggtatagaatgggctcacgacgttggtaacgaaggtgtaccttatattatgacaggcaaagacgtacgtagagcaattgaagtgccttgggagactctctctgcaggtatcgctacatcacgtcctacaactacagcaaacgttggaggtcctgttcctactaacgacactcgtaagtttagaatacaagaaaaataagaataggaggacataaagaatgaaagcaaaacttagcatattaataattgcggcagtagcaatggtcagcttcacgctgggctcttgctctgacgacaagctgggtgcgtcaatcttcgacacggtggaccacccattagacaagtccctgtacacgttcccgctggataccttcgtaaaggtgaacttccaagagccgtacaacgtacgttatatgtacaagatgcaggatatgagtctcagctcatcagacctgcagaagaacctcactccttgctcttacgacaagagtgttgaccttgctacgctggcaaaatacctttggttcgacatctacaaggaacttgccaaccagcacgagatattcctcaagaaatacagtccacgtattattcacatcataggctctaagtcgctcaacgtctctcagggtactgagacgttaggtgttgccgagggcggtctgaagatttcgctctacaacgccaacaacctcagcgttgacgacatagacatgatgaacgaatacttcttcaagactatgcaccacgagttcggacacatcctcgaccagaccatctcacgtcccttattattcaacttgctttctaacggacagtacgatgcttctggttggacaaacactcctgactctgttgctgcaggtcgtggtttcgtttcaccatacgcttcaagtatggcacgtgaggactgggtagaggtacttgctaactacgttactcgtgacacactttcatggaatatcttgctgggctcagcagagtatgagtgggaggaaatcgacatagagagcgagtctgcatataaaaagttgattactccgggatgtaacctcgacaccataggttactacaaggccgacaagagtggtaacggcgataataaggtttaccgtcgtgtatgtgtacgcaacgctgcaggcaacgttgagaaagacgagaacggcaacccaatatgggtgcataagtctggtatcgacggacgttcgcttatcctcacaaaacttgacatggttcgtgcttggctgagcaacaactacggcataagcatcgacgctatgcgtaagatggttcagcagcgtacttacctcaccgacagcaagggcgactttgtcatcaagaacggcaagcttgtgaaccgtttctcttacaacaactacgagttaatgaacagcctgcgcaatcaggttgagaaatataaggaattacaaccaaagaactaaaaatactgagatatgaagaaaatattttccacgatactgattctatcaactgttctcagtatcacaagttgtaaatacgaagaagacgacatctggaaccagtcggctgcagagcgtatagagaccatctcaaagaattatgcagagacactcatgaactcaaagggtggttgggctatgcagtactaccctactaactctaatagttaccccagtggcaacggctacctgttaatggcaaagttcgccgataaaggtactgtaacaatgggtatgaagaacgtgttcagttcaaacgcataccgtgaggatgtttctacatgggacatcaacaaggaccagggtcccgtgttgtcattcagttcatacaacacatgtatccacgtcttcgcagacccctacgacctgccatttacaggcacaaaggatgatgaggttaacgaagaaggcaagggagcacagggcgactatgagttctctatgattgaagttcccactgacggcaaccacgttcttctgatgggtaagaagcgtaactcatacacctatcttacacctgttccagaaggtacggacttcaaaacatatattgaagactgtcagaaggtaacagcagatttcttcccaacaacaaacccactggagtatcagattctgttgccagactcaacaatcaatacataccagttctcttcaggactgacaacactctaccccgctggtacagaccgtgtaatgacaggtattgtaaattcatacctcataaccaactatgacggtaagtactacctgcgtttccgcgatgcactgaaactgaaggacggctcgaaaataaacaatttcgtttacaacaaagaagaggacgtattcaagggtgttgagaacgagaactgcaagattgtaggtccggatatggatatggctacctttattgaaagcaagttagacgacggtaggtcatgggcaatgatgaacaatactgacatgtctgaaaaatatttggctatctacacagcactggttgttaattttaagaacatcttgaaagcagacatcaagggaataacgttacgtaagaacaacggaaaactctctttggcaatcaactatggtgcaggcatacgtccacagtcggtgatctttaacattgacagttacactttggaaaatggaaaattctctattggcaacgtaactacagatacggataacggaaagaagattcttgagacaaaggctatgcaatctttagtcaactccctcaagcagccaaacaccatttctcctgccacaactcaatacaatcctaacgttctgcgtctagataacgacaacgacgctgaactatggcttacaataacactaaaataaatatccatttttaattaaaaacattaaagtatgaaaaagtttacattaatgatgattgctacattcgtagctgtatcaggcatggctatgggcactcagaagcatgctgttgttaagaacttcatgaacaagaacatgatgactccttattttgccaagaaggtagatgtaagtggtggtattgcagcttctcaaagcaaggctaataccattaaagcaactgcaacaaagtctctccgtacggttaaagatgcagaacccgctgtggatgtaaagtctctgattcttgctaatcagtatatttacgacgagtatcttggcggtatgttgaattattatcctgtaacagaaagtttctatcttgttgatggcacttctatcgctcttgaacttaacggaattatgacaatggaaggtactatcggtgaaggcgaaaacgaatttgctgagtatggtgctgaggtagttacattcaaggctggtgaagtcgttgctacaaacaaagaaacaggcgaggaatttaaactttacaactgtgactgggataaagagaattatgttcctgtacccaacacagatgatatcgtaggttacatcttctatgatgaggctggtggcatcaaggagatctttatcccagcaatcattgcagtagttggtgaaacatctggcatatatgctgctggtactaattacgacgcttgcacagatgctaatgctactttctttaagactaaagttactggaacagaaactaacacatcgaccgagggtggcgagcctatcgagttagaaaagcgtgctttctattggtctgcaaatgaagatggtactgtagatgtactcgttgagggtattagcggatgggacgaagacgcttggtttaagatgactattgctgctgacggtgcaacagcaaacattaagaaccagcagttcgtcggttcttacacattccgtcagctggaaggtcttgcaggaagtttctttgctgcaacatacacagcaacaggcgacggtcacttccagtatgttgaggacggcatgactcttaacgttaccatgaacggcgacggtgagatatacaaagctactgacggtcaggagtactgcgctatcggatacttcaatgacggtgaaggcggagagtatagcggatatatctactcttctgtagctgatctccagattaacgttaccaacgagcccgcagaaggtgtaacagctatcaaggaggttaacaatactaagactgttaaaaacgctgctacttacaaccttgcaggccagaaggtaggtaaggactacaagggtataattatccgcgacggcaagaagttcattgttaagtaatagcaaaacacaaactaaccctatacacaagcgggcgtgtcataaaagacgcgcccgcttttttcatgttccagagttttcggaagttaacttctccaacttctaaactttaacattatttattatgattatccgcaatcgtaccaccaaatttttcgggcatcctcacagggtagcccgattatttcgtgacttatataaaaataataggtaaaagatttggtggttacaatcaaaatgattacttttgcagtgcatttataaaatagtagtaacatgaagattttcgagtttaacaagtattttcccgacgaagcggcctgccgtcgcaagtttaaggaaatgagagacaaggaaggcgtgacgtgccagcattgcagctctaacgacgtagtatggctggagagcaagcaacagtaccagtgtaagcactgccgttacaggactatgctcaggagtggcacggtgatgcacggctcaaagttgccgttccgctattggttcatagccatgcacctgctgacagccacgaagaaaagcatatcggctgcagagttacagcgtcagttgggccacaaccgctatcagcccatctgggaactaatgcacaaattacgttcagtgatgggtaagcgtgacgacaagtacacactgaaaggctgcatcgaactggacgagggctttttctctacagagataccaaaagagaagaaggacgagaaactgaaagccggcgttggcagtcaacgcaagtctaaggtgatggtgattgcagagagtacgcccatggacgtggagccgaagaaaggaatgaagccaaagttggtgaagcacattaagatgattgtgatacctgacgagaaagcaaagacgatagatgccgttgctgccaagtcgattgacaaggaaagttgtctgaccactgacgaccaccgctcgtacatccatttcaaggatatgttcacggagcataagttgcaggtcaacgatccaaaggacattggcaaggtgctgccctgggtacacatcgctattagcaactccaaaacgctactggccgacatgtatcacggcgtaaagccagagttcctgcaagaatatctgaacgagttctgctacaagttcaatcgccgatacttcggcgaggacctgttcgagaggctggtaatgatagcggcatcctaccgcacggattttgagcataagacatacaggaaggtagcataatcacaaaacaatgatagaagtatgagtacacgattaacgaaaaaatctattttacttttcgagagtatcaaaagtgaagactgtaatggaaatgaatactggagttcccgtaaacttgcaagagtattggaatattctgattacaggaactttgtcgcagttattggcaaggcaagagaagcgtgtaaaaacagcggtattcctgttgataaccatttcgttgacatcaccgaaatggttggaatcggttctggtgccgaacgccctattgattcagtaaaactttcaaggtatgcttgttatttgatagtacaaaatgcagatccaggaaagactatagtggcacaaggccagacttattttgctatacaaactcgcattgctgaagttcagcaaatgtcagaatatcaagagctgaccagcgaggaagagaaacgcctgttcttgcgaagagaaatgacgaagcacaactcactgttggcaagcgcggcaaaggatgcaggcgtaatagacaatagggattatgcaatttttcagaactatggatataagggtctatatgggggtatgaccgcaaatgacattcaccatcgtaagggattaaagaaaagtcagaaaatattagaccacatggggagtacagaacttgcagcaaatcttttccgtgcaactcaaacagaagagaaattgcgacgagaaaacataaagagcaaacaaaaggcaaattctacacattacgaagtaggtgcaaaagttcgtcaaacaattaaagagctgggcggcactatgccagaggatttgccaatagtcgaaagcataaagaagatagagaaaaaacagaaattattggattctaaaaaggagagaactgatgagcaaactgaataacaacacgaaaacgtttcatcaatatgaaacgctttcagatttgctggaagcactctcgccatacatatcggcgcgtgctctggctcgcatctgtgacatgagcgagagccagatgttacaatacaaggctggtatcaagaaaataagtccaaagattattgtgcgtattaacgaaaaattgcgtacctttgcagccgaactcagtgagttcactctgaagggcgcgtgatgcgtcgtactattttataaatgcaaagaaggctggcgaatctcgtcagcctttattgatgattatttggtggtacgattgcggataatcattaataattatgattacagaagatttgctaaaagaaaaagctcagaactatataatatgttatagtgagcagtgtgagaaaagagaacattgtctgcgaaacatcctgaagcggtatgtcaacgagaaaacgaggattgtacaaagtgtaaatctcggaaaccatgacgttattgccggaatgtgtcctatgtttaagagcgacgagaaggtaaggttccctgtaggactgacccggctctatgatgacattccgatggaaaaagcacaacaggtaaagaggagtctcatagaacagcttggacgttccaactactatagatacaggaacggcgaactgagactcaagaagaagataacagacataatagagtcaacaatgctgagatacggctggaacgagccacctcggtatgacggatacgccgatgactatctgtggtaaccaaaaaactcccaccgagtaggcgggagtataggttttacccttcggtcattatgaccttattgtgataagatataggaaatcttacgagtgcaaaagtagggctttttcttggaacaacaaaaaaaatgtagtacttttacaaccgaaaagcaaaaaaatctgatattatggaaagaattcttggtattgacacaggtacaaatagtcttggttgggcgataattgaaaaggacggtgacacgcgtcgcctgctatataaaggaacgaatatcttctcagaaggagtaaagatagagaaaggaatagaatcatcaaaagctgccgatagaactgaccatcgctcggttaggaagcactactggagaagaaaagtcaggaaggtgcgccttttgacaatactgtcagagaacaggttgtgtcctccgttagataaggaagaactgcgccagtggaagttaaagaggatatacccaaagagcgatgagtttatggagtggcaacgaacagaagacaaggacgacataaatccgtatcgttaccgctatctgtgtcttacggagaagttagaccttacagacatcagacagcggtatattcttgggcgtgctctttatcatcttaaccaacgaagaggttttctaagcaacagaaaggaaacgacaaaagagtcagacggtaaggtgataactggtatcggtgacctgaccaaagaaatagagaaaagcggttgtaagtatttgggcgaatatttctacaagctataccagcggggcgaaaagatccgtagccattatacttcacgcaaggagcattacttaaacgagtttcgtgcaatttgcgaaaaacaggatttagacaaggaacttgcaaagaagttagaaaaggctatattctaccagcgtcccttaaaatcgcaaaagggtactatcggtaaatgtacatttgagaagggcaaatcacgctgccctgtttctcatccgctgtatgaggaattcagaatgtatcagtttatcaacaatatcaagataaagactcctggcgatgttgaacttcgtgaattgacttttgaggagaaagaaatcataagacctcttttcaacaaaaagagttctttcgatttcaaagttatagcgaaagcccttgccggcgggcgaaacaattattgcttctacaaagatgcagaggacaaaccgtataagtttaatttccctatggacacctctgtgtcgccaactcccgtctgtggcgggttgtcaaaaatctttggcgccaactggaaggattcactttgtgaagtttatacgctttcggaaggaaagacacagatgcaagtaataaacgatgtttggcatgccctgttctcctttgatgatgaagacaaactgaaagagtttgcagaaaatcgtctgcaacttaacgaggaacaagctgaggagttctctaaaattcctattgcgaacgaatatgcctcgttaagtttgaaggctatccgtaagatactcccatacatgaaagactacggaatgaaatacacacatgcggtattctttggaaacctaaaggaagtgctgccgagtcatatttggggcattaaggaaacccgtgaggctgctataggaaatatcattggcgctattcaggaagtggcagaaacttcagacagtcagacaatagagaaatgccttaaagattatttgaaagaacgctaccaggtgagcgacgaaaaactaaagaaactttatcacccctcaatgatagagctataccccaaggttcgcccaaacagcgacggaatatatcagctgggcagcccgcgtatcagtagcgttaagaatccaatggctatgcactctttgttcagaatgcgcaaggtgataaacctgttgcttaaaaaaggttacatagatgaagaaaccaaagtccacatagagttctcgcgtgaccttaacgacgccaacatgagaaaagctattcagcagttgaataaagaaaacgaggatgacagaaagaaatgtagagacaagataaaggaactctacaaggagcaatgcggtaaggagatagaaccgacggatagggacatcctgaaatatcagttatgggaagaacagaaccacatatgtctatatacaggcgacgggataggcatctgtgatttcctgggtgacgaaccgaagtatgacattgaacatactattccgagaagtgtcggtggcgatacaacgaaagaaaaccttactctgtgtagcagtaagttcaatagagagactaagaagacaaaactaccttcggaactacataatcacgaagaaatactacaacgcattgcaaagtggaaagaagaatacgaaactttggaagagaaaatacgttcaaggaggaaaagacatccggcggagaaaggacaaagagataagaatatacaggaaagacactatcttgaactgaagtgtaaatactggaagcgtaaatatgaacgctttactatgacagaagtacctgaaggtttctcacgtcgtcagggaacagacatcagtgtaatctcacgttatgcccgcatgtacctccagtccgtctttaagagagtatatatcgtgaaaggtatagccacttccgacttccgtaagttgtggggcttacaggatgtatatgaaaagaagtcgcgcgtcaatcatgttcatcattgtattgacgctataactatagcctgcattgacaaaggtgaatatgacaaattagcgaagtactaccacgacgaggaaaatcacgaatggtacggacacgacaagccagacttcaagaaaccttgggacacttttgtagcagatataaagaatgtagagaacgaacttcttatagcccattattcgaaagataatatgtcgaaacaggcaaagaggaacataagggggcgtgacggacgaatactgaagaacgaacgcggcgagaagttgcagatgcgcggcgatgtggcacatacgtcactgcatcaggcaacttattattctgcaattatgaaggatgggaatataaaatatgttggtagggtagaattaccaaagatgaaagataaggatgtagataaaattgtggatgaggttgttaaggataaagttaaagcagcaatatccgaatatggaagtttaaaagcagcaatagaagctaaaatatggatgaataaagaaaaaggaatagaaattaaaaaagttcgttgctttgtaaaacaaacgacacctttacagattcgtccattacgagatgtgtcaagaaaagaatataaaagaaatcttcttgcttggaatgatggaaattacaaagtcgctatatatataggcaaaaatgaaaaaggaaaagaagaaagagaatttgaggaggttaatatgcttgatgctgcaagatactttaggaaaagcagcagtctagaacagacaggagatcccttaattccaataaaaagcgagaaaggttatcctttagtttatactctttccattggatctatggtcatattgtatgataaaactcctgaggaaatatgggatatggacatgaagaatcttcagaaacgtctatataaaataacagcaatgtctttaacagatggtagaatggttgtagttcatcatcaggaagccaggcaggcaacggaattaaagcaagaagctatagcgtataattatgatggtaatttaaaaccaatgctgagaattgggtttaataagttcaaagcccttgttcagggagtagatttcgacattaatgatttaggtgagataacaagactaatatgataaaacaaacattgatgttcaagtcaccagtgtcgttgagcctaaaagacaaacaaattgtcataaacatgaaggacacagaccagacagtcacacgaccaatagaggatatcgggttcgtcgtgatagaaaatccaatggtgaaactaaccatccctctgcttaatgcacttgttgacaataatgtgtcggtagtgttttgtgacgaaaaactgatgccaaagtctatgctgatgaatcttaacggtaattccaccatgcaggagagctaccgctatcagtatgaggctacagctccacaaaagaaacaactttggaaacaattaatagaaagcaaaatacgtaatcaagcttcgttgcttaataaacttggtcttcaaggggatattctgaagccatactatatgaacgtgaagtcaggcgattctgataatcgcgaaggctccgcttcgcgattatattggggcagactattcggagaggacttccgacgtgaacgtgaaggaattccgcctaataatctacttaattatggatataccattcttcgtgccgctatcgcaagagctctgatagggtcgggactttatcctgcgtttggaatattccataggaatagatataatgcctttcccttagctgacgatgttatggagccatatcgtccttatgttgacgagttggtatataggctttatatggatggtgcgaacagtgagcttaacaataagacaaagggtgaactgctcagagttctttttgctgacgtcgttatgggcaaacaaacacgacctcttgaagtagcgttgtcgtttacgtctgcctctctcttaaaagtatataaaggtgaagtaagcaaacttacattaccagaactgcaatgagtgaaatacggctgaattcatatcacatcatgtggttatttgtgttctttgacttaccggtaataacgaaaaaagagcggaaaatggctgctctcttcagaaaaaatctaatgaaggatggcttcgttatgcttcaatattctgtttatatacgtcattgtgcctcgtatgagagccaacaggtgcacataaaacgtattaaatcatttgttccagaaacaggaatggtgagtgttttgagtgtgacggacaaacagtatggaggtattgttaacttttggggtaaacaaaaatcaaaaattactccttcaaatcctcttcaattagaatttttttagtaatttcgcagcataaaaccatatcaacagaccacttcttaaacaaaattattagtctaattgcttgatatatagcacataattacacttaggttgtggtttgatataggaaagagataagaaacaaccgagcgtacaagtacaggtcatcgtcggttgttgtggtttgatataggaaagagataagaaacaactgtctcggtgtttactgcatccacgaagtagttgtggtttgatataggaaagagataagaaacaacggagttgttcaagtacaggaacataaatcagttgtggtttgatataggaaagagataagaaacaacctggcggcattccctaacaagaccgaggcagttgtggtttgatataggaaagagataagaaacaaccagacacaagacgaggaagaacgtcgcacagttgtggtttgatataggaaagagataagaaacaacacgacgaagctcccgatgttcctgtctccggttgtggtttgatataggaaagagataagaaacaacccaaaaagaacctcaccagtctgtgcgttgttgtggtttgatataggaaagagataagaaacaacctgccaattttcgtagtgagagcgttgatgttgtggtttgatataggaaagagataagaaacaacagaaccttgtaaaagattaacggtctgggggttgtggtttgatataggaaagagataagaaacaacagagtgggcgcaagagtccgcacccgtggcgttgtggtttgatataggaaagagataagaaacaacgttggtgcatacacccgtagaagttcagcggttgtggtttgatataggaaagagataagaaacaactttgtcagaattgaaggcgttagcagcaggttgtggtttgatataggaaagagataagaaacaactgtgctgcggttaatacttcctgaccaacggttgtggtttgatataggaaagagataagaaacaacgtcgctgggtgtgtagtttaccgccagatagttgtggtttgatataggaaagagataagaaacaacagttattgaaatacctaaaacaaaatcttgttgtggtttgatataggaaagagataagaaacaacctccggctcgatgacgcacaggcgacggcagttgtggtttgatataggaaagagataagaaacaactaacaccaaaatgaactgcaatctgctcaagttgtggtttgatataggaaagagataagaaacaacccaaatcaactcgttcctcatggaccgcgagttgtggtttgatataggaaagagataagaaacaaccagtagccaaagcctgtttagtaagagcaagttgtggtttgatataggaaagagataagaaacaactatcctttgctggtaccggttgtcctgcaggttgtggtttgatataggaaagagataagaaacaaccggcagcgaaacagcttaccctgcatggtagttgtggtttgatataggaaagagataagaaacaacatttaatgatttgttttttaatctaatctcgttgtggtttgatataggaaagagataagaaacaacactgccgctgaagattagctccggctatcggttgtggtttgatataggaaagagataagaaacaaccatatcgtcaactcgacgacagcatagcgagttgtggtttgatataggaaagagataagaaacaaccgctccttctcggccttctcagcctcgcgggttgtggtttgatataggaaagagataagaaacaacgtcgcctcggcgcgtccccgctcgcggttggttgtggtttgatataggaaagagataagaaacaaccaatctccgctaccagtgcgtcaaactgtggttgtggtttgatataggaaagagataagaaacaactagtttcaggtaggtgcggacggcttgcaggttgtggtttgatataggaaagagataagaaacaaccaagtcaatgtgtcgtgttgaccttgatagttgtggtttgatataggaaagagataagaaacaacatacgttgaacgctaccgcgccgcctacgggttgtggtttgatataggaaagagataagaaacaacaatctctgcgcattggtgcataacattctgttgtggtttgatataggaaagagataagaaacaacctgcgcttggccactcgctcggccagcgtgttgtggtttgatataggaaagagataagaaacaactgggtactgtcggtggccgaccgctcgacggttgtggtttgatataggaaagagataagaaacaacacgtcaaagttcgtgcatacggtacaccagttgtggtttgatataggaaagagataagaaacaaccagcgcataatgttcgagccaatgtcggacgttgtggtttgatataggaaagagataagaaacaactttatctggtgcatctccttaccgtcggggttgtggtttgatataggaaagagataagaaacaactgccgctgctccctctgccgctgtctttctgttgtggtttgatataggaaagagataagaaacaacaggtcatcgtaacgaacccttcccacgtcggttgtggtttgatataggaaagagataagaaacaactgtgaagttgaagtcatatactggtaagtcgttgtggtttgatataggaaagagataagaaacaaccatcagctgcaacaccaaagacgttatcaagttgtggtttgatataggaaagagataagaaacaacaaacgtgaggatttacgtaaagagtacgaagttgtggtttgatataggaaagagataagaaacaacttcaagtggcgcaatccgttggagaaacccggttgtggtttgatataggaaagagataagaaacaacctcttgtcagcgttgatttcgaagtacagggttgtggtttgatataggaaagagataagaaacaactcgcagaacgactggcgaacaccgaaggggttgtggtttgatataggaaagagataagacacaacccatgcccccgtggtcaagcggtaaaacctacctgacgacggggcttgagttctatcatcttaggattgaaacgctcaaaggctttcgcaacgtcctgcacctctaccctttggtatgctgcgctgtcagtagcgtgctgctgaaccataatgcggtcggcaagggcgggaatgatgccttcatggacgtaatgctctatccacctggcgttggcgaaatgctttgtgcggttctttacggtggtgacgatgttcgacagtaacagacgacgggcatcatcactgaggaaatagtcttcctgctccagcaggtgctcagctatcagcattagctcgtcggcgctatagtcgtcaaaatggtacttatacgggaaacgtcccacaagaccggggttcatggacatcaggcggtccatctccgtctcatacccggcaaagattatcagcatgtcgggattgggttgtgtaaggacggtgaggaggctttctatgacgtggcgcccaaagtcgttggagttgtcaccggagtagaaggtgtatgcctcatcgacgaagagcacgttgccgcgcgcctcttccagcaccagtttcatattttcctccgtctcgccgatgtagcgccctatcaccttcgtacggtctatggttatgacattgccggaggagagcagtcccagggagtgataaatctttccaagcagtcgtgccacagtggtttttcccgttcccgggttgccggtaaagatagcatgacaggctgtctgggctgttgtcctcagtccctgtcgtttgcgctcggcatagaacctcatacggtttgaatgggtgccgatgctctgcttcacgctttggagtcccaccatgctgtcaagctgtttcatggcgtcgtcgtagagcgaataattgttcataagaggctctgtagggacatcttccggctgaaggcggtagtctgtagagccggtaatgcgaagcgttatccgacttgtaagattacggacataggcaggctgaacgacattacggacataatgatttatgtctttaagctcccagttgccgagggttccgcggcggaaagcctccattacgctattgccgatgctgtcgatagcctcctcgctaagggtgatgtggaaatgttctatggctctcaggaattggaagaagaattcctcagggctgaacggctccatgctaaggcggttctcctcagggaagttcttctggagcgacggatattgctccagcagctggtcaacttcctgcctggtgccgtccaggaacatgtagttgttagcatccggcattatttccaagagtttgcccatgataatcttcccgtgagagtcgttcagggcgctaaggttataaagatgatagaccttcatctcggcaagctctttgaagaggtcgaagacgttgctatcatctatcgtagtcacctcgcgaaggttctcgtaagggtcgttactggtgacgtcgaacatcttcttgcagtctatattcttccaattctggctgaagcccaacagacggtgaaagaggaacatcgagggactgtcgctctcgtgcttgtgggtgagtatgaaattatagtttagccgcaaaggactttcaagcatctcaccccgcaaggcgtttagctgcatagcacggagacgctccacgacacagcggcgcagctgccctgccccggggcgggtaaagagttcgcaccactccctatggcgtccgtgaggcggattcgacagaataccctcatcgcttaaggctgtgaaaaggtgcaaatctccaactctccacgtgtggctggcggtaagggtgacttcggctctgaagatcttgccgctgtcacttcttaccaacaggaaatagtcgccgggcatccacgctccactcaccgacatggtatatgtcacggtgcgcttacgtgagtcaacttgtggagtcttggaaagagagtcggcaaacagcagccactggggattgtaaataaagaatgagtatgtatcgcttatcttgagctttctgcccaacgagagagtaacggttatatcacttttaaagtaagtaaatgacggattgatgtccgtcggaaatgcaaattctattgatactttcatgataaacaagtttaagggttaaagagtttaagagtttaaggggatgtatcattaagtcaaagaacacaattcgccctgtcagctcacttgcggtgagactgcgacgagagaaacggcatgcttacaagttcacttcattgcgacttgcagacataaacgtttttcccgtaagctcttttgttctttgattgcatttcctttcgttgttatttttcgggtgcaaatgtatttaaaatcctgataccctccaagagaatatcaggatttttttcggttttaacatttccaccttattatattacatgtctatcagttcgaagtcgagctgccgtcgctctacgttagccctgcgcacaatgatgcggatggggtcgccgagctgatatttatggtggtgacgccgacctacaagttcgtagttcttctcgtcgaagtcgtaatagtcgtcgtcaaggtcgtgcatggaaatcattccctcgcagtggttctcgtctatctccgcatagatgccgtaggaggtgatgccgctgatgtgggcatcgaactcgtcgccgataaactgtgacatgtactctaccatcttgtactttatggagtcgcgctctgcctgctgtgcgatctgctcctggtcgctacagtgttcgcaaagttcctcgtagtggtcgcggttggcactgcgccctccgtcctgatagcgtgtcagcaggcggtggaccatagtgtccggataacggcgtattggcgaagtgaagtgggtgtagtagtcgaaagccaacccgtagtgtcctatattgtgaacgctgtactttgccttcatcatggcgcgcagtgccaccatctggataacgctctgctcgcggcgcccctcgctgtcgtccataagtttgttcagcgacttggttatctgacttctcgagccgtctgccttcaccttgtagccgaacttggcggcaaactggcgcagacggtctaacttcgtcgggtctggctggtcgtggatacggtaaggcagggtcttcgccttctgacctttcttgacctttcctatgctctctgccacctgacggttggcaaggagcatgaattcctcgatgagctggttggcatcgagcgacttcttgtagtacgcacggatgggctttccgttctcatcgacgtcgaagtgcagctccgcgctgtcgaacttcatggcaccggcagcgaaacgacgctggcgcaggctcttggcaagggtatcaaggacgatgagctcctcggcatagtcgccctctttctttccggtacggtaatacttctcaaggatttcctgcacctcttcgtaggcgaaacgccggttgctgcgaatgacggtgtgaacgagtcgccacgactgtatctttgcctcggcgtcgaggacgaaaacaacactgtaacagagtttctcctcgtcaggacgcaacgagcagatgtagttgcagagatgctccggcaacattgggatagtgcggtcaacgagatatacgctggtggcacgcttctgcgcctccttgtcaatgatggagccctccttgacgtaatgagagacatcggcaatgtggacaccgacctcccagaacgtgccgccgggggcttgcggactggcgaccttacgtatagaaagggcatcgtcgaagtctttggcgtcgtaggggtctatggtgaaggtggtgacgtcgcggaagtcctcacggcgctttatctcctcgggactgatgtcgccggagatcttcttcgccgcctcctcgacagccttaggatatttgtacggcaagccatactgggcaaggatggcgtgcatctcggtgtcgttctcgccgacctttccgagcacatcgacaacctcgccgacgatattcttactctccattgacggccactctataattttcaccactgccttgtcgccgtcctttcccttgttaagcttgcgcttaggaatgaaaatatcctgcgcgaacatcttgctgtcggaaacgaggaaggcaaagtcgcgctctaccttcaaggttcccacgaactggtcgtgggcacgacggatgattttcgtcaccatagcctccttgatgtgatgacgacgacgtgccataaaggttacctgaacacggtcgccgttaagggcaaacatagaattgcgctcggcaacgaaaacgggcttgtcggaaccgtcggcaataaaggagttcttgccgttggccttacgtataaaggtaccctcctgcgtctgaccgccaagattaaggcgatacgaattctcggacactttagacaggaaatcgtcccatgccatagtctccataatgtcaactgccaacatcttcacgggatgtgtatcaagccttagctgcttgaaaacttgtttgaaactgaacgtctcctgaggatgacgggtaaagaaatcctgcaaaagctccgtcaactgcttcttcgtcagtctcttggttgtattacgaccttttcccataatcaaaatgatttaattgttatacaagactgtacaaaattaagaattaaatctgaacaaacaaaatttttatgaaaatatttcgtaactttgcgcccgaataaactggtgacgatggagaaaattctaataaccggggctaccggatttatcgggggcttcatagttgacgaggctctgaaccgcaatatggaggtgtgggtggctgtgcgcaaaagcagttcgcgacagtggctcaccgacgaacgcattaatttcatcgagctaaacctgtcatcgcagagtgacttggaaaagcaactggctgacatgtccttcgactatattgtccatgctgcgggggtaacgaagagcctcaacacagaagacttctaccgcataaacacagaaggcacgaagaatctcgtcaatgcccttatggcacttgagatgcctgtcaggaagtttgtctatgtcagttcgctgagcgtctatggaccggtacgcgaacaacagccatacacggaaatcctcgagagcgacacgccatgccccaataccgcctacggaaagagcaagttggcggcggaagagtttctaaccgccagccccctaccctacatcattctccgtcccacaggcgtctatggtccccgtgagcgcgactatttccttatggcaaagagcataaagaaccacactgactttgccgtcggctacaagccccaggacatcaccttcgtatatgtcaccgacgttgttcaggccatcttcctcgccatagagagtgacattagcggacgttcgtacttccttagcgacggtgaggtgtaccgttcttccaccttcagcgatctcatacgtaaggagttgggtaatccttggtggatacgcataacggcaccgctgtgggttcttcgtcttgtgactttctttggagagcacatctcgcacatcacaggaaagataagtgccttgaacaacgacaagtataatataatgaaacaacgtaactggcgctgtgacatcacacccgcaatagaagagttgggctatcgccctcaggtaaaactcaaagagggagtgcgtcgcgccattcactggtataaagaaaacaaatggttatagactatttcaagaaagagaagaagccgttgaaaggacttctcgc

SEQ ID NO: 4187 - DNA, 23621 bp, synthetic construct
  source 1..23621: mol_type = other DNA
  misc_feature 1..23621: note = Synthetic
  variation 17977..18214: note = note, n is a, c, g, or t
  variation 17455..17709: note = note, n is a, c, g, or t
tttggaaatgatgaccgcaggtttcccatcggagaagttatcatcggtgctggaaagtatcacagctgccggtggacgtatattgtcacaaacagatgattgcgtggaattcaccggagtagattatacgccggatgggattatagttgtggaaaaggaaaagaaaatgaaagtactggcaggatctcctcaagagacggaattgacaaagatcatccgctcgtatgatctgctacattcaactccactggatgctgttgatttcatagtctatttacagactctgatacatggatgaaaacgactttacattaatgactatttcaaactaactaaataatagaaatgattttatcaagatttatactacgatgtgaagacaaatgtctcaatgaacacgtatatgaaagaaatggtataaaacaacaataatatttatttacaaactgcctgtagattgcgctatatgaatagtacgacctgcaggctctttttattaatcgaagatgcaaaaacaagaaaaagaacaaagtccggcgataaccggaaccgctgaagagtatgtatttattttaaaaaatgttttgaaagaaatgagtgattcggatatcatggaaaaagcagtaagggattattttaaaatgaatccgatgatgtataattcggaattgaaatcaaccatagaaataagagtaataagagacaaaaacggcaaaccgatcagagggttttattcatttctatacggtgtgataaaggtaatgtatgactactatatagagaaatacgattcgcacggaaataaaataactcaagaactgtttgtgaagcaaatcggagtgtttttcaaatgtaatatgacctatttcagacaggatgtgtatcgttcaaaagattacccctgttgggtgagtttgaaagagacaatagaaggatgtgttaagagttaacataaaaaaataattcaataccgttgcagcacttttgggaaagtcccgaaagtgctgctttcttttgtttctttaagatcaatttgtcttattttcccatgatcatgttaacaatataccacgtttgggtgatatgaaagggggtgttgtcagcgtaattttgcagaaagtttaacaacataaaataaagcgtatgaaaacaatgatgatgatgtgatgcacagcgaagagagataattaacagtgtatttagtaattttaggagagttataagatgaatcaatttcagttttcaagaagattagttataagtgcgtttcttttattggtatcaaccgtttcggtattttctcaaagtgtaataaaaggtacaattattgatgaggagacaaaagaacccttatccggcgcttccatctatgctaaagatgaaaaagtaggagtaattacagatgccaaaggctccttcggtattaaaatatcaaaatatcctttgcgtatccatattagctttataggatacaaggagaaagatataatctgcaatagttctgaggacttgctgcaaataagtttggcagaaaatcaccaggtgctgaacgacattgtcgtcattggatacggaacgcaaagccgtcagaacgtgacatctgcaatatcctctgttaaaagtgagacatttaaggatgtacccgtaaatagtttcgaccaggtattgcaaggaagaagctccggagtacaacttacctctccttcgggtaacttgggcacggcccctattattcgaataagaggtgttgcatcaatcacatcgggcacaagtccattatatgtggtggatggtatccccattcaatcaggaaatctttcttattcaggagacatcaatgtactttctgatatcaatcccgatgatattcaatcaatcgacgtactaaaagatgcctctgccggagctttgtacggttcaagggctgcaaatggtgtagttttgatcactacaaagaaagggacgaagggaagagctaaggtatcatacaacggatgggtaggtatttcatcacccgtaaaatactatgatgtactgaatgcgcaacaatttgtggatgtgaaaaacgaagcagtaaagaaccattatggcactgaccaatactcacttagcaaatcagcagctacgactgatggttctaaagcgtttaacctcggctatgacgcaaacggcaaggtcatcgacacggattggaacaaatatgtattccaaaacggaatacaacaaagccatgctgttgcggttgatggtggcaacgatagagttcaataccacatatcgacaaactatcttgaccaaagcggtattttaaaaggggataaatatagtcggttgggaacttcgttcagtgtagatgcacaagccaataaatggttgaaagtaggtgggacgcagaccatatcattatcaaaccaacagacggctgaccgatccagaggtggaaatattacggcatactctgctttatccagacttgcatgggcagatgctcccaatatagcggcatataatgccgatggcactccctatcaggaacaagggcatttgggatatggtcccaacacggtgcaggctccacttgacaatcctgttgcaatcatcaattcaaaaagctttgtcaataccgaaaatatccgctggttaagcaattattacggcgaactgactccgatcaagaacttgattttgcgcacacaatatggtaaagactttgccagaattgaagatcgagactttcattcaccgactacagtaaacggatattcacaaaatggagttgcgaccaatgtatcgactcgcagttcacaatatacatggaccaatacggcaaattataaactgtatctgggacataacaactttgattttcttgccggctctgaaatttcggaaaggaattacaaatattggggaagcacccgtagcacccttgtggatgcatcatacaacatttatgaagcatcatacaaaaacatcacggctattgacagtaaaatatcggaaagcggaatggtatcgtaccttgcacgtgtcaactacgattatgactctcgttatattttatctgccaattaccgcagagacggttactcggcactaagcaagaatcaccgttggggtaacttcggaggtgtctccggtgcttggcgtgtctctgatgaaaccttcttcaaaccactaaagaacatcttcagcgatttaaaactaaaagctagttggggtgtagttggtaacacaaagattgacgactatgcatccaaatcatactactccagcggttactacggaactgacggaacatatatattggggcaggtcggtgactcggaaaacctgaaatgggaaaccagtaagaagtttgatgccggcttcagtactttactgtggaacaatatcaatattgattttgattactaccgcaatgtttcttccgatttgattctgcaagttcccgtatcaccatctgaagggatcccgaacaactatattacctcgaatgccggaggtatgagaaactcagggttggaactttccatcagtgcaaacatcataaacaagaaggatttcacttggtactcttcattcaacattacgacaaacaagaatgtggtaactaatctaagtgagaatatgagccaacttattactgcaggaaccggtgaaagtacaaacataacaatggtaggcaaatctatcggacaattatatctttacccgacacaaggtattgatcctgccaccggtagaagaatattcacaggcaatgacggtacaaaggttcttatggaatatgaaaaaagcaacaagttctacacagaagacggtactgcttactcacaaagtaatttatcgagagtcgtagccggcaacactctacccacatggtatggaggttgggcaaacaactttaaatacaagaaccttgatatgtcggtattattccaattctcgggcggtaacaaaatatacaatggttctactgctactttaagtgatgtacgtttctggaacaattccgtagagtataaaaataaatactggactgccgaacgcaccaacgcaaaatatgcattgccgatatatggcgacaactattcaaatggtagtgccctgcctattaccgactgggttgagaatggcgattatgtgagattaaagaatatttcattgggatacactcttgatcagaagactattcttaaaaccttaggattgtccaccctgcgtatttatttgcaagcacagaatttgtttgtgctgaccggttattcaggtcttgaccccgaggtgttgtctcaaacgcaatcgcctaacttaaacggaggtacagaccacaatacagctcctcaggcacgaacatttaccttcggggcacaaataacattctaatcatataaaaggaaagaattatgaaacgaatatatatcatattacaaattctcatagcgacttcactagtgagctcatgtgattcgattcttaacaaggaacctgttctgcaaacaactgaaagcaatgtattttcaagcgccgataagataaaaagcaatctgttaggcatttactctgatgcaaaaggccaaatagcacttaagggagctgcttatacggatatacgtggcgaagatgtggcatccctttcttcaaatgttttcgaatgctacacggtgtatgaaatggcagtgggacttaccacaaccgacaattcagatacatggtctaaattgtacaccgttatcaatgaatcaaatacattccttgccaatcttgacaatgcgaaagatgtagccggctcgtcatacagccaatatgtatctgaagccaagtttctacgtgctttaagttattattacttgaatacattgtatgcttattcctattctgccgactctacagcaaaatctgttcctctgcgattaaaggctgaaagtagtacagcggataacaacttggcaagatctaccgtagcggaagtatacactcagatattaagtgatttatctgaaagcaatattgcggcacttcctaatgccggtaacacctatgatggtatcacccgtgccagtcaggcagctgctcgcgtactgaaacaaagagtatacatggaaaagaatgattggaaagatgcaatcacgcaaggggaagcaatcaccggatatcaacttttggataaggtttcctcagttttcacaaatgatataaacaaggaagtgattttctctttccccatgtcttccacgaataaaggtggcgatcaaacggcattggcttactattatcatagcggaaacatcttcatcctcgacaatacgtatggcttcttgtcaaagccgaattattctctttcttatgatactcgtattaaggatttagtatccaccgctaattcgaatcgcatacttaccaagtataccgattatcagacttatcttgattgggtacccgtcttccgttatgctgaagtagaactcaatctcgctgaaagttattacaataataatcagttggacaaagctcgcgaagcactgaaagaagtacgccatcgttctattgcagccgaacttgacccattggatattgacaatttaagcagtagcgatttgaaagcagcaatctacaatgaacgtcgtgctgagttcgttggcgaaggcattcgttcacttgacattcacagaagaggagaaaactttgtgaaacgcaacggtacattcactccttcaaccaatggatatatatggcctataccaacaagcgaacgctcggtaaacaatctgattacagactaataaattagaagaaaatgaagtatataaataaaatatatctggcaagtgttttctcattgggtgtctttcatgttgcatttgctcaacaacctgctgatgaagcctattttaggaatcaaataaagatactggcttctgatgagttcggcggtcgtaaaccattgaccggagatgaagacaagacgatcaattacatcgctgatgagtttaagaaacttggattgaaaccggcaaacggtgacagctatttccaggacgttccactaattaatgtaaccaccaaggcaaagaataatcagattacgattaaaggtgcaaaaagcaaagtcaaacttacctcatataaagattttattgtttggtcggctcgtaatagcaagaaagtggatctaaagaatgcacaattcgtattcgtaggcttcggcataaatgcacctgaatacggatgggatgattacaagggccttgatgtcaaagggaaaatagttatcgcattgctgaatgatccgggatactacaatccttcgcttttcagagggcacaacatgacctactacggaagatggatatacaaattcgaagaggccagcagacaaggagcagcgggagtattggtgatacatgataccaaacctgcttcatacggatggaatgtggtgcaggcttcgtgggcggaacacaatcttgaactattgtcggacaaaaagaatctcgaccaggtttcatttaaaggttggatcaccaaggatgctgttacaaagcttttggctgcatcaggaaattcctatgacgaactgttcgagaaggccaaagaaaaaggattcaaaagcgtatcattagcagcaaacgcaaacattaatctgaccaatgacttgaaagttgccaattcacacaatgtggctgctatcttaccgggaacggacttgaaggatgaatatgtcatctacacagctcactgggatcacttcggtgtgggaaaacctataaacggtgatagcatttacaacggagcgagtgataatgcatcaggcgttgctgcgttactcactatcgctaaaaagtatacggaacaagtgcaacgtccacgacgttctatcctctttctctcggtcacagccgaagaagccgtactgctaggttcacaatattatgtggagcatccattagtaccgctggacaagaccgctgctgacatcaacttcgacggtatagctccacgcggacgctcctacgatctcatcattggatcaaaaggcgattcggaaaccgatgattatgtgattcgtgcggcatcagcacaaggtcgcaccgttgtcacctctaaagaacaaacaagcggaagttatttccggtcggatcacttcagctttgcgaaagtaggaattccggtggttcttgcctccggtggatttgattacgtagataaagaagcagcaaagaagacaagcagacactaccatcaaccggatgatgaataccatgattcatgggatgtgaaaggttcgcttgatgatgtttacttgaattacgctattggattctccattgccgatgccgacaaactaccgcaatggaatgccaatgccagttataaacgcataaaatagaagaattatgaaacgaaatattatcctttcaatcttctgtttgctaagtggatttacctgcatggcgcagaacagtttcacgctatcaggtaaattcttcacagcaagtcaaggagataccatctatttgaaacagccgattgaccgggagtcaagcaagttactgctaaagattcccgtacatggagatagcttcacaattagcgggaagcaggattccacactagttgcattcctggaatacacggttggaaatgtggtgaataggaagagcttcttattacaaagcggaaacattcattttatcatcaacaatgaatctgcatcagtgtccggcacggaggcaaacgattcattacaatccatagtggaacatcgcgaacaactgtcgcttgcatgggacaaagcggatgacgcttatgaatcagcagcacccaacgataaagagcggataaaacaagaagtaagaaagtggggaaatgccacacaagattatacggtatcggctatacgcagaaacattgacaatcctcttggtattctattactgtttgaatataccaagttcactcctgccccacagttggcggctttaatagaaagcatacccgataaatataagaacaacccttatgtattgcagcaacgcgaattcatccacggtattgagcagacaaaagaaggacagcacttcgtcgactttcaattgcctactgctgatgggaaacttataaagatctcggatattataaagaagaacaaatataccgtaattgatttctgggcaagttggtgtgtaccttgctgccgtgaaatgcctgaattgatcaaactatacaataagtataaaagtcagggattaggcgttgtaggcatctcttgggatcgtgacaagaacagttggattgcaggaatccgtcggttaaatataccttggactcagttatccgatattaagggacgggagaacgttgtagggaaattatatggtgttcgcaccattccttccatttggatcatcaatcaacaaggtatcattatagctaaatgtctacgaggtgatgatgttcccaatactataaacggattgttcaaataaactcttttcattgcaattctcggaagatgcctctttctgagaattcattttatggcgtttgtattgttaccctgcaaatacagacgccattttatatgtaaattcttcattcggcaagtctattttctttattagggtaatgcctatgaaacattagggataatcactattcagaagattttccttgctctacttttgaaacatacaaaagagattatatattaatcctaaaaaagaatcgttatgaagaagattattttatcattgcttgccatcatgatggtatcaatgagttcagtagctatagcttcagatagaggcggacgtcatcacagaggtcacgatgcagaagtagttgttagatatgagaatggaagaggctatgaccgtcctaattattatagaaatgacagagacgataatcgttgcgactacagagatgacagaagagcgcctgaatacagaggtcccagagaagacagagattatgagatgagatacagagaagagccacccagaagacccagacacgaatacagacattactattatcgcaataatgcaaaagcagccggtattgttttgggagcagcagctcttatcctactcacatcacactaaataaaggatttaaccctaactaggttttgcggcaaacgatagaggttcctagaaagttccctattgtttgccgcattattcttatacctctttcatcatccatattccacaatagcaatgcccactgttccccattggagcatccagaaatgagaagcctaacttttggtaaaggctcacggctccactcaattcatccatactttccaaatagacctttgaataaccggcttccttggcaaaggtcaaacacttccctatcaacaatttacctcgtccctttcctctcgtctcaggaagtaaataaagctttaccagttcggctgtatctgatggcaagccgtctgtaggataaatacctccgccaccaagaactttattattctcgtcgtcccaaacaacaaagtatgtacttctttccgtatgaaactctttgctcaaatgattgatctcgtcatcataatatacggttccgggtttattcgctccaaactcttccaacgtcttgcgaataatacaacctaaagctttatcgtcttcttcttgaatagtcctgattgtcataaagtaaaatcattctgtcttaataaaaaactagtgatagatatcacgttaactgcttctacaaaagtacgcattattttcataaatagtactgtccctaaaccggcataagctaaatcgtctttatacaagacaaagatatacaaaaataaagccatgaatttatttaaaacaaaaactcccaccgaagcgggagtataggaattaatatccttcggcaattactgccttattgtgataagatgtagatcttatattacaaatgtaataatcttttttggacaaacaaaatatttatttacttttataaaaaattttgcactatggaaagaatattaggaatagatacaggaacgaacagcctaggatgggctattgttgacaaggaagagtcttcatatcgcctcatagaaaagggagtgaatatcttccaagaaggcgtaaaaatagaaaagggtattgaatcttcaaaagcatctgaacgaacagatcaccgttctataagaaagctctattaccgaagaaagcttcgcaaaataagagttttaagagttttgtctgataatcatttatgtccaccattatctcaaggggatctttctatgtggaggttacataaaaagtatccgatagataataactttattgattgggaacaaacagatgacaaagaaaataagaacccatattattataggcacctttgtgttacaaagaaactggatttaaataaactagaccaacgctacatactgggaagagccttctatcatatagcccaacgaagaggatttttaagtaatcgtaaagagactaccaaagaaagtgacggaactgtaaaactaagcattgatgaactttctacagagataagcgatagcggttgcaaatatcttggagaatatttttattcgctttatcagaaaggagaaaagataaggaaccattatacagcaagaaaagaacattacctaaaagagttcaaagccatatgtgaaatacaaggcatagacgagggacttgcaattaaaatagaaaaaactatattcacacaacgtccacttaaatcacagaaaggtcaagtaggaacctgcacctttgagaaaggaaagagtagatgctctgcttctcatccatattatgaagaatttaggatgttgtgcttcatcaacaacataaaagtgaagaccccacaagatgatgatctaagacttctaacaaaagaagaaaaagaacttattgctcctttattttatagagtctcaaagaagaactttaactttgaagatattgcaaaaaagattgcaggtaaaaacaactatgggtattacaaaaaagaaacatacaaaccatatcttttcaattaccaaatagatacatccgtctccggctgtccggtcttatctcaattacgtgcgatattcggtgataattggattgacactgtatcacaatattacacactaagaaaggataagaaaaagagtgaaatcgttaatgatatttggcatgcactattcttctactctgatgaagacaaactcaaaggatttgccggtaacagactacaacttgaggaagaaaaggcggagaagtttgctaagatcgctatgccaagtgactacgcttcactaagcttaaaagcaattagaaacattttgccatatttgcgaaagggccttccctactcacatgccgtattcttaggcaatttaggaagtatcattcctcattacatttgggagatagacgatactaggggattcatcattgatgaaatctgcaagatgattgatcaatatgatccgtctaaagagactggaacattggaccaatgcattaaaggctttcttaatgacaacttcgatttgccaacaaatgccaccgatatattatatcatccctctatgatggacgcataccctaaagttcgtccaaatgatttaggtgaataccaattaggttctccacgcaccggtggtgtaaagaatccaatggctatgcactcattgttccgtctgcgcaaagtaatcaatcaattattaaaagagaaaaagattgataacaacactacaattcatgttgaatttgcacgtgaactgaatgatgccaataagcggaaagctattaatgatattcaaaggagcaatcagaaaaaacatgatgaatataagaacagcataaaagaacaatataaagctgaaacaggtatcgatattgaaccaaacgactccgaagtattaaaatacgaattatgggaagaacaaaaccatatctgcctttataccggtgagaccattcgcattagtgatttcataggggctaatcctaaatatgatatagagcataccataccgcaaagtgtcggtggagatagtactgtcatgaacttaactctatgcaataacagatttaacagagaatcaaaaggaacaaagcttccatcacaactacctaatcatgaagaaatattagaacgaatagaggactggaaggacagatatgaatcactcgagcagcaaataagaagaacaaaagcaaatgctgcctcatcaaaagaacagaaagatacgatcatacagaaacgtcaccgcctttccatcgaacggaactattggaagaataaatatattcgttttactatgaccgaaatacctgaaggatttagcaggagacaaggaactgatatcggaatcatttcaaaatatgcacggttataccttaaatcggtattccctaaagtatatgtcgtcaaaggattagctacatctgacttccgtaaaatatggggattgcaagacgattacgtgaagaaagaacgcgtaaaccatgttcaccattgtattgatgctataactatcgcatgtatcgggaaatatgaatatgacaagcttgctcaatactatcacgatgaagaaaaccataaatggtttggattacaaaaagcacaataccctaagccttgggccactttcactgaagatttaaagaacatacaacaggaaatactcattgcgcactacaacgctaacaaccttccaaaacaaagtaagcataagataaaaatgccggatggatctatacaatatgcccaaggagacacggcacgcggatcgttgcataatgatacctattatggtgccatacaacaagacggacaaataaagtatgtggtacgcaagcaattaaaagatataaaagagagtgatattgccaacattgtagatgatgtggtaagacaaaaagtaatgaatgctgttacggaaaagggattcaaaacggcaatgagtgaagcaatctggatgaatgaaggaaaacaaattcctatcaagaaggtacgttgctatactccttccgtcacaaatccactgaacatccgcaatcaaagggatcaatcacagcacgagtacaaacgtacatatcatgtcaccaatgatcgaaactatatgcttgcgatatatataggtaaagacaataaaggaaaagaaaagagagaatttgaattggtaaacaatttagacgccgcagcttattataagagaagcaatgataaaggactgactgatcatcaattagtccctcaaataagcaaaagcaattatcccttagcttattgccttaaaataggtacaagggtattactgtatgagaagtcaccttccgaaatatgggaaaacgatctgtctgtaatacaacagaggttgtataaagttactggattatcatcactaagaatatcaaaatatagctatgcagctatcaatatggtttatcatcaagaggcccgtgcaagttctttgatccctgtgacaaaagggatctttaagaaagaagatctattcagacctggaatctttatgctgaacacacaaatcaatgcattagttgaaggatatgattttgagatagacgaactaggaaaacttaaacgattacgccaatgatcaagcagacactattccttactatgccggtttcattatccttgaaagatcatcaaatggtgatttcagtaaaagaatcggatgaaaaagtaaaaagggctatagaagacattggatttgtcattatagagaacccaatgatctcgattaccatccctttgctcaatgagcttgtggaaaataatgtaagtgtcatcttctgcgacaacagacaaatgcctcaatcaatgctactaagtttagactctaatcgaattcaaggagaaaactttagagaacaaatcagcattaaagaagtattgaagaaacagctatggaagcaagtcatagaatataagattaaaaaccaatctttgctgcttaataaactagggaaatccggtaacatgttaaagccattctataccaatgtgaaagcaggtgatagcgacaatagagagggattagctgcaagaaaatattggaaagagctattggggaaagacttctcacgtgaacgcatgggagcaccaccaaacaatctactcaattatggatactcgctgctacgtgctgcaacagcaagagcattaacaggttcaggattgttaccatcattcggaatctgtcataagaataaatacaatgcttttccattggctgacgacatcatggaaccttatcgcccatttgtagacgaactggtctttgatctatatgcaaacggagaaacagaactaagcaaacaaacgaaatcagatcttttccgtattctattttgcgatgtgcatttcagcaaagtaacacgtccgcttgaagttgcgttatcattaaccaccgcgtctttagcaagatgttataaaggagaagagaaatctattgtttatccattaatataagaatgacagaataccgattaaatgcctatcatattatgtggctatttgttttcttcgatctccccacactgagtaaacaagacaagaagaactccgctctttttcgtaagaatctcgaaaaagacgggttctctatgatgcaatattcagtatacgtcaggcattgcgcatcgcacgaaagtctggtagtacatcaaaaaagagtaaaatcatttattccattaaaaggaatggtgagtatattatgtgtaacagataaacaatatggagacatatataacttttggggtaaaatgaagaaaaggatcattagtgagccccaacaattagaaatattttagtacttttgcatcagtatttgactatatcataccatttctttagcaaagaatagctcgtaattagttatattacagcaggttatatcactgaggttgtggtttgatgtagatgtttgataagatacaaccttctatgtttacttctgtaattgccttcggttgtggtttgatgtagatgtttgataagatacaacaactccaaccaaattgttccatcacttaagttgtggtttgatgtagatgtttgataagatacaacttatttttattaattttcttgcataaattagttgtggtttgatgtagatgtttgataagatacaactattcgtcttctttaaaatccttaaatgaagttgtggtttgatgtagatgtttgataagatacaactcattgtgttgtttccatttttgcatgaagttgtggtttgatgtagatgtttgataagatacaacctcgcaccccgtggcatgattgtaggcacgttgtggtttgatgtagatgtttgataagatacaacaaaaacgcattttacaatagtagatcttggttgtggtttgatgtagatgtttgataagatacaacgctgtctgtgctttctgtccgtccgtgctagttgtggtttgatgtagatgtttgataagatacaactaggaataacaggcaaagagaatgttgtaggttgtggtttgatgtagatgtttgataagatacaacgtagtaacatttgaaacaggcgcacttgcggttgtggtttgatgtagatgtttgataagatacaactaacatcatcaaacaaagaaagtctgtcggttgtggtttgatgtagatgtttgataagatacaacaaatgcaaagagcttctgataatacagacagttgtggtttgatgtagatgtttgataagatacaacgttaacggctactataaatataaacaagggttgtggtttgatgtagatgtttgataagatacaacgatattgtaaagttgaaaggttatgataggttgtggtttgatgtagatgtttgataagatacaaccaagtctatcgaatcagcagttgacgaaaagttgtggtttgatgtagatgtttgataagatacaacttttataaattatcgggatggaagatagctgttgtggtttgatgtagatgtttgataagatacaactatcctccttgacgataaagcaatgtgttgttgtggtttgatgtagatgtttgataagatacaactattatgtatagattattagacatacaagagttgtggtttgatgtagatgtttgataagatacaacgcggtatcttgcgatacgacaactttttgagttgtggtttgatgtagatgtttgataagatacaacaatgcaggaatatacacatccggcgtacagttgtggtttgatgtagatgtttgataagatacaacgcacctgaatttttagcagattcattaaggttgtggtttgatgtagatgtttgataagatacaactgctctttctgatatgggaactgtaagcacgttgtggtttgatgtagatgtttgataagatacaacggacgtatgggaaagatggaagttataccagttgtggtttgatgtagatgtttgataagatacaacgctttcgctgccggacttgctgtttttaagttgtggtttgatgtagatgtttgataagatacaacaatactaagtatctatatgccatcacagagttgtggtttgatgtagatgtttgataagatacaactataactggaaacgttcttttttccgccaagttgtggtttgatgtagatgtttgataagatacaacgagtttctttgtaaaatcctcctttgataagttgtggtttgatgtagatgtttgataagatacaactatagacttggagggaattatttctttggagttgtggtttgatgtagatgtttgataagatacaactccaactttcatttaaaacatcttccaatagttgtggtttgatgtagatgtttgataagatacaacactgggatgttttgctcgcaggtaaaaagagttgtggtttgatgtagatgtttgataagatacaaccttaagtatactattgtgtaagactaagaagttgtggtttgatgtagatgtttgataagatacaactttaatagatgcaatatcggtggtgattagttgtggtttgatgtagatgtttgataagatacaactctgaaagcctattaggtttataaccatacgttgtggtttgatgtagatgtttgataagatacaactatacattaatcaatacgtattgtagctacgttgtggtttgatgtagatgtttgataagatacaactcgtccgaactcatttgattgatctgaatggttgtggtttgatgtagatgtttgataagatacaacccttattaatgtagaaacaaagggtaatggttgtggtttgatgtagatgtttgataagatacaactcaaaatatcacagagatgcgtggtgagagttgtggtttgatgtagatgtttgataagatacaacgataacgaaatgtctatgtatctagcaacgttgtggtttgatgtagatgtttgataagannnnnnnnnnnnnnnnnnnnnnnnnnnnnnnnnnnnnnnnnnnnnnnnnnnnnnnnnnnnnnnnnnnnnnnnnnnnnnnnnnnnnnnnnnnnnnnnnnnnnnnnnnnnnnnnnnnnnnnnnnnnnnnnnnnnnnnnnnnnnnnnnnnnnnnnnnnnnnnnnnnnnnnnnnnnnnnnnnnnnnnnnnnnnnnnnnnnnnnnnnnnnnnnnnnnnnnnnnnnnnnnnnnnnnnnnnnnnnnnnnnnnnnnnnnnnnnatgtttgataagaacatcgcaataaacattccgttttgagttgatgccgatgataatattatacaggcatcttctcttaacgaaagccatttcctttattattaataaccaaagacttatagtccacgacaagcattaccctatagcaagcatcccctccccaacagccaatcacccaattctctcctttgattttttatactcactattaggcttactttaatttgttagttcgaaaagattgttttacctttgttaaacttaagtnnnnnnnnnnnnnnnnnnnnnnnnnnnnnnnnnnnnnnnnnnnnnnnnnnnnnnnnnnnnnnnnnnnnnnnnnnnnnnnnnnnnnnnnnnnnnnnnnnnnnnnnnnnnnnnnnnnnnnnnnnnnnnnnnnnnnnnnnnnnnnnnnnnnnnnnnnnnnnnnnnnnnnnnnnnnnnnnnnnnnnnnnnnnnnnnnnnnnnnnnnnnnnnnnnnnnnnnnnnnnnnnnnnnnnnnnnnnnntgttttacctttgttaaacttaagtttaacctttgataaacttaagtttaacctttgataaatttaagtttaaccttcgtgaaacttaagttttacctaggttaaaacatagaatcaaataattaaacacacaaattatgcccatcaagtttgacatttatcctaatccaaagcggaagaatgataccgcggatacaaagtatcatgcacgtatcattaccaacagaatcgttagtgagaagacttttgccgatgagataagcaaagcctcatcacttactccgggtgatatactgggagtattgactgaattgcgctcaaacatagtgacccatctattgcaaggagaacgtattcatcttccgggaatcggatatatggaactgtctatcgacaatcctgaaatagacagcgacggtcccaacttctccagcaaacgactgaaagtaaagaccataaagtttcaacctgagaaggaacttaaacaggagatccgcagcaaggccagctttgaacgtatcaaggagactccccactcagctgttcgtagtgagaaagataccaccgctttgctccgaaagatatttaaagagaatgatatggtgacacgcaaacagcttggtctattgatggattatactcctagcaagacatacactttgctacgcaatttgaagaatcagggacatgtggaagaacacggattcacacgtgtacgtctgttcaaggctacgcctaaactctacgatgacaacatattaaacaggctgatagaatctagtgaaaaaaaataaatcttagatgatggttctttcttttttctttacgggaaaatgtatatttgtatctcttgatcgaacttaacaacaaaatctattatcatatgaaatcattactaacgtacacagagctggaagattatttgtataatcatttcaacaagatcgtagaacttaaatacgtctcggaaaaatgcatttcatccaaagtggatgttaaattgttgctcctgctaaagagtgtgagcatagacattacggtggatgaaatcaaagatgcggaaatacatctttcctattccggcggagtagctattgatacaatcatcaaagggattggtgtcttcaacaaaagcaagatgaagaatgacgcatttactattgatacaagtacccaaaaggtcgtcattcacctatggaggatagaacaaatgcgcaaaattatagagacttgcgaattcaaggatgtgaaattctcccctgaatacgctcaaattgaagtggtattgaaatagttttcatcaaactatttcaatatcacaacgatcaggcttctttcttctgactcatccatgcatatcctgctaccactacgtatgaaagcaatggtacaataaaggagcgagacatggatgtatgatcggctacgtatcccatcataaatggaccgatggcaccaccaataggtgacatcatcagataggatgaagcgcgttttgtgttgctacccaattttctcaacgaaagagcaaaaatggtagggaacattatagcctcaaatgcatatccaaggaagagggcaaccattgaaatcattcctaagttgagaatgaccagtgaggtggtgatcactgtgcctatagcacaaaacagtaacaccttctcgggacgaatacgttgcataatccagcttccggcaaaacgtccgcacatgaacagtcccaaccctccgaaggagagcacgactgaagcgccacgggcatccatccaaccatcgtcaaccacgtaattgatgaagaagctgtttatcgaaatttctgctatctcataacagaacaaggctactatgccgaataaaaaaagcttatgtgaccataaactcttctcatgaccttgttcgtccaaatctatttcatgagccatttcaggcaggcggactttggaaaagaccaaagcgacaatcaaaaccacaatgcccatcacggtatacggaactgagatattctccaatccattgtctgaaaacaacagcattccaccgatcagcggtccacagatacatcccaatccgttgaaagattgagctaaattcaaacgactggctgctgtgtctttgtcccccaattcaatcatataagcatttgctgccgtttccagaaacaccagtccgcaagcaatcacgaacaaggagaaaaggaagaaattgaatgacatccaatactctccgggaatgaacaacaaggaacctaatccgtaaagcaacagaccgaagattactccccacctgtagccatgtttactgatataaagtccggcagggatggccataatgaaatagcctaaatagaacataccttgtacccatgctgaatgagtacgggtcatagacattatttcctgaaaatgtttgttgagcacatccagaatggcatgtgcaaatccccataaaaagaagagagtggtaactaagacgaacggtatacgatattctttttttactaatgaatgtgattgtttctgcatattttctataaattacttttattcgtttttcttggaagtcagagagcgttgcaaccactctattgcatctttcactcctacttttttgcctgtgtaaagtatcatacctctgtatatcttacctgcaagccacatcatgccgatcatggtgaccaacagtatggctattgaaatgatcaattcgcctgtaggagccccgaaagccaaacgccccatcatcaccacgggtgaagtgaaagggatcatggacaaccagaacgaaagggtactatcgggattattgactgtgtctacggtcaatactatgattgcaataatcagtggtaagcctaccaacattgacatttgttgcatttcgtcgtgatgattgacggttacgcctactaccgcaaatatggatgagtagagcagataaccgcaaataaacaacaacacaaagcctattatgattttcaataaacctatttgtaccaaaagatgaattgctccatgacttaagaagtcggagaagcctccgggagttaaatgcattcccacggataaatagaaaagcaatccgcatccgagaacgatccaaatacctatttgagtaatacccagcagtgcgataccaacgatcttaccgatcataaacttaatcggagagacagtggtgataatgacttcggctattctgttcgttttctcttcaagcactccttgcatcacttgcgaactaaacaagaagatcagcatgtagatgaaaagtcccaatgtcaccgccacaatgtaacgaatgacatcattgtccgatttgtctgtaggattttgtaccttcaccgtatccacttgagcattttgcttgacttgcgccaataactgagcaggattcttcactccatactcagtaagtcttttattaagcattgctttctccgtgattgcctccaacttttttattaaagacgaagaagttcgcttattgtaataataacgaaccgaaataggatgtcctttctctcctgtaatctctaccactccatccattttctttttattgatcattgaacgtatctgatcgaacgtggaagcaggaagcggcgtgagcaccaatttattttgtacaagcacttcgctcatccatcctgtatgatctaccaaccctatccggctggtgtcctcttcgttctgttcggcaaaatatcccggaagaaacatgatcaatgaaaagaagacgggcatcaatatggatgtcaagatgaaggctttcgtacgtactctggtgacatactccctccttatgataataaatatttgattcataattcttcgtttttattcttgaccgactcgataaatatatcattcattgaaggcaacagttcacagaaggatgtaagtttcacctttccggcaatatctatcaacacaccatcggcttcgctttcagtgttcagtttggctaatacagtgtacactccgctcttcaattcagatgaaactacagttcccgacttggcaatacgttcattcaagaaatcgacatgctcgcgacatttaaactcatacaatgattgtttgtgtgcctgcttcacctcgtctactgttcccgacaacacgacctgtcctttatcaatcagtacgacccgttcgcaaaaacgttcaactgaatccatattatgagtggaaaatacaatcgtagtgcctgacttatgaagttcaaggatttcattttctatcgcttcggtattcagaggatccaatccggaaaaaggttcgtcaagaataagaaactcaggacgatgcaacacagcaataatgaactgcactttctgttgcattccctttgaaagagaatctattcgcttatcagaccagtcacgaatatcaaaccggccgaaccaataattcatttgttccttagcctcaacagttttcagtcctcgcaagcgagccatataaaggatcagttcgcctactttcatcttcttatacagccctctctcctccggcaaatagcctatcttccgagcatttaattcattaagaggattatcattgatcaagactgtccctccgtccgaaaggtaaattcgagtaagaattctaatgaaagtggttttcccggctccattagggcctaataatccgaagattgatcctgtgggaatagttatattcactctgttcagagcaacggtatcattaaatttcttgtatatatcttctgctactatcatatatgcttattttcaggaaacaaatgtaattaaaattattgaacgtaaacgaatcttttaacaaatggttacatatctattaactcgtgaatttcattcacatgtaaattcaaatgatccagatatccgtctatcatctccttcaatgttactttgttgccttcgaagtcgcaccagtaactatccagtcttgtttgatcgacagccttgatcacttgaatgatatgaaggttggaatagatccaaagttgcaccagatcgtgccaatcggcatgttgataatcctgcaatgcaatccaaagatcattatcttgtctgtaatcagggaagaccaacaaatccttgcaatattgcaatctcaccattcgttgatgattattggatgcagaatcgatcatatgcccgagtatttgttttatggtacgatgctgtttgtttcttctgcttgttattacactttccgataagcctgtcagtatcggttcttctctggcaatcacttctgcgataccatccgtaattttcgtaagattaattgtacccataacttttatattttaatattaaagactgaagtccaaagaccttttatatttaagttcaacgtgtttgataaaagagtgatcaacaattcttcaactgccgaaaggctagccggaatacata

SEQ ID NO: 4188 - DNA, 23615 bp, synthetic construct
  misc_feature 1..23615: note = Synthetic
  source 1..23615: mol_type = other DNA
tcgcccttctcgtccatcacctgtttaaagtatttggtggcaatcacgctaacaggtccgataggcgtttggcatacggtgtttaccttgccttctacctcgccgctcagtttttccttgttcttacgcatcttgtaaagcgtaaatgttccgtcctttcgcaggtccatcttcaggtaggcgccgtctttgtctgtcagctttgggaaggtgagctttactggcagcgtttcctcccaaaggtcgcatttcatcagcccgtcgtaagcggcatagcgtgtgtccagacctaagcggttgattacttccatcagtagggcaggcgacgacatgatctccatctcgttgctgacgttcgatgcgatgttgatgcctgccattccggccagcatacccatgctggctgacatcgatgacaacaatccgccaccaccgttctcgtccttgataagcacagtggcgctacgttcatatcgtggggcgaacatcagcaggaacaggatagcagctatcagggctgtggcaagcgtggctgcaaaccatcgccagtgtttcttacattcgtttatgtatgtttttaagtccatatcagcttgattatttaaataggaatacggctacagtggtgagcaccgatacaatcgacagccagaacgatgcgttacgtgtctcgttgccgttggcagtcgactggcgtgctcttacgttattggcttttacgtagatgatgtcgttctggtggatgttaaaggcttcagagtttaacagcttctgtccgtcggtaaggctcaatacgtaggttttacgtttgccgccatcggttctgattaccatcaccgagtcgcgcttaccatactgcgacaggtcgcctgccttacctagcgcctccagcagcgttatctggtctttctcaatcttgtaaacaccaggttcctttacttcgccagttactgtgtaggtcatgttctgcagctccacagttacgttggcatccttcagctgctccttctgcagctcgcgtttgatggtctgttcggcctcatatctggtcaatccacccacaagtatctcgccaatgactgggaaatcaatcgtgccttgcggacttacggtatagggggcaatatagggattgcctgcagcgttaccttgggtaatctgggtggccatactcttgttaaacaggttgctcatcagcgggtccttgctctttacaatcaccgttagctgatcgttaggttgcagtttaatggttccgtcgatggtgatatccgtctgctgaccgttctgtaggtcctgcagatagttgaaattgcgtggcgtcgagcagcttgccatcaccatagccgcgcaaatagctatataaaaacgggtcttcatatatcttataaaacgtttcttacaccttattattatagaaatcggctacaaaaatactaattttttgcttaaaaacatggtttgtagcagaaaaagtgctatctttgcagccgaatagctagtgagcgattcgaaattacgacatttacgtcttggggttgactggatttgacggcgagatgaaatggtacgtaagcacgcggaggcttctttggttccctccataatctgagtcaaggaaaatttaattggcaacaatgagtatgctctcgctgcctaatcgaagtatagtagattactggctttattcctttacaaggtagaggaacgagacgtcgctccgaggatgttgttccgaatccaaagatcaagcggcgcaggttaaatcggaaatagtcgttgcagactccgatgtagcggtgaaattttaggagataaggttgcggttggtggcttgggtcttgccgcagctcgaaaatgaaggccaagataagcgtgtagaaagcgtatggtttccttgtgcggacgagggttcgactccctccagctccactatgttacgccagaggggcctcaccctcgtgagggttcttcgcaagcgaagcgactacgtcgattacgactccctccagctccactatgttacgccagaggggcctcaccttcgtgagggctctttatttttttttccattaaccagtagaactaattgcacgttaataattattaacaatcggattgatccaaattcagatatttctttttatatttgcagcatctattaactgaaagattgaaaacttgtgattataaacggtttatgtgctgattatggcagccgtttctgcccatgtattttggcggtgacgggtggttgtgtagtttgcagtcaggtcaatggcaaggccttttgcgactgtaaggccagtggtggtatctgcatcaagcaggaactgctcagaaatggtgggaaggcaaaccccggtaggttaacgtatgaatgcgaggtgatatcggtgattcattacgacggcttggtatttttaagggtgaaggttcctatatcattagagagggaggtgaaacgtccgggcggctttgtgtttgtacgccgtaaagatgcggcttcctggtacgatgtccccatctccgtacaatttgaggagatgatggtgggcagcatcggaatgacgcttctttttcgtggtgtcaagacgaaccagttcaaggacttggccgagggtgacacgctactgctacgcggcccgttcaacaacggcctgttaggattgcagcatctggaagcgcaacaatcgagtcgctgcctgatactgaccaagggcattggtttattgccatcggtatccgcagtcagatatcttcaatccaggcacaacgaaacagaattgtatgttgacgaaggaaatttctcaccttctatcctgaagttccagctcgatctgtttgaactcccatttaagcctttgactctgcttgatgacgatggtgagctcagcacacctgccaagcacgttatcagacggttcgtggccgatggcggcagcctgattcatgtcggtgcttcggaatatgtgatacaccaggtggccgcctatctgcattatatcggcaaccgtcatgtaaagctttcggcctgtaacaatgccaggatgtgttgcggcgaaggtgtgtgcggcgcatgcacagaaacaactgccgacaaacgggtgattcatcattgtaaagaacaagtaaaaataaaataaacgttatatgagagttattatcataggaggcggatgggctggtacagctgctgcgatagctgcaagaaaagctggcgccgaggtttgtctgatagagaaaacagatatgttgctgggatgtggcaatgcaggtggaatcatgcgtaacaacggtaggttcacggctgccgaagagatgattgcgctgggaggtggcgaactgttccagttgattgaccgtattgcgttgcaccgcaatgtggagttcccaggtcatcatcacgccacactctatcccgtcaacaccatcgaggcgcatgttcgtagactggttctggaaatgggtattgatgttcactgttctacacacatctgcgatgtagtgtgtgataacaatcagttgaaaggtgtctatgccgactctggcgaccttttcgaaggtgatgtcttcattgaaactacaggcagtgccggaccaatgggtaactgcttgaaatatggcaatggttgctgcatgtgcgtgctgcgctgcccggcctttggtccgcgcatcagtatcactgagcgctgtggaggccaggattatcagggcgaacgccagcccgacatgttcggtgtgttctctggatcgtgcaaggtttcgaaagagagtctgtcggcagcgctgcaggaagaattgaacagcaaaggtgtagccttgataccacttcctaaggaggagatcaactacgacaaactgaagataaaggcctgtaaacaatatgccatcaaggatttctctgagaatatgatcctactcgatactggcgacgccaagctcatgaccagctactatcccgttgagaagttgaggcggctgcccggcatggaaaatgcccgttacgtagatccatgtgctggcagcaagggcaactccatacgttacctctcagtagcctaccgctcaaatgctatgactgtggatggtatcagcaacctgctttgcgctggcgagaaaagtggtctgtttattggtcacacagaggccattaccacaggaaccttggctggtcacaacgctgcacgattggctgccgccaagcccttgctgacactgccgcagactcttgccgtaggcgacctcattgcagcggctaacagtgctatcaaggaaaggcacgacaccatggagcgctttaccttctcgggtggaaactacttcaaccgcatgaaggaaaaacagctatacaccaccgacatcgaagccatcaggctgcgggtggaacaggctggactgctgggagtgtataatgaacatgtatagctatcagaatgcgctcctataaggttgacatagaagtctttgagcgaatgcctgttgcaagggctgtactagctcagagtatcccagccattgtggctcaactgatagtgcttctttacaactgggccgacacttttttcctggcacgtctgaacaagccggaactggtggcggcggctactattgtactgcccctctatctgatgctgaccgccatcggtaacctgcctggagttggcggcggaagccagtttgcaaatcatctgggcaagcacgattatacaggggcgcaacgtgtggcatcgatcaccttctggatgggtatgatactggcattggtatgctgtttgtcctttccgttgtatagcgacatactactgagcctcatcggtgccaacgaacgaactcttgcccccgccaaggagtatgcgttctgggtgattaccatcggcggcataccggtcatcatgaatctcgtgcttgccaatctggtcagagcagagggcatggcactccaggcttccatcggcatctcggcaggaggtatattgaattgcttgctcgatcctctgctcatgctgccgagcatgggtaatatgggtattgttggtgcaggtatcgccacggcagtatcaaacatggtttcggtattgtggctgcttgtcgtcatctggcgtcgccgaaagactggcgtgttgacctttgcaccacagcttctgcgctataccagacattatataggcagcatttccaaggttggtttcccatcatctatacagtatatgctgacggtggttgccgtagcagccctgacgcactttgttgcccaatataacactgaggcaacagcagcccttggcattgtgaaacggctcgactatctgccgctctattttaccatcggactttctcaaggcatcttgccactacttgcctacaaccactcgtcgggtaacgttgtccggcgcaatcacgtgttcaagtgtggctgtatcatttcgttcggatttgccatgctgtgcttcgctgtctttgaaatttgggcataccaattggccatgctgttcacacaggaatcgctcacggtatcatacatcgtaccttttctccggatacaggtagtagccatgccattcatggcggtgtgctatccctccatcacgctctttcaagctatggagcgttcacgagaggcccttatctgcagtatcctgcgaaaaggtgttgtcgatattcccctgctcattgtcatgaatgcgctatggcctttgtttggctgcatgtgggtgcagccgatagttgatttcacttcaatgttggttgccttttacttttcctctcagattcgggctcagattcatgactactaatcagcatttcattgcaccattacagcatgtgttttatttctcaatcaaccagtattccatgtggttggttttgcgtttgctcttaaaattgaactgaacatcgttcaaggcgttgcctatcttctggaatggcgtttctgggtcgaagttggcatagcgcgtggccagcacctgactgatatcgcccagactccaccacttgccttgctctgtttccttggggcggcggaaggtctcgccaatcatctcaaccagatcgttcagcttctggaacggctcgttctcggccatcagctgcttgatttcatcatcattcagccaaaagcgctcacctttattaaataggtatagggcctgggcaaacagctgctcgtggttcagcgtgtcgctgaagtcgatgttgccctctacacctacgcacacaaaacggcggcttcctgttgggtcaaccagcggtttcatctggttggtagtgccgataaacgaggtgtaacggcgatataacttgatggttttgccgtatggtggacggaacttcacatcgctcgacgacagcagatacttcagtacaatctgctgcgacgaggtggtcttatcaaactcatcaatgttgatgagggcaaagctggtaagggcaatgttcaggtcgaactcgttcttaaagttcagcttgtcgttgtaataatcgcgcagttcgggtggcaggatgatcttgcagaatcgcgttttaccacatccctggcgaccaatcaatagtggcgtgagtgcattacctgtcaactgcttatcgctttcgcgccattgtcctaccatgcccatcagccaatacttcaggtactttggccaatgtggctgcgaggtgggtacacgggctgccagttcggctatgtaatcatgcccgtcccatttgggcaactgatcaagccaggtattgatggggtcgaactgctcaatacgggtcgagtcgataaagcggttcacgtttctgtcccacgctttcagtcctaactcggtggctctcagcgtcatatcgttacgcacctcttcggtaagaggcttgaatcgctggtcgttgctaaacttctcgcgatactcggctacacccgtaagcaggttcttacgcatatcgaagttcgaattcaggaatatctcagtcttcatcgcctggatagtatcttcgggcacactcttcaagggcttaatcttatgcttttcgcgataatcctcctgttcggtcacgctataaacggtctggaaaatcttctcaaccagcatcttgtcgcgattcagcacagggtgcagcatcgtcaagcccttggcatgcgcctgagggataccctcgtcaaggcatctggctgctatctgcattagcaactcggcctctttattctcatcgggcaaatcaaaatagtggcccatgatggtctcgacgataaaggtccagttaagatgataggttcgcgtaacggtgcgacctggcatcagatgatcttcatccctactgatggttacaggctggggtagggtgtgctcattggtatcggcgtaaaacggacgagcatcggcattatagcccatctcgggatcggcgctcatgtagacggtgcggtccagtcgtggctccaaaaactggatgtcgaatccaaactggttctgataggcttgtctggctgtgttatacagattaagatggaattggcggatatccttctcgcccttgggcaaaccgccctcaaatagttcgcctcggcagacgatttttacgcttcttcccgatccacccagaaagcacatcaatgtttcaggcagtttcttggccaactctcttatttctacagcctcttcgtaggtctgcaggtcgttcacctccagtactaccaatccattataggccagcatgcgccaatcgcctttgcgattctgatagtcggccacaaaacagatgcgtggcagtttgatgccaccctctatttgtgtggtaatctgtccgtcgctcaatctgtgtggattcatcaaatgatatacctcgcgcgtttggcgcacagtcttctcaatcataccattcttgatggctgaggccatctcagccaactctacacggttaataacctctttacggccttcttttttaagtaatgtaatcttcatatttatgtttattagttatttgtttatgataatcgcccacaaaggtactacaaatattcgagaattaattacatttttagaaattatttttgctatatagcctacatgcctacataaaatcgctcgaaaaccgcatgtacagatggttttgtgcgttttcaagcctacataaagtaccacaaaagcctacataaagcctacataaattcgaccgaaaagtagcttttcgacatcccaaaagtaactttttaaggcacaaaaagctacttcctgccttgcgaaaacatacttattaatgtacttgcaatatttctccctaaaggatgctgcgaaattctctagagaattttcggctaagtgccttactaaacattactgagtacctgggtagctgcaaaattctctagagaatttcgtaacgagtattaaggataaaggttgctattcaggcaaacaatatctgttagtacgtgggtaaacggcaaaaacatgtaggctgcatgtaggctttatgtaggcttttgtggggctttgtgtaggctttaatctttgtaacatattgtgtaataggtgtttaagtcaaaaatatgtaggcatgtaggcttattgcataattttttattttattttctctgccgcattcaacaaaaaataatattttcattaattattttgtttattctctagaaaatgtgtatatttgcagcactaaaaacgtattacttatgaaatatagattaaagaaagaaaccaaaccaacgttgcccacttttggtaagtacaaggctgtggcagttcactaccacaccgtagagagcaggcaacttattaaagaagtggcccaacgcatgggtacgcatacttctaatgtattggcagtcatgacgagtgttgccgaggttgtaaacaatcatttacgtgagggcgatcgtgtgcgcttagaggactggggcatgatgaagctcgaaatcgaaagcgaaaaggttgacaatctcaaggattttaaagccaaaaagcacatccgtggtgtccgcctccacttcctcccccagagctacgaaggccaccaagaactctacgaaggcatcaccttcgagaaagacaaactctatacagaggattaaaatatcgctgcaatcttgcgaatcttctccaagcgcgacatgaatgatttgtcctgcttcatcttctgcatgttgtaatctgcctgcaagccaagccagatgttggcatctgtaccaagagcagcctcaagtaatagagcatactcggttgtaacaggtcgcttaccattcaatatctcgttaaacaccgtatatgatacccccatctgctgggccaaatccttttgggtaaggccacgcgccataatctcatccttgatcatctcaccaggatgaatcaacatcgatgatgtcatgttattagcaatcttttcttttgaaaaattatttttagccataccttatttatttatagtgatttgacaattccattatattacatattgttactacgggctcgtcgccagtctcttctagagtgaattctatgcgatactgatcattagcccttatagagaaacgtccctccttgtcgccatgcaacgcttcgaaatgaagagacttaaaggggaacaaatcttctttccgtttggcttgaatcagaaatttgatgcccttttgatatcctctgactatctgtggttgaaaccggagtttcttcaccccagtctcgccctttgtatagagcttctccagataatcctcgttgaacgttactaccataataataactattttgggtgcaaagataatatatttattttaaattcgcaaaaaatcgaattttttttcttgttattcaatttgttcctcctggaatttgaataaaaaagctcccaccgaagcgggagcataggttttacccttcggccataatggccttattgtgataagatgtaggaatcttacgtgtgcaaaaataggaaaaacctttgttatttcaaaattatttcgtacttttaccgcaaaatttaactaaatattgctattatggagagaatcttaggtattgatacaggaaccaatagcctcggatgggctattgtagataaggatgagaatcaatatcacctagttgctaaaggtacaaatatcttttcagaaggtgttaaaatagaaaaaggaatagagtcgtcaaaagctgcagagcgaacagagcatcgttctgttaggaaacactattggcgaagaaagattcgaaagataagattactgactatattgtctgataatgacttgtgtcctaggcttaaacatgagcaacttcgtcagtggcgattaaagaaagtatatcctactgatgatacatttatggagtggcagcgaacagaagataaggctcaggttaatccatataagtttagatatatctgcttaactcagaaacttgatttgagtgatattactcagcgttttattctaggtcgtgctttataccatttaaaccaacgcagaggtttcttgagtaatcgcaaggaggctacgaaagagtctgaaggaactgtaaaagagggtataagtagtctttctaaggatatgaaagattctggctgtgagtatcttggtgaatatttttatcagctttatcaacaaggcaaaaagataaggaatcactatacagctcgtaaagaacattatttgaaagagtttaaggctatttgctctaagcaagagcttgatgacgcgcttattgaaaagttagagaaagcaatatttgaccagcgtcctctcaaatcgcaaaaggggcaggttggaacttgtacattcgaaaaaggtaaatctcgttgtccatcatctcatccactatacgaggattttagaatgtatagttttatcaataatatcaaagtgcaggtagatacgctttacgataagggtgaacgaagtcttacagatgaggaaaaacaacttattattcccttgtttaaacgtaaatcaaaacgtacattcccattcgaagatattgccaaaaagattgctggcaagaataactattgctatattaagagtaatgaagagaaagcgtataagttcaactaccaaatggatactcaggtttctggtagtcctgtaaatgcgcagttagaggaaatatttggtgaagattggcttagtagtgtttgtgaggtttacacgcttgcaaataataagagtcgattccaaattatgaacgatgtatggcatgttttatttttctatgacgatgaggataaactgaaagagtttgccaaggaccgtttacagttggatgatgaattagctgagaagtttagcaaaatatctattcccaacgattatgcagctttgagtctaaaagcaatacgcaaaataatgccttacttgcgagattatggacttatttattcagaagcggtattcttggcgaatcttgttgatgtgttacctcaacatgtttgggggattaaagaaatgcgagaggctgctatcgaaaatgttattgatgtgatgcactcgtatgacaagaataacatcgatggaattacgctcgaagggtgcgtaaaaacattccttaaagaaaggtatcaagtaagcgatgataatctgaagaaactttatcacccatcaatgttggatccatatcccagacagcgtccaaatgatgaaggtgtgttccaacttggttctcctcgaataagtagtgttaagaatccgatggcaatgcattcgttgttccgacttagaaaggtggttaacctgatgctgaaaaaaggatatattactcctgatacgaaagtgcatatcgaattttcgcgcgacttaaacgatgccaacaaacgttgggctatacaaacgtggcagcgtgaaaatgaaaaggaaagagaacgttgtcgcaaagaaatcgagaaatacatcgcatctccgtctgatacagatattttgaaatatcagttatgggaggaacagaatcataagtgcttatatactggcgatgagattcgtattacagacttcttgggtgataatcccaaatacgatattgagcatacaatccctcgtagcgctgggggagatagtacaaaaatgaacctcacgctttgtagtagtaggtttaatagagacgagaagaaaacaaagctccctgcagaattagtaaatcatgacgaaatactggaacgtattagtaattggaaagaaaaatatgaagatatagacaagcagatacgtaagattagtactaaaggggcgacatcaaaagaagataaagatagtaaaatccgtcgacgtcattatctgatattgcaacgtgattattggcgaggcaagtaccagcgattcacgatgacagaagttcctgaaggcttctctcgtcgtcagggaactgatattagcgttatttctcgctatgcacgtatgtatcttaaatctgtttttaaacaggtatatattgtaaaaggtatcgctacgtccgattttagaaagatgtggggtatacaggacgagtatgcaaagaaagaacgagttaatcatgttcaccattgtattgatgcaattactatcgcctgtatcggcaaggctgagtatgataaattggcggattatcgtcatcaatatgatgattatttattccaaggaaaaacaaagccaacgtttgataagccttggccatcctttgttattgatatcaagcatattcaggacgaattgttgatagcacattatgctaaagataacttggaaaagtttactaaaaaaaatcttcgtggaaaagatggtagaataatcagagataagtttggaaacaaactacaaatgaagggtgatacttcaaggaattccttacataatgataaattctatggtgccatcaatcatgaaggagaaataaagtatgtttatagaacaaatattgaagctcttgatgcaaagtcgattggaaatattgtagatcctactgtaagaagtataattgagtcagctatagctattcacggtagtttgaaggcggctatcaataagggtatttggatgaacgaagaaaaacatataccaataaagaaagttcgggtatttcgtaatgatgttaagaagccaatcgagctaaaagatcaacgagatttgtcagataaagattataaacaacattattatgtgacaaatgatggtaattacatgatgcttatattctctaagctcaacaataaaggtcgcgaaatccggcaacatgttgtgattaatagtttggaggctactgaagtaataaaaagtcataagaggtcgcaagtaggaaaagttgtatgggaatcgtattattcaaaggaaggatttgatttgatttataaattaaaatctggtactatgatccttttgtatgagaataatagagatgaagtatgggatcttgatatacgcaacttgcaaaagcggttatacataattacaaagatgaaatatgatgggagaatatatatgatgcaccatcaagaagccagagagaaaaaggatttagaagaaaaatctggttcatttaagattaacgaagattatcgtcctttaatcgttaatagctataatcagtttaatgcactcgttcaggacttagatttcgaaattaacgatcttggtgagataaggaggttaatatgataaagcaaacattaatgttttcgaatcctgtttccgtattatgtggctgtttgtattctttgatttaccagttgtaactaagaaagaacgcaaaattgctgcgacctttcgcaagaacttgatgaaagacggtttcgttatgttgcaattctctgtatacatacgacattgtgcatcaaaagagagtcaagccgtacatatcaaaagggttaaatctattgttccagaaactggtatggtgagcatacttagtgtaacagataaacaatatggtgatatagttaacttctgggggaaggaaaagagtaaaaaagtaccgacagatcctttgcaattggaatttttttagtatttttgcaacgataatccacaaaaacaagccacttcttaggctaaaaaagcttcgtaaatgcctgaaaaacaggccaaaattcaacctaggttgtggtttgatgtaggaaaggaatgatatacaacgcgaacaatggaaagacctggcagacgcagttgtggtttgatgtaggaaaggaatgatatacaacgacgatgcgtcagagagtggtggcggtatcgttgtggtttgatgtaggaaaggaatgatatacaactcgcactgatattgcagggttttgtagtaggttgtggtttgatgtaggaaaggaatgatatacaacttgctcagtcaatggtggaacaccatcaatgttgtggtttgatgtaggaaaggaatgatatacaacaaaaaaatggagggagttgctaacctttagttgtggtttgatgtaggaaaggaatgatatacaactccaaccgctctgcttgtcgcggtgcccgtgttgtggtttgatgtaggaaaggaatgatatacaacatatcgctctgcatggtgtggaagaacccagttgtggtttgatgtaggaaaggaatgatatacaactatctgcacgacagcatcaccatcaaggcggttgtggtttgatgtaggaaaggaatgatatacaactgagcgtgacgagaatggtgatgtggtgagttgtggtttgatgtaggaaaggaatgatatacaactaccacccttctgggctttcttatagttatgttgtggtttgatgtaggaaaggaatgatatacaacgagggcgtgtggaagggtggccgacacgtggttgtggtttgatgtaggaaaggaatgatatacaacccgtccccttgcagctggcgcaccatccacgttgtggtttgatgtaggaaaggaatgatatacaactttttacttttttgctcttttgggattctggttgtggtttgatgtaggaaaggaatgatatacaactgcacgcacaaagtagaaagcattgcggcggttgtggtttgatgtaggaaaaggattaaaaatcgtgtcccccatctgaggttaatataacaaggaaaatggccttgacacagttcaacttacactaccgcaggttctagtttgtaataactaaatgatagcctctacctgttcaacaaattcttttgaaagaggttgcatttctaaaacttcgtcttccgttacctcggcgatgctgttataatcggctttgtggcggagttggaccatacgagagaagaaacgaccaaatttcttatcaacctcgcctgataagataaaatcctggccaagatgggtgagtgagccatcatgagatttggctgatactccacgagagataaacagtgcttgcaacatgtgatagcaagcatagtaatatctgttagcggcaatgtcccaacgcttttggattaccatttcgtcggcatcggccagcatcttatgtgacttgtctttttgcagttttatcagtagttctttatccatatattatataaggtttatgccatcacgtaccacgttgtcgtagaatggggtaatgctgctggcatcccattcagctttggtgtacataacggggttgatttgttcgttgagtttccaacctaactcaacaaaggggaaacttacatcatcgtaatcgctctgttccaagcggttctttggcagaacaatcagaatatcccaatcggatcctctttttgcttcgcctctcgctcttgaaccaaacagaataaccagactgcctttgggggcagactcacgtgcaactgctttgatttggtcgagtacctttctgtttttatctgtcatacaacaatgtttgtttgttctgctgcaaaaatagacaaaatactccaaacatccaaatgttttgcaaaatatttctattctttagttgtgccgcaggtgaaggggtgaatatgggtgggcatgatggttttcattacctcgaatacatggtcgcctgtgcaatggctggtgtagaaatgggtattggggtaattagtcgtcagtctttgtgccaaatctgtaatctcttcgtcagattgcagaccgtcgagcaagtggaaacctcctacaacggtgtgaacgggccaaggacatgccgacagaatgttttccagtccgttatgagcacagccggtaaacaacagtccgtcggagtaaagcgctaactcatggcggaagtcgtcgtgaatataatcgccgtagccatcttgtataaagagattctgattgcctttgggcattggatgcgtctgagggatatgagcaatcactcgcagaccgtcggcaatttcgcaggcgtgatctatcaagataagtctgtcgttgcttatctcaggccattctgtggtgatgctatgaagattgcctcgctttgaaaagaatttgccgctcatagcatcgggagagacaatgattctggcctgctgattatgctctaacaggtaacgtaagcctcctgcatggtcgctatgtccatgagaaataaaaacatagtcaacatcgcttaggtttatacccatctgctcggcatttctcataaacacgtcgcttgctccggtatcaagcagaatcttgtgtcgctctgtttgtagaaggattgacaatccatgctctgtttcaagctctggattgttcgaacggttatctgaaattacagtccacgtcatgttagtcgttttcttccaaccacttggtgagtacctggcaatactcctggtgagcatcgataaagcaagtgtggcgcgagtggcggaacagatgccattggctgtgggggatatgctcgtagagtgaggctgctactacgggggtacagatgtcgcgtgtgccactacagataagtgtaggctgagaaatctggtctaacttatcggtgtattcgaagtccttcagactgccgagtggctgatactcgttggggccccaaccatagaggtaggcttcggcaccagcacgcttgggacgacggagacactcgggtgagtgctcatcaacactaataacaaactgctcaaagtaatgattgtttgcctgcagataggcttcatcatcccatttgcctgtagcttcggcatggcggatggcttcctgatcttcgtccgacaggtatttgataagacggtgctgctcgctggcccataaactgctggaggcatggcctgatgacagaatgagcgacttgatgccttggggctgatggtcgatgacataggcgatggcctgcatagctccccacgactggccaagtatatgcacggcatcgagctgaagatactcgcggatggcgataagttcgtcaatccacgtcttctgtgtccaaagttctgggtgtccgtcgagataagaattgccgcaacctatctggtcgtacgagataacctgtcgtcctgtttcggcgatgcagtcgagcacctcgaaatagttgtgcgtactaccaggaccgccatgcagcaacaatagcggtgttttctccgatgcctcgcctactatgcggtagtaggtttggtagcccataaacggcatgtagccttcggtaatcatattttttattcttcgtcgttggatgtgcgaaggatgatagaggtggcaccaagggtgaagagggtgccatcgctgataacgcgacgctcttttggggtgagctctacgttatcgataaaggtgccagtgttgctgttgttgtctttcagcgtataacgcaagccaccttttttatcacgactaacggtgatggtgcaatgattgagatcgacgctgggatctactgtctcgaaagcggtattggcgggattgcctttctgataacgaccaatgatgttgtcgcccatacgaagagggataacctgcttgtaatggaatacgttttcgataacaacgattgatccgcaaccctgttcgttggcctgctcgtcggggttttcatctttctgacgctcacgaagtttgctcacgccgatacggataccaaactccttgccgcagtcggggcatttgaaaaccaacgactgaccagcctcgtacttggtctcatcgaaggtgatgtactggtcgcacttagggcagcgtactctcttcattgattattttttctcgttatatttgtaaacccacgattcggccaaatccttttctttggctatcttctgtaactgggtataagcatcggcttgattctcgtagtgaccgtaaacgatacgggtaatgttgttgtgcacataaatctcggcacctttgtaaccacgctctgccaagttgttgatgaaaatctcagcattctgcttgttaacatggctggccaacacaatgcagtaaccctcgcgagtactgtcgggcttgatggcaacgggtttggtagcttcggctggcttagcgggcttgatggtatcgagtatagcctcggcagttttaactgcggcaggcttctgtgcatccttacgcttaaaatcgatggcgctggtgttagtgtccttcgaggtcatcatgccaaacaaaatctgattgttcagactgttgatggtgctcttcatcagctcggtcttgccagtaggcattgctacaaagaacacagccaacaggatggcggctacggcaacggcattgcgaatccacgagaacttgatgcgaaccacatcggtatcgtcgtcgttgatgtcaaccaggttctgctgcagaacgctgttaacctccgactctggcttgggctctggcttcatctcaaccacctttgcttcaggagtctcttcgacactttccgagctgactgtcttaatcagtttcatctcgaacgagttcagtccatacaggcttggggtaagaatacctgcctcgcaaggggtgaacacgtagttgccatcctcgttaagctctattatacctatattattaagctcgtagcgaccttcgttctgcaggatttgcgtcagttcgttcacttcgtcctcaatacgctgaagggcctctgggtagctgatgtcgtaagcctcgatgtacgactgggcaagaagtgaatcgttaatcttaagttgtgggttaaaacctaatgtacggagtgggggaaggaaggcctgttcgtcttcctcgtatcttgcttcaacatggtgcgccatgaatccgcccaaaccgggcacaatcacgcagtcgttgtcgagcagcagtatctcaatatgtctttctaattcaatcacgggtgcaaaattactgtattttttcgacataaacaaataaaagaaacttaaaatgcttgtgatattaaaaatttagtgtacctttgcacaaaatttagttgttaacagtatgaatattgctattgtaggaaccggatatgtaggtttggtatcgggaacatgctttgccgatacaggagcaaatgttacgtgtgtagacgttgatgaaaataagatagaacgcctgaaaaacggtgaaatccccatctacgaaccaggactcgacgagttggtaaagaagaatgtggccgctggtcgcttgaagttcactaccgacttggcttctgtactcgatgatgtggagattgttttctcagctgtaggtacacctcccgatgaggatggctcggccgacttgaaatacgtgctgcaggtggctaagaccatcggtcagaacctgaagaagtacgtggttgttgtaaccaagagtactgtaccggtaggtactgccaaaaaggtgcgtaaggctatcgaggacgagttggctaagcgtggcgtggatgtcgaattcgacgtggcttcgaacccggagttcctgaaagagggtaacgccatcaaggactttatgagtcccgaccgtgtggtagtaggtgttgagagcgagaaggccaagaaaacgctgaccaagctttacaagcctttcctgattaataatttccgtgtgattttcatggatatcccatcggccgagatgactaaatatgctgccaactcgatgctggctacccgtatctcgttcatgaatgatattgccaacctttgcgagcgtgttggtgccgatgttaacatggtgcgcgctggtatcggtagcgatacgcgtatcggtagaaagttcctgtatgcaggttgcggttatggtggctcttgcttccccaaggatgtaaaggcgctgattaagactgccgatcagaatggctactcgatggaggttctgaaggccgttgagcgtgtgaacgaaaagcagaagagcgtgctgtttgagaagctggttaaggcatttggcagcgttgaggctctgaaaggtaataccatcgccatgtggggactctcgttcaagcctgagactgatgatatgcgcgaatcaacagccctcgtgatgattgccaaattgcttgaggctggttgtaacgtacgtgtttacgaccccattgctatggatgagtgtaagcgcagaatcggcgaaacggtaacctattgtcgcgacatgtatgatgtggtgctggatgccgatgccctgttgctgctcaccgagtggaaggagttccgtctgccaggatggggtgtgattaaaaaggctatgaagcgtccgctggttattgatggtagaaacatcttcgatagcgaggagctcgacgagaatggctttgagtatcattgcataggtaagtaaatgaagaagattttaacgatatcaatgctgatggttgttctggtggcttgtaaccagaacaactcatcaacgttgcccgacgataaggcggcaaaggagatgcttcagggagtttgggtagatgaggagagtggtgatgtgtcgttccgtgtaagcggcgatacgctctactttgccgatgctaccagtatgcctacctacttccgcatctacaaggactcgctttatctggcatcgggcacatcgtatagtatcgttaaacataccgaacatctcttctggtttaataatcagaatggtgatttgttgaaactgcaaaagagcgacgacgctgatgatgctgatatagagactgctgctccgagtgtgcttacctatacccatcaggttaagatcgactcggtggctgcctataacggcaatcgctaccattggtatatcgctattaatcctaccaagtataaagtcacaaagcgtacttttaacgaggatggattggaagtagagaatgtgtactacgataacatcatgcacattagtgttttccaaggtgcgcgacagatctattcgagtgatttccataagcagcagtaccaaggtctggtgcctgccgaattcttaaacgatgccattctggccaatatggcctttagtcatattgatgcctctggcttacattttaacgccacactatgtatccctgatggcgctacctgttatatggtagaatcaaccatcagttatacgggtgtgttatcgatgcagttagtagagtattaatctttctcggctaaccacgcatcgagcagcatacgtgctatagataatttttcggggatagtaggcaggttgtctttacggaaccagccacctttagctatctcactggcctgcaggtggatgtcgcctgatacatagtcggcattaaagcctaccatcagtccgcaagggtagggccaaggttgcgaaccaaagtagcgtatgttggtgatctttacgcctgtttcctcgaatgcctcacgggctaccgcttcttcgagtgtttcgcctgtctcaacaaatcctgctaccaatccgtagaaatcggtacggaagttcttggcgcgaaccagcagaacctcgtcgcctttgtgtatcagtacgatgactgctgtagctaattgtggccatatctctttgccgcactcagtacatttcttcgagatgtcggtatccattcgcatgggggcaccacacacgccacaatacttggtgttggcatcccaatacagcagttcctgacatttgcctgctttctggtacagggctttatcaagtttgtaaaagctctgtcgcaggccgcacatctcgtagcgtgggtcgtcgcaaaccggactgtctatcttatatgtttttacctcaacgccatccagcggggtaacggtcattacgttggtccaaggttttacctcggtgggtggttcttcctgaaagggaatggtatatccgccatctgcggttttttctaacaataagtcttctttacagaatacgaaataatgttgtttcatttttcaaacagttgtttacggtctctctcgagggctggttttacccatgcctcgggcacaaacttccagttgttattcttctgtgggtcgatagtacccaaacgtttgatctcttctgtcagatagtggcgctgatccagttcggtgtggaagagcacacgactctcgagcgaatcctgtgggatacctgcgccacgagtcagcaactcgccaccgccattggcgcgatagctgttcattactaccttataccacttcttctcgtcgaatggctcaccgttcgacatgcgcagaattcttaccttctgtccgtcgggcttggtcagatcaacctcgtagtcgataccgcaagccgagtcgaaattaaaggtgtagtattggaatcctgtacgctgctggtcttcctttgaatcatcgtttaaacgcaatgcgtggtcgttgggcgatgtcatagtgttacaccacatatcgtacgagaactccaggtgttttctgatttcctcgccagtcatcttgagtacaaacagcaggttctcaaagcgatacagcttaaacatatcggcctgtgtaacctcgccggcatcgatggtggtatcgaaagccaagggggcgttgaacgatatgtcggctttcgagatgctcatctgcagattgtgaatcaaatctgtaaaagccgagttgccaaagaaactctcgcgggtgtagataggattcttaaagtatccaatcttctgactcacgtattccttaaccttatcgatggtaggctggaagtaggtaatcatctgcttgtcgatcttctcgtcgcgcacatttacaatgttaccgataatgcttttcttgctaagcttgccatccttgtatgtcagcgtaatctctgcttcagccacgttgtttacatagcacgagggatctacacaaagcaccttttcgccagctttgttggtaatcagcatgttgtgtacctggtggtcgtgaccaaagaagataatgtcgaaaccaggaacctcgcgggctactgattctgttgcatcttcctcgtattcagccgttttaataccaccgttcagaccagagtggaacaaaccgaaaatcaaatcgggtttctcgttctcctttacatacttaatccatttcttggcgcatgcggtcatctcctcgaactccagacctttccagatggatttgttcagccagtttggaatggcgggggtgatcatgccgataactacaatcttaacaccatctttgtaatgtacagagtagggcttcagtcctgtatagatatgctcaggacgggcctctgcgttcttgtattcctctttaacgatgttggcgcccagcaatggacagcgaacctcgcgaatccacttgtcgtaaaccttgtggccaggctcgatgtcgtgattacctacggtttcggcatcgtatttcatatagttgataaccga

SEQ ID NO: 4189 - DNA, 23615 bp, synthetic construct
  source 1..23615: mol_type = other DNA
  misc_feature 1..23615: note = Synthetic
agatagtcatagcactactttttataacactaatcatttgtagttgttcttcagagttcaacaaatctgatttgactaatagaaaatggcagtctaatgatggaacagttatctgtttagatgccaatgactcatgtaaaatagagtatgcttcttcaattgtgtattatggtaaatggttctatgataaaaataaacaaaggattagattcgaaatcgacagagaattagatgtcggaggaggttttgtgtttcatcttgagttaatgagcaaatatgatatgacttccacagagatagatgaattatcacttggaaagtttataggtgatccagatgatcataattttgaaatttttacgcaggttgctaaataatcatgagagtaaaactgttatattgaaaatattgtatgaatacttaaattgtgatgatgaatattattaagtaaaaaacgagagacgcaaaaacttgcgtctctcgttgtatttaagccttaaatatcaggtctgattgatttacttgtagcggtcgcggatgttgtagatggccttgtagatattgcggtctacatcggtgagggcgatgtggcgccgagccatgacgcgttcggcgatggtgtagaaagtctcgagtggcacatccttgaaaccggcctgtgcgctgccctcctggaacgaggcgacaaagttgcgcgggaaccctgcgccgtggatgttgacacccacgcctaggactgtggcggtgttgatcatgccgttgacgccgattttgctgtggtcgcccatgaacaggccgcagaactgtagtccggtgcgctcaaagcgcttgctggcatagttccacaatttgatttcgccgtaatcgttcttgaggttgctggccgtggtgcctccgccgatgttgcaccactcgccgatgacggcatcgcccaggaagccgtcatgggccttgttgctgtagccgatgaagatggtgttctcgacttcgccgccgattttgacatgcggacccagggtggtggctccgtagaccttggcaccgatgcgcaccttggcatcgtggcaggctgcaaatccgccacggatgcaggctccctccatcacctcaacattctggccgatatagatggggccttcgttggtgttgagcatggctccctcgacataggctccctcctcgatgaagatgcgcgacgggtcgccgatgacggtgttggtcgctgacagcggctgcgattcacggcccgcggtcaggcggtcaaagtcctgtaacagcacgacgcggttgaactcgaagatgtcatacaggtgcttgacgacgagaggcaagttcttggggaacagcacgcgcgagtagtgatgagcgtcatagtcgtgtgccgagccgttgaaggctatcaactcctcaccgaccatcagagcctccccttcctgcagcgagagtacctgctcggccaactcgggagtggggatgacatgtccggcgaccatcaggttggtcgagcgacgcacatgcagcgggaacttcttcttcaggtaaggaacggtcagataactgtaattggcttcgccgagcatggcctgccatttctcgctgatggtgtcgataccgatgcgcagcagggcagtggggcgcgtgtaggtgaacggcatcaggtgcttgcgcacctcgttgtcgtcaaacaggatgatattgcgtgcggtctttttcattgtcttttgatggtttgtcggcggcaaaagtactttatttttacggaataatgttgtttcaatgcgctaaaaaggttaattttgcgcttgattaatcattacgcataggaaaatgaactttatcgaacaagacatcaagggcgtttgggtcattgagccgcagcgattcggcgacaggcggggatacttcagcgaggtgttcaagctggccgactttgaggcccatgtgggacatgtggacttcatccaggacaacgagtcgttctctcgcaagggtgtgctgcgcggcttgcatttccagcgtggcgagtggagccaggccaaactggtgcgtgtctcgcagggttcggtctttgatgtcgctgtcgacttgaggcgtggcagccccacttggggtaagcatgtggccatcgtcctcgatgccgactcgggccggcaactgtttatcccccgtggttttgcacacggttttgctgtgctgagtgatgtcgcacagttccagtacaaggtggacaatgtctacgccccgcagagcgaggcaacactgcgatgggatgagccggcactgggcatcgactggtgcctctcccgcgatgaaatgatcttgagcgagaaggatacagatggcctgtcgttggacgagatgacacctgatttcctgggattctaaatcatcagggcataaaataaacgagggtggaagtgttaagcactgccgccctcgctgttagtcagtcgtcagattaattcttgaataccagttgcccgtcttgggcatcgatagtgatgggacggtcgcggttgaccttcatggcgatgatgtccttgctcagcgggttgagcaccatgccctggatggctcgcttgacgggacgggcaccgaactcggggtcgtagccggcttgggccagcaggctgatggcggcatcggtagcctcgagggtgatgccgttcttgtccagcatcttcttgacgccattcagctgcatggtgacaatctggcgtatctgctcctcgtcgagcggggtgaacatgatgacctcgtcgatacggttgaggaactcgggacggatggtcttcttgagcatgtccatcacatcgtcgcgggtgttgccgatgacctcgttgcggttctcgggagtcaggtgctcgaagcgctcgcggatgaggctcgaccccaagttgctcgtcatgatgatgatagtgttcttgaagttgacggtgcgtcccttgttatcggtcagacggccgtcatcgagaacctgaagcagcacattgaacacatcgggattggctttctcgatttcgtcgaacagcactaccgagtagggcttgcgcctgacggcctcggtcaattgtccaccctcgtcatagcccacatagccgggaggcgaaccgatgagcctggtcaccgagaacttctcctggtactcgctcatgtcgatgcgcgtcatcatgttctcgtcgttgaacatgtagtcggcgagcgccttggcgagttcggtcttgcccacgcccgtggtgcccaggaagatgaacgagccgatggggcgccgtgggtcattcaggccggcacggctgcggcgcacggcgtcgctgatggccttgatggcatcgtcttggcccacaacgcgcttgtgcagttcctcctcgaggtgcagcagcttctctttctcgctctgcagcatcttggtcacggggatgccggtccagcgcgatacgatttcggcgatgtcgtcgctgtcgacctcctccttgatgagggccttgtcgccctgcatctcgcgcaggcgttcctgtatctgggcgttttcgtcctgcttctgcttgatgagcgagtagcggatctcggctacgcggccgtagtcgccgttgcgctcggcacgctcggcctcaaagttgagttgctcgatgtcgattttgttctgctgaatcttgttgatcaactctttctcggttttccacttggcgttgtagtcgctctcgcggtccttgaactcggcgatttgcttgtccaggtcagcgatgcgggcttcgtcgccgtcgcgcttgatggcggcgcgctcaatctccagttgggaaatcttgcgcgaaatctcgtccaggccctgcggcacgctgtccatctcgatgcgcagtttggcggctgcctcatctatcaggtcgatggctttgtcgggcaggaagcggtcgctgatgtagcgctggctcaactgcacggcggcgatgatggcgtcatccttgatgcgcaccttgtgatggttctcgtaacgctctttcaggccgcgcaggatggcgatgctgctctcctcgtcgggctcgtcgaccatgaccacctggaaacggcgttccagcgctttgtccttctcgaagtacttctggtactcgtcgagtgtcgtggcaccgatgctgcgcaggtcaccacgcgccagcgcgggcttcaggatgttggcggcatccatcgcgccgctgttcttgccggcacccacaagggtgtggatctcgtcgatgaacaggatgatttcgccctgtgcctgggtgatctcgttgatgaccgacttgagtcgctcctcaaactctccctggtactttgcgccggcaatcagtgcgcccatgtcgagcgaataaacctgcttcatcttcaggttctcgggcacatcgccacgcacgatgcgctgtgccagcccctcgacaatggcggtcttgccggtacccggctcaccgatgaggatggggttgttcttggtgcggcggctcagaatctgcagcacgcggcgaatctcatcgtcgcggccgataacggggtcgagtttgccctgacgggcgcgctcgttcaggttcacagcatacttgctcagggcgttgtactgctcctcggcactctgcgaggtggcattcttgcccttgcgcaactcattgatggcggcctggaggccgtcgtgggtcatgccggcatccttgaggatggtcgaggcggtagacttgacttcaaacagggcgagcaggattgcctcgacggtcacatactggtccttgttcttgctggcgatgtcgtttgccttctccagcgttttgctggcatcgttgctcaagtatggctcgccgccgctcacgcgaggcaggcgttgcagtgcagcttcgagtgacctttccacattggccggattgatgtccagcttctggaaaatgaagcgcacaacggattccccctcggtcatgacggccttgagcaggtgctcaggctctacggcctggttgccacccgtccgggtcaactggacggctttctggacaacctcttgtgctttgattgtgaaattgttaaagttcatatgattatttctcctttcttgtcatttctagtggtttaaaacacctttataatgtccttcaacactcatgccaatgagtaaaaactgccattttgtcagttttgtcatattaacaatcaacggcccatcctcgtcttgaggaatggaccgttgttagcaggaatggaccgttgtcagcagggatgggccattgttggcctcttgcggactgtccgcgttatttgttggccagcacagtgatgaatgtgatgatagacatcgcagtacccatcaggctgataccaaatgcaagctggggaggcgatgaccatgacaagcgggccttggattcgttgggctggacatacaggatgtcattctgctgcaactcaaactcaggcttcgcgatgaagtttgcgtcgttaatgttgaagcgcgttgtcgtgcgttggccgttggggtgggtgcggacaagcaagatgttgtcgcggcggccctgcagggtgaggtcatggcacatggcgatggcctcgatgaggttcaggcgtccgttgctggcttggattacaccaggagcgttgaaatcaccgatgcagtagacgcggaagttctggatgcggcattccacattgggcatctcggtgagatagcgcgggtaaatcagtgaagtgacatactgttcaacctgggtcttggtcatacccaagatatgcagcttgccaagcacggggaagtcgatgttgccatccttgtcaaccagatagaacattgttgtagcgtcacccacgctgtaggtaaggctaccgccgctcacatcggagatatacctgatcttgttgaagggcttcacggcgtcggcgttagagcccgacacggtgatgtgcaacaggtcaccaatcttcatggagaagtcaccggcctgagcagaagcggcaattaattcaggtggcatctggtcgatgttggtcatgtagggcacctctttggggctcttacaggcgacaaacgatagcgcaatggccatcaagagtagaaatttaccgattttcatatgcattattttttaatgttgttgttcttctaacctgcaaagatagtaaaaattgcaataatcgcgttttttttcggtaaaaacacgatgccgatgcgcgttttttcgctttctttgcatcatgaacgacattcaacagcccatcgagcgccatccttggccgccctatgtccccgacggggcccgctatctcttcctcggcacatttccccccaagcccgagcggtggtccatgccttttttctatcctaaccgcatcaatgacttctggcgcgtgatgggtgttatcttcatgaatgaccgtgatgccttgtgggacagccgcttgcgctgttttgatctcgatgccatcaaggccctgctcgaccgtgagcacatcgccctgtgggacacggcgatggccgtgcgccgcctcaaggacaatgccagcgacaagttcctcgagattgtcgagcccatcgacctcgcggcgttgctcgatctccatcccacgattacccatgtcatcaccaccggcgagaaggccaccggcgtcatcgctgcccaggccggtatcgaagtgccgcccatcggccgtcccgtggactgcaccgtcggcacccattgcttcaccctgtggcgcatgccgtctacctcgcgggcttatccgctgccgttggagcgcaaggccgaggcctaccggctcgtcttcgctctgccgtcgtgaggcagggggcgtgctgctcttgccctgggtggatacccacccgcaactgcttcaggaactagacttgttaataacttttagcgcccaaaattttgcccgtccagcctaaagcagtacctttgctatgatgtattcaatttcagaacatatagaattcctgatgacgcgccacgactgtgtggctattcccggttggggcgcgttcatagccaattatagtccagcccgttacgacgaggacagcatgacgatgcatcggccttgccgcaccgtcggcttcaacgccagcgtcacccacaacgacggcttgctggctcagtcgctcatgcggcgcgaggggttaacctatgatgaggctatgcgtttcattgccgacagcgtgacttctttccgtcagcaacttgcgaaggactgcgaggtgtcgatgggcaggctgggttacttccgccgtgtccaggaacgcataaccgagtttgtgccgttcttccgtgccgacggttgcgaccagttttacggtctcgatgacctgtcgatcaagacggttgccgctctcgagcagcagcgtgccgtgcaggaggttgaagagccccgtgccgctatcgtgcctcagggccgcaacctgttctcgcgcaaggctgcccagattgccgcttcggtggctgtgctcatcggcatgggcgtgatgctcacgacccccatcgttgtcgaccgcagcaaccagcagttggccagcatggcacccacggtgactgctccgcgctcggcgcagctcggtgtcaccgtcgagcccggcgtgtcggcacagcccatcacccctgtcgagcagtcgcagtcgcccaccattgccagtgtgggcaacgacaagggccattactacatggtcatcgccacactgcgcaacaatcatgagctggacgctttcaagaacaagtatcctcagttggtgccctcgatgaagttgcttgactacaagggcatgatgtgtgtctatgtcgctcgcagcgacgactataacaccttaatggacctgcgtgacgagctccctaaggcgttgcgcgatgtctggatctataactgatgacggcagcatcaggcaggtgtaacgcctgccgccgctcaacatcagcagccacacatcatccttttcgatgatattgagtacattgtcccacggtcggtcaggtccacctgtttctccatgatggaccaccgggcctcgggcgagaagccgtagtagaagtagagcagggccagcagcatgggcagcaccatcagcaccaccatcatcgccacgatgacaaagcgcacatccacccagatggccagcacggcgcacaccgccacaggcagcaccagccacagccagttctcggccaggaacatggcccccaggtgccgcatataggcccctgccgtcactttacctccatcaaacctcatcacttcactttatctcaagcaacatgaacaacttggaacaacccaaacaacgaggattatatatgattaataatgttgttcaagttgttcattatagttcaagttgtttgaaaaacactgttgtttgaaccgttgctttattttttctttttcttggcgtacatcgcgcggcggcgggcgatttcctcgtagccgcgtttgtaggcctggcggttcttcagcgtcagcgtctggcaataacccgtgccctcgttgttatagagtttcgacaggttcaggtactgcttgccgttgccgcgcaccacaggaaagacctcctccttgcgcttgttcaccttgtcgcactgcaccgagtggttctcggccgttgtgcccgtcagttcgggtgccacaccgtcttcgcccacccacacggcatacacctcggcacaggggggatagcccagggcaatccacatcgtcgtcaggcgcggattctcgcccggcacgatgccctcaatcaccacgctggcgctcgagatgcggcgcgggatgaagtcctggtccacaatccatgtgtcgccgctgcgcgtgtagtccttgccgatgagcgagttgtagaatgtgcgcgacagttcctcggtgaacaccgccggcgtgatgtcctgcgcggcgatgtgcggtgccagcagcgatttctcgttcttctcgcgcacatagcccatgcccttgtccttcgcgccgctgtagctgtagttggtgcgcgttaggatgccctcgggggcgtcggcaaggtcaaatttcacatatctgtagttgcccgtctcaaagtaggcaccgttgccctgcgcgtcgatcacgccgaagttggcctccacgcccagcggcttgggccgcgtcttcagcaactgctcaaagtcgtccactgtcttgcagcgttccagcgcgtagcgcatcagttcgccctcgcggtccatgttcttcacgccgtcgttgccgttcaggttataggacgccgtgttcatgatggcaaatcccgcctcgttgaatcccatccacgccgccgtgtcccgcaggtcgcgagcgtcgaacagcgccacaaactccatcagtccgtcgtgccccttgatgcgttccacgcggttgttcaggtcgttggtgtcgcggttcttccacatcagcggacgcccgttggccgtcagtttgccgctcacgatggccgatgtgcacgcatcagccgctattatcacgcccagcacagccaccagggccatcaacaatcttctcttcatatcctttgaattttagttctgaaagatctatatcatttatattatctgcaaagataatgcaaatctttattaactggcatccgcttcccgcttttttgtcggccaatgaaacgaattcatcacttttcaggtatttcacgcccgcccaaccaaaacggacaaaaaacaactgaatcgtctgattcttctgattcttctgaaagcattgatataccaaccccgctgctgccacaagaactgccaacggttttaacggattaaactgacaggctgccgcactcctgataaaaagttacaacacctcaacaacaaaccatagtttttccttacattggataaataaaaaactcccaccgaagcgggagtataggttttacccttcggccatgatggccttattgtgataagatgtaggaatcttatgggcacaaaattataactattattttgcagaatcaagtaattggagtaaatttaccgaaatttaacagataaattatcactttatggaaaaaatattaggaattgacaccggaacaaatagccttggatgggcgattatagaaaagaatgacaacggtgaaattaaattattgcacaaaggaacaaacatttttaccgaaggagtaaaaatagaaaaaggtattgaatcttctaaggcagccgaacgcaccgaacacagggctttgcgtaaacattattggcggcgcaaagtgaggaaaatacgcctgctcacggtattggaacagaatcgtttgtgccctcccgttgacactgagcaattacgagattggcgtctgaatggtatttaccctcatgatgaagaattcctggcatggcagcgcactgaggataagaataatgtgaatccataccagttcaggcatatctgtttgacacaacaattggatttgtctaacttgacacaacgatatattttgggccgagcactgtatcatcttaatcagcgtcgaggtttcctaagcaacaggaaagagacgacaaaggcatcagacggtgccgtcagtgaaggtatcagcagcctgactgccgagatgcaggatgcggggtgtgagtatttgggcgaatacttctatcgtctctatcagtctggcgagaagataaggagccgttataccgcacgcaacgagcattacctgaaagaattcaatgctatatgcgagaagcagcaactgtctgaggatttggtcgacaatcttaggagagccatctttttccagcgcccgctgaaatcgcagaagggcactgtcggcacctgcgctttcgagaaaggtaaagcgcgttgtccggcatcacatcccttgtttgaggaattccgtctttacagtttcttgaacaacatcaaaatcaagacgcccgccgatgccgatctgcgctatttgtcgggtgatgaaaaggctatcatcttgcctcttttcaagaagtaccggaaaagcaaacactcctttaattttgaggatatcgccaagaaactcgctggcaagggaaaatatatgtacttccgtgacaaagacgacaagccctaccagttcaactatcagatggatactcctgttcccatcagcacggtaactgctcaactcgtggaaatcttcggtgagaattggttggaaggggcatgtgaggtttatacacttgccgaggggaaaactccgttccaaatcatgaatgatgtctggcacgccctgttcttctttgacgatgaggagaaattgaagatgtttgccaaggaccggctgcaattaagcgatgaggatgccgagaaatttgcccacatctcaatgcctaatgactatgcttcacttagcctcaaggccatccgcaaaattctgccattcctcaaggactatggcctgatttattcccaggccgtctttttggccaatctggacgaggtgctgccctcttttttcatgaggcatgacgacgaacacgagaaggccatcaatgctgctgttgaggctttattggagtatggcaataaaaatgatgagcgccccttggaggtctatttcaaggattatttgaaaagcgaatattcaggatatgattttgatgaaaagagcctgcagaaactctaccacccgtcaatgatggagcagtacccacatgtggcccctggtgatgacggcatctaccagttgggctcgccccgcatcagcagtgtgaggaacccgatggctatgcgttctatgttccgattgcgcaaggtggttaacttattgttggctcagggttatattgacaaggataccaaggtccacatcgagttctcaagggatctcaacgatgctaaccgccgatgggcgattcagcagtggcaacgccaacaggagaaaaacagagaggaaatcaggaagaggattcaggaagatgcccacatcgagaatcccaccgataacgacatcctcaagtatcagttatgggaagagcagaatcacatctgtatctatacaggcaatcaaatcgggatttctgatttcttgtgctctaatcccaagtatgatatcgagcacactgttccccagagtgcaggtggtgatagcaccaagatgaacttgacgctgtgcgagagcgcttataaccgcaagaccaaaaagactaaactgcccacagcgttgccctactacgaagccatgctgcagcgcattgagcactggaatgagcgtgccgaagaactgagcaagcgcattcgcaaactcaagggcagtagggctgccaccaaagaggagaaggacagtatcattcgccgccgccatctgttgtcgttggagcgcgattattggaggggcaagtacaggcgattcacgatgaccgaggtgcccgagggcttctcccgccgtcaggggacggatatcagtgtcatctctcgctatgcccgcatgtacctgaaatctgtcttcgacaaggtctatatcgtcaagggcatcgctacatcagacttccgcaagatgtggggcatacaggacgaatataccgccaaggagcgtgtcaatcatgttcatcactgcattgatgcaatcaccatcgcctgcattgacaaggtgcaatacgacaaattggcccggttctatcaggacgaggacaactatcatctgggcaagggcaataaaccccaatttgagaagccgtggcccacatttgttgccgatatcaagcacatccaggatgaactccttgttgcacattacgccaaggacaacatgcccaagcataccaagaagaaaggtggcgacaactacatccagggtgataccgcccgtggttcgcttcacaacgacacctattatggtgctatagagcgtgacggtgacatccgctatgttgtccgcaagagcctcgacatgctcgaggccaaggacatcgataagattgttgatgaagtagtaaagcagaaggtaaaagatgccattgccactcatggcagcctcaaagcggcggtcgaagcgacaatctggatgaatgagccgaagcaaatccccatcaagaaagtgaggatatttgccaactcagtgaccaggcctatcaacatccgtcagcatcgcgacaagtctcgacatgagtacaaacggcagttccatgtgcagaacgaccgcaactacatgatggcaatttatgttggctgtgatgagcgcggtagggagaaacggacatttgaactcatcagtaacatcatagcagccaatttctaccgaaggagtggacagaacgctgaagagaaaaggcaattggttcccgaggtcaataatgggtgtagtttgaaatatcaattgaaaatcggcacaatggttctcttgtatgagaacaaccctgatgaaatctggaattcaaatcttcaggaattgcaaaaacgactatataaagtgacaggtttgaattcttttatgtcaggtagtagatcttatgggcgcatttcgttggttcatcatcaagatgcaagacctggtacagaagtcaaacagataaatggcgcgtttagagcatctgaagttttccgcccaggtatcttgatgcttcacactcaatttaaggctcttgtagacggggtggactttgaattgaatgacttgggtgaaattaagaaaataataaatgattaaacagacattgatgttcacttcaccagttgctctgtccctaaagtatgggcaactggtggtgaagtccctcgaggatgataaaaccctcacgagaccagtcgaggatatcggcttcctcatcatcgacaatcccatggtttcgttgactattccattgctcaatgaactggctgccaacaatgtggctgtcatcatctgtgacaagaaacagatgcctcaggccatgttgcaaccacttgtgggtaacacgacgctccaagagagccataagtttcaaattgaggctgcatcaccgatcaagaaacagatgtggaagcaacttgttgaggctaaaatcaagaatcaggcggcgctgcttgatcgactgggaaaagagggtcaaatgttgaaaccgttttatgcaaatgttaagtcgggcgataccgataatcgcgagggcgcagccgcccgagtctattggtcgcagttgtttgaaaatggcttcaagcggaatcgtgatggtgactcgcccaatcagttcctgaattacggctataccattcttagggctgctgtggccagggcattggtcgggtctggattgtatcccgcatttggcatctttcatcgaaacagatacaatgcttttcctcttgccgatgatgtgatggagccctatcgaccatttgtcgacgaggtggtttattccctatgccaggatgatgaaaccaacgacttggacaataatgtcaagagccgactattgcgagtcctgttcgctgatgtgaaaatcggaaagatgactcgcccgcttgaggttgcactgtcgctgacaactgcttctctggttaaagtgtttaagggagacgctaaaaaactcacactccccaggatgccatgagcgaaaaccgactaaatgcctatcgcattatgtggctttttgttttttttgatttacctgtcgtaaccaagaaacaaaggaaagctgctgcgcttttccgcaaaaacttgatgaaagatggtttcgttatgttccagtattcagtttatatcaggcactgcgggtcgcatgagagtatgaaggtgcacgctaaacgggtgaaacttttcgtccccgacgagggaaaggtaagtgtactgagcgtaaccgataagcaatatggagatatcgttaattactggggcaagaaagaaaaagataaaaaggtgataaccgagccactccagttagaaataatttggtaattttgtaaacaagtactgcatctatcgccacttcttaatcgataattatgtcgcaacttgctggaaataagctagatatttgaattaagttgtggtttgatgtaggaactagagaagatacaacgcgtgtgggcattgcagacgacaagcgaggttgtggtttgatgtaggaactagagaagatacaacgctttaattcttcaggtttaacaccggttagttgtggtttgatgtaggaactagagaagatacaactacctgtatgtcaagcaccgccagccggcagttgtggtttgatgtaggaactagagaagatacaacactgatggggcgtgcacctggtgctgacgggttgtggtttgatgtaggaactagagaagatacaacgaacttaccaagtccacttccagaagggtgttgtggtttgatgtaggaactagagaagatacaaccttgttgatgacggtgttctgctcagcaggttgtggtttgatgtaggaactagagaagatacaacagaagaagtaccaataccagatgcaacaagttgtggtttgatgtaggaactagagaagatacaaccttcagcttcacttgcagaagtctgcaagagttgtggtttgatgtaggaactagagaagatacaactcgctataggggatggacgaactagggcaagttgtggtttgatgtaggaactagagaagatacaaccataaaaaatcgagttttgcacaaaattagttgtggtttgatgtaggaactagagaagatacaaccgggttgccgtggacgatgtacaggttctggttgtggtttgatgtaggaactagagaagatacaacatgtcctccaccgcttgtagcacttaggagttgtggtttgatgtaggaactagagaagatacaacagcggatttgtgcgctttgctagcctcttcgttgtggtttgatgtaggaataatagtcaaaagaaccatctgactgatggcaactgtcgatggcaagggagggtggcagccaattcgattaattagtttaattcgcagacttttaatgcgggtgtgcggatgccatagtccttcttgtctttcttgtcttccttttatcaagtggcagtggcagggttggtgcatcatcgggatggttttgggagataaataagaggggcgtgggcccgctatgtcgcgttattcatttcgtcgcgttctttgataggtagtggtttgttgacgaaatggcaagtagtgcaaccgaaaaatcttttcagcatggacaaacactccccgtcccattatctttgctccatttattagctttattgaacaaaaccagaaaaacgccatgtacgaaaatcaatgtatctatttgcgccagcccgtttttgaagacccgcaacagaactgcatcttcacttgcgaaaccgatttgtccgaattcggagcgacaccattggtcaccaactgcggcatacccgtagtgcttaaccatgagattacacttgtcactggttgcagccattcgcgcactcaccactatgccaaaatgctcgcaacagccattctcaatggcgggcaatacccttttgctccaagtttcactactgagctcaaggggggaaaagtcatgtggattgactcagttaactccatccactctgttaccaacttgatgcagcaattcaaggagaactgcaaaatcaacagcgacaacttccaaatgatgtgcctcgactgtcttggggccttcaataacaacagtagcttaatcgtcgacctcatcatcggggcggtgcgtgattttaggcccaatttcatcgtcatcaacgacattgaccacctcatcccgtttgctggacatcgcgacaccaacgacttcgtcgcttttctgagggaaaccacatcactctacaatgttgctgtttgcgccatcgcacacaacctcatcggtaaagtcaagaataccacgggactgcttggaacggagctctttggtatagcaaccaacatcttccgggtcatcgaccatggtgcaacatctaccgtcacttcctacaaggcattggaacagaccccttacgagttcactttcacgctcaacgaccgaaacctgccgcaggaggtcgtcattgcgccccaacgcgtctctgcatcccaagactacatcgacacgctcactttgcaagacattttctctagcattatttctgacggggtttccatcaagcccgacgagctcatggcaagtgtcaccagtcacctcatccgtctggccaaatttaaccgcgctcgcaatctcatatccaacgcactcatccgaggcatcatctcccgtgatccagcaacgggagactactctgccaccccggttatgagagaaattcccgaccctcgcacatcttgctttttgacaggaagcgatatccacagccaagccctcctaaaccacttgcaaacaggatactacgaccgcatcctaacccctgacaagcacaagcctattgctgcttttaacactccccccgacccacacccccaagggaatgctcccatatcgagcgataccatcgcgcccccgcccccgcagccccctgtcccgtaatgcgggcgacagcccgtaaaaaaaagccgctcgtcccctcgtccccgtcccgtatcgcgcgcccctgtcccgtaatgcgggcgacagcccgtaaaaaaaagccgcccccgcagcccgctagcccccctgtcccgtaatgcgggcgacagcccgtaaaaatttaaatagtggaaattagtttcccttcatcaggtggaggcggttcgctagggttgcggtatcgttgactggggcgagattaggctgcgtcatgacataaaaaatgaaaaagtggcctttttcattttttatgtccatgacttgcactaattttgtggcgtgattcaatgagtttgggggtgccccgcagtatcaggggctgagaacatacccatcggatctgatccggacaatgccggcgtagagaacaactaatgaattaaaaaaatgaagaagactttgttgatggttgccgcaacgatggcaacccttgccgcagcggcacagcccgcggcaaccgacacggtgcccaccatcgcgctgagcgaggtggaggtactgggcacgcgtgccagtgagaacactcctgtagcgtataccaatgtgacgggcaagcagattgccgccgtgaaccatggcctggacatcccgttcctgctgacgatgacgccgagcgtgattaccacgagcgacgcgggtgcgggcgtgggctacacctcgatgcgcgtgcgcggcaccgatgctacccgcatcaacatcacggtgaacgacatcccgttgaatgactcggagagccatagcgttttctgggtgaacacgccggactttgcctcgtcggtgcgtgacattcaggtacagcgtggtgtgggcacctcgaccaacggctcgggcgcctttggtgcgagtgtcaacatgcgcacccagggcttctcgcgcgatgcttttgccgaggtgtcgggcagttacggctcgtttaacaccaacaaggagacgctgcgtgtgggcagtggcctgttgggggaccactggtcggttgaggcgcgcctgtcgcacatcggcagtgacggctaccgtgaccgcgcgagcagcgaactggtgagttactatgggcagttgggctacttcggcggcggcacctcgctgcgtttcatcacctttggcggcaaggaagacacctaccacgcctgggacggcatcagccgcgacgacctgaaggacaaccgcacctataaccccaacggcgaaatcaagcacgacggcaaggtgacgggcttctacaaggaccagaaagacatctaccgccagacgcactatcagctgatttggaaccagaccttcaaccccgagtggaaactcaatgtggcactgcactataccgacggctacggctactaccaggaatacaagaacgcgcgcacgctcaaggagtatggcctggagcctgtggtgacgcccgagggcacgagcaagaaggcgagcctggtgcgcaagaaatgcctggacagcggctttggcggcggtgtgttctcgttgcagtacagcggcgagcgcctggcagctacactgggtggcggcatcaaccgctacactaacgaccactacggccaggtcatctgggtcgagaactacaccagtccgctggcgcccgaccacgagtattaccgcaactatgcccgcaagaacgacttcaacatcatgaggggcgataacgacaagtgggactggaccgccagccccgagcacctgcaggtgctggacatcgacgagccgtttgacttcttcaaccccaaggcaggcgtgaactggcagatgaacgagcacaaccgcttctatgcctcgtttgccgtggcccagaaagagcccacccgcaacaactacaacgacggtccgctggtgaagcatcccacgagtgagaaactctatgactgggaggccggctacgaactgcgcagcggccgtttcagtgccggcgtcaacttctattatatgaaatacaaggaccagctggtgctcaacggcaagatcaacgagattggcgagctgatggccgagaatgtccccgacagttaccgcatgggcgtggaactgatggcgggctaccgcttcaccgactggctgcgctgggatgtgaacgccacgctgtcgcgcaaccgcatcaaggactatgtgggctatgtgagcgactatgacgccgacacatgggacgacatgtggacccagaccgagatccatgccggcgacaagaccatcgccttctcgcccagcgtgaccgtgggcagcctgattgccctggactacaagggcttcaccgccgcgctgcagtcgcagtatgtctcgcgccagtacctcgacaactttgagcgcaaggaggactcgctcgacccctacttcgtcaacaacctggacctggcttacaccttcaagttgcctcacctgcgcagcgtgaccgtgggcgccaccatctacaatctgcttgacgagaagtacgagaccaacggctactcgcagacctgcgccctgtatcccggcggcagcaaggatgcgcagtacaacctgtacagcgacccgcgcttctatcccatggctggcctcaacgccctgggccatgtgacactgaggttctaattactctagagaaactagatttactagatgaactagatttactagagaaactagaggaactagatcatctagatgattgcgacgatgacggacacgattgtgcaatatttcagtgacttcactctggtcaaggctatcgacatggcaggcctggtgctcggcctcatctacctgtggctcgagttcaaggccagcatctggctgtggctggtgagcgtcgtcatgcccatcgtgcacggctacctgtactgggcgcgcggcttgtatgccgacttcggcatggaggtctactatgtcctggccgcagtctatggctacgccatgtggcggtgggtgcgcagccgcaatgccggggcaggggagcaggcagccgagcgtcccatcacgcgcttcccgctgcggctagtgctgcccgtgacgctcatcgggatggcgctgtggggcgccatctactgggtgctgctcacctttaccgacagcagcgtgcccttgtgcgacagtttcaccacagcactgagcatggtggccctgtgggcgctcgccaagaaatatgccgagcagtggctgctgtggtttgtcgtggatctcgtgtgtgctgttctctatatctacaagcagattccgttcacggcctgcctctacgccttctacaccgtgatggccgtgctgggctaccgctactggctcaaaaagatgcgtcagcagcctgcaggggtgtaaatcgtaagaaaaacggccgaaaaatttggaaatcccaattttttacgcttattttgcgacataattattgacatttaaacccataatgattatgaagcagaaagcaagattacttttaacggtgttgttcgcaatggtggccgtctcggtatttgccggcggctggcttaaggtgaccggcaacagtgtgaggctgagaatggctcctggcggtgccgactcgggcctgaggatggacaaaggcgacaaactggagtggtacagctatgacgacggctggtactcggttcagtatggcgaaaacatttactacatctcgtcgaagtatgttgagcgcatctcacaggagcagacccagaaatatgtggttgttaccggtgacaaggtgatcatgagaaaggccccgggcggcaaggactccggtttgagggccaacgatggtgaccgcttcaaatatcttggcgaaaagggcgattggttcaaaatccagttcaagggcaactcctactgggtttccaagaaatatgccgtgatcaagcaatagtcacggcatcggcccgctgacaactaaaagggggaaggcagtcaaatcagactgctttccctctcttggtttatggattgtcgttgctctggatgccgcggacacgctggatgtaattgaacagtcgcctgtagaacgggtggcgcgtcatggtgggggcatcgcccaggatgaacagtttcatgcgggcgcgcgtgatggcgacattcatgcggcgcaggtcgcgcaggaagccgatctggcccgtgtcgttggcgcgtaccagcgagatgatgatgacatcgcgctcctggccctggaagccatcgacggtgttgaccgtgatcaagtgccggaagggcttgaagaaggcgcgttttctgatcagccgcttgatgtactgcacctgggcccggtagggcgagatgatgcccacatcgatgctgttgtcgaggacacactgcttgcccacacgctggaagtaaatctgcagcaggctcagggtgaggccagcctcgcccttgttgacacggccgaaggtttcgccgatgaactgttcacggaaattgtcctgctcgtcctcgcccaggttgatggcggaggtgtcgaaccacaggatgggggcatcgccctcatggatggcgcggtgggccacctcgggggccgacctcatcctgctatggtagaagtagtcgctgctgaactgcatgatctcgtcgttcatgcggtactgcacctcaagcagcgagacgcactcgggcttgttgttgacgatgcgctccatgagcgtggtgcccaggccgcccttcagggcctcgaggctcttgacggtgggcggcaactggcaatggtcgccggcgaatatcacgcggctggcacggcggatgggaatccagcaggccgcctcgagggcctgggccgcctcgtcgatgaacagggtgccgaacttgtgtccgtcgagcaacttgttacccgccccgacgagcgttgacgcgatgacgcgtgcctgcccgaagatgtcggcgttgatgcgcacttcgagttcgacagccacctccttgaggcgctcaatcttctggtgaaagcgctcgccactctcgcggcgccggcgcctcatctcgcgcatggtgcgcctcacctgccacaacttggggtagtcggggtggtcggcaaagcggtgctcataggtgaaactcagcatcttgtcgttgacacgggtgggattgcccaacctcagcaccgggatgccgcagtccacgagtttctcgctgatccagtcgacggcggtgttgctctgggcacacaccagcacctgggtctcgcgcttgagggtctcgttgatggcctcgaccagcgtcgtcgtcttgcccgtgcccggcgggccgtgcagtacccgcacatccttggcccgcagcacatcgttgacggcccgctcctggctcgtgttgagccaggggaaccgcatcggctcgaaggtgaaagtccctgccggctggtggctgtagaacaggtcgcgaaggtaggccagccgcgtgcccttggcattcatggcgcgctccagggcgtcgaacatgaagcggtaactcgtctcgtcgaagaacagttgcacgcccagcggcaacggcgagttctgcagttcgagcgtgtgtccctcggggatggccacgaccatgcggttgccgtcgacataggagatggtgcccgtgaagccgaagaagcggactcccgttgcctgcttcaggtcgccggcgggtgcctcggcgctgaagaagaccaccggcttgccgtactcgaagttgtggtcgatttcctcgtcgccctgccgcgttacctcgatgcagtactggttgaccgagttgtagtaggtgcggcccgcgtgcagcgttctcctcctggtattccacctggagcagatgccgttgctgttgcagcagtgctatggccgcagtgttgctcatccgttggtctgttgagtgattaaatgacctgtttttttttgactgttgcaaaggtactacaatttaagtgtagtttcatctatttctgctccaaatgggtgcccactgcccattttgtcacgatgcctctcgatgatcaagtgcagccaccggcgctcagtttgcttgagaatcaaaaaaagtcacccgtgaaggttgataatgtcagctgattgttgtacatttgccatatcgtgagaggggtttttgcccggtttcggtttgcagcagtggatgaggcgaaatccctgtcgtagaagcatccttaatcaacttgttgttggccagggtgttatatgatttagtcaaaagtgctgtgaaattaaagcata

SEQ ID NO: 4190 - DNA, 23612 bp, synthetic construct
  misc_feature 1..23612: note = Synthetic
  source 1..23612: mol_type = other DNA
agacgataaaaacagcatcccatcacacttttttactcaaatcccgacacgagaaggagtgaagaacatcgataatcaagattttctgtgtatatttgcctccacaaacaacaaaaaactgattgacatgaaaaagagactgttgattgccctggtggcaatagtaggaattatcctggccgccgacgcctgcacgtcggccatcgtcagtggcaagctgaccgcaaacggccgtcccttgatatggaagaaccgtgacaccaacgacctgaacaaccgcgtggagcgcatcaaggcccatgacggactgatggagttcgtcgccctgttcgacgcacgcgacctgcaggacacggccgcctggatgggattcaacgaggcaggattcgccatcatgaacacagcctcctacaacctgaacggcaacgacggcgtgaagaacatggaccgtgagggagaactcatgcgctatgccctggaacgctgcaagactgttgacgatttcgagaacctgctcaagacgaggcccaagccgttgggcgtagaagccaacttcggcgtcatcgacgctcaaggcaacggtgcctacttcgagaccggcaattttaaatatgtgaagtttgacctggctgatgcccccaatggcatcttgacacgcaccaactactcctacagcggcgtgaaggacaagggtatgggctatgttcgcgagaaaaacgagaaaacgttgctcgcaccccatatcgaggcccaggacatcaccccggctgtatttaccgaggagttgtcccgcaccttctataattcactcatcggccgagactatacccgcagcggcgacaattggatcgtggatcaggacttcatcccgcgtcgcatctccaccgctagcgtggtgattgagggtgtactgccaggcgaaaatccgctgttgacgacgatgtggatcgccttgggatatcccccttgtgccgaggtctatcccgtgtgggtaggcgaagacggagtggctcctgagctgacgggcaccaccgccgataaccactcggtgcagtgcgacaaggtcaacaagcgcaaggaggaagtcttccccgtggttcgcggcaacggcaagcagtacctgaatctgtccaaactctacaacaacgagggcaccggctactgccagacgctggccttgaaaaaccgccaagcctacaaacgcggctacgaggaaatcgcacgccgcagggccgtcttcaacaaaacaaagaagaaaaataaaagaatcctgatctaaggttaaaggatagctgtggaagatatccgtatcgatctgtgcagtgtcacatcgggtacctatatgcggcacctgtgcactttattccttgccgacaactggttgtggatggtgctgcccgtagcggtgtgcgccgcgttggcggtgtggattgatgtgcgatttgtcatcgtcgcgctgatggtgttgttggtcgtgctacccatgatacttgccctgctctatttctactatggcttttcccccgaggcccgctggtcgatcatggaaaagacggcgtcactctccgacgagggcctcaacctgtcattcaccgacgagcgcatgaaaaaacacgccatccggtgggatgacgtgcgctatatcattgaaaaggatgatgtgatcatgctgatgctcaaagggcatcgctacacttgcctgatgttaccgacttcagttgtaaatccagacgtcgcgcagcgcctcaggcagttcgtcacgcaaggacattaactggctataatcgtcgctgcgggcgacgtacacacacatcattcccttgtagtccagcatcttcatgtgaggcacgagtgctgcatacttctgcttgaaagcatcaagttcctgctgattgcgcaaggtggcaatcaccatataatatttaccggcggcattacctaccgatgcgatggtggaatgagactcgacaacttcaaaagaggcaggcatcgcgccctcctcgacggtcacacccaatgactgatgctgaggagccgtgacagtgggagtcattccagctgtattcagattcgcgcgatccacgataatcggtgtagaaagcatcaaacccaaacccagaacaacggccaccgaagcagctacgcgtatcgccttacgggcaaacagaccgcgctcggccacaatagcggcaggacgctggtctaagtcggcctcgagacgagcacgttccagtgctgtaatagtctgaatctcgacatcggccagtccataaaacttgtcgctggcctccaaatcattgaacggcacgaactcattgtaacggtcctcgcgacggcagaagtaacctaaccgtcccatcgacacctcactacctttcaacaactgcttgccgaaagccgccacactgtcattgatgaaacgcatggcctcatcatagctcagtccttcacgacgcacaagcgactgtgccagcagaccatcgttgtgggtcacgccggcgttgaagcctatcgtgcggcagggacgcgtcagcaatgagcgatcctcgtcataggctgcactgtcatagttagcgatgaacgcgccccatccggggacgaccacacaatcgtggcacgccaccaagtattcaatatgttcgattatagaaaacatcacacaaaggtagggactttagcgggccccacaaaattttagagcccaaaaagcgcgaaaaaagttattaacacaggtcgcatcaacggtggttcagcggctgaacacagcacggtaggcttcggccttcttttccagagccaacgggtatgctcttgaggtagaaggcatgcgccacaaggtgaaacggtgtccaccgacctcggtgtcaacaggttggccgatagacggaatttccaccccggcctgagcagcgatgacacccgtcgctttctcacccgtggtgaccacggtcgtgatggtggggtgcgcatcaagcagggcagcaaggtcaatcggctctacaatgtcaaggaatttgtcgctggcgttgtccttgaggcgacgaacggccattcccgtgtcccacaacgcgattctctcgctggtaaggaatgacttgatggcatccaggtcaaaacgcttcaactcattgtcccacaaggcatcacggtcgccatcaaaaaagatgacacccatcacgcgccagaagtcgttcatcttgttcgggtagtagaacggcattgaccagcgcacaggtttgggcgggaaagtgcccaaaaacaagatgcgggccccatcagggataaaaggcgcccaagggtgacgctcgatagcaggttcagtaggttcagcagttttcatggcaacaaagaaaatgaaaaaaacactttttgaccatctttttagtgaaaaaaaagttgattattgcaatttttattaactttgcattttagaacaacaaacaataaaacatcaaacatatgaaaatcaaacacctacttttaatcgcagcggcagcactgatgcttgtctcgtgcggaacttcgggtcaagaggtagtttacatgcagaatattgatcagattccgccagccgcattagctacagcttacactcaaggtgccggtgacttcaccatcaagcccggtgacatgttgcacatcaacgttgcaggttccaacgaggacgccgttaagccctttaacaagattcagtacatcagcacgattggtaacgcttcttacagtgtgggcgaccgtaccaccatcttctaccttgttgacgacggcggcaatatcgacttccccgtgttgggcagattgcatgtcatgggcatgactaagctcaaactcgaagagtacatcacctcactgatctatccgcgctacttgaccgagaagcctgccgtggaaatccgtatccagaactttaaggtttactgcctcggcgagtttgccactcccggcatcattcaagccgagaatggccgtctcaacctgattgaggccatcgccatgtgccacgatctgacaatgcagggccgtcgcgacaacgtgatgctgattcgcaccgaccccaccggtcaacgcaccgtcaaacgcttcgacctcagcgatgccaatatcatgctccagcccgaattccagctgcagcagaacgacattctctatgttgagcccaacaaatacaagaaaagaaccgtatggagcctgccgcctctctatggcgcagctgtcagcatcttcggaaccagcatgactgttctcaacttcatcctgttattgacaaaataattgaacacatagtgtactccacacgaacggcttgtccctgtcagggatgagccgtttttgttacgtaatcctgccattttgtcagttttcaaccttggcacaagtgttgaggggatgttgctgaaacacaaaacaaccagcaatcaagaaaggagaaacaatcatatgaatttcaacaattttactatcaaagcccaagaggttatccagaaagccgtccagttgacccgcgcaagcggtaatcaggcggttgaacccgagcacctgctcaaggccgtcatgaccgaaggcgatgccgtggttcgcttcatcttccagaaactggacatcaaccccatgaacgtggagcgccaattggaagaggctctccagaagctgccgcacgtgagcggcggcgagccctacttgagcaacgacgccagccgggtgctcgagaaggccaacgacatcgccagcaagggcggtgaccagtatgtgactgtcgaggcgctgctgatggcattgttcgacgtcaagacaaacgtgtcggccattctcaaggacgcaggcatgacccgcggcgaccttcaggccgccatcgacgagttgcgcaagggcaagaatgccacctcgcagagtgccgaggagcagtacaacgccttgaacaagtatgccgtcaacctcaacgagcgtgcccgtcagggtaaactcgaccccgtcatcggccgcgacgacgagatccgccgcgtgttgcagatcctgagccgtcgcaccaagaacaaccccatcctcatcggtgagccgggtaccggcaaaaccgccatcgtcgaaggcttggcccagcgcatcgtgcgcggggacgtgcccgagaacctgaagatgaaacaggtttattcgcttgacatgggtgcactgattgccggtgccaagtatcaaggcgaatttgaggaacgcctcaaatcggtcatcaacgagattacccaggccaacggagaaatcatcctgttcatcgacgagattcacacccttgtgggcgcggggaagagcagtggtgcgatggatgccgccaacatcctcaagccggccctggcccgtggcgacctgcgcagcatcggcgccaccaccctcgacgagtaccaaaagtacttcgagaaagacaaggcgctggaacgccgattccagattgtcatggtcgatgagcccgacgaggaaagcagcatcgccatcttgcgaggcctaaaagagaaatacgagaaccaccacaaggtgcgcatcaaggatgacgctatcatcgctgcagtgcagctgagccagcgctacatcagcgaccgtttcttgcccgacaaggccattgacctgattgatgaggccgctgccaaactgcgcatcgagatggacagtgtgccgcaaggtcttgacgagatttcgcgcaagatttcccaactcgagatcgagcgcgccgccatcaagcgtgatggtgacgaggcccgcatcgctgacctggacaagcagattgctgaactcaaggagcgcgagagcgactacaacgccaagtggaaaagcgagaaagaactgatcaaccgcatccagcagaataagatcgacatcgagcagctcaacttcgacgccgagcgcgccgaacgcaacggcgactacggccgtgtggccgagatacgctactccctgattaagcagaaggaagatgagaaccgcgagattcaggaccgtctgcgcgacatgcagggcgacaaggcgctcatcaaggaggaggttgacagcgacgacatcgccgagattgtggcccgctggaccggcatccccgtgaccaagatgctccagagcgagaaggagaaactgctccatctcgaggaggaactccacaagcgtgtcgtgggccaggacgatgccatcaaggccatcagcgacgctgttcgccgcagccgcgccggcctgaacgatcctcgccgccccatcggttctttcatcttcctgggtaccacgggtgtgggcaagaccgagttggccaaggcacttgccgactacatgttcaacgacgagaacatgatgacgcgcatcgacatgagcgagtaccaagagaaattctcggtcaccaggctcatcggttcgcctcccggctacgtcggctacgacgagggtggacaactcaccgaggccgtcaggcgcaagccttattcggtagtgctgttcgacgagatcgagaaagccaaccccgacgtgttcaacgtcctgttgcaagtgctcgatgacggccgtttgaccgacaacaagggccgcacagtcaacttcaagaacaccatcatcatcatgacgagcaacctgggctccagcctcatccgtgagcgcttcgagcacctgacgcccgacaatcgcgacgagatcatcgatcgtacccgcaacgatgtgatggggatgttgaagcagaccatacgtcccgagttcctgaaccgcatcgacgagaccatcatgttcacgccgctcgacgaggaacagatacgccaaatcgttgccttgcaactcactggtgtaaagaagatgctggcccacaacggcatcaccctcgaggctaccgatgccgccatcaacctgctggccaaggcgggctacgaccccgaattcggtgcccgtcccgtcaagcgcgccatccaggccctggtgctcaaccgcttgagcaaggacatcatcgccatgcgcgtgaaccgcgaccgtcccatcatcatcgatgccaacggcgacgagctggtattcaagaactgattcttcagaagatttgtcaataacagggtgagccatcactggattcagtgatggctcaccttattttcttattaatgtgtctaatctatcgggaatcggggcgaagtgactcagaactcaaggaattcgggtgtcatctcgctcaggggaaggcccttcttgtccttgtcgctcaagatcatctcttcgcggggaatacgccagtcaatgcccagggcagggtcatcaaagcgcaacgtcgcctcgctctgcggggcatagatgttgtccaccttgtattggaactgcgcctcatcactcaataccacaaagccatgggcaaagccacgcgggatgaacagctgacggcccgattcggcactcaggtccacagccacatgcttgccccatgtggggctgccgtgacgcaggtccacgacgacatccagcaccgtgcccatcgagactcgcaccagtttagcctggctccattctccgcgctggaaatgcaggccgcgcagcacgcccttggtcgagaacgactcgttgtcctgcacgaagtccacgtgtcccacgtgagcgtcaaaatcggcctgcctgaacacttcgctgaagtatccacgcttgtcaccgaagcgcttaggctcaatcacccacacgcccttgatatcctgttcggtaaaaatcataatctaattgcaactgacagtattcacgtgcaaaattagccattttcggtctatgatgcaacataattcaagaaaaacgagtacttttgccccgcaaaatcataaaaagaggctcacaatgaagaagacagcactcaacgtcatactgttcgacgacaacgaggtgcgcaagcacctgatgccgttcacctacacgcgccccacagcgatgcttcgcgtgggcatcaccaccatcggcgagaaatggcaggccctgctgggcgaggccaactacagctacctcaccgtcccctacctcaagaagaaattcccgctgcgcgtgcgccgcaccaccaacctgctggtggctggacacgtcatccccacgcccgatctggcccgtcaagtgctggccctcgagcccggtgacgctttgatggtgggcgaggagctcatcgccttcaacggcagtgcccacgactacgatgcccgtcactacacccgcgtgctctatcccagcgaagcaccgctgatcgtcaagcacctgtatgacctcttcgagttcaaccgtgaggtgctggccgaggactttgagcgactgacggcaggacgtgagtcacagcccctgtcgagcaccaacaccgtcatcggcgatccgtcacgcatcttcatcgaggagggcgcctatgtcgagagcgccatgctcaacaccaacgagggccccatctacatcgggcgtaacgttgaggtgatggagggagcctgcatccgcggcggctttgccgcctgccacgacgccaaggtgcgcatcggagccaaggtctatggcgcaactaccctcggaccccatgtcaagatcggcggcgaggtcgagaacaccattttcatcggctacagcaacaaggcacacgacggcttcctcggcgatgccgtcatcggcgagtggtgcaacatcggcggcggtaccacggccagcaacctcaagaacgactacggcgaaatcaagttgtggaactacgccagcaagcgtttcgagcgcactggcctgcaattctgcggactattcatgggcgaccacagcaagataggcgtcaacggcatgatcaacaccgccaccgtcctcggcgtgggcgtcaacatccacggagccggtttcccgcgcaacttcgtcgcctcgttccaggagggcagctcagtcgccggtttcaaggacgtccccctcgagaccttctacaccatcgccgagcgcgtgatgaaacgtcgcaacatccctctcaccgacatcgaccgcgacatctacaaagccatctacaacatccgcgaccgctacaagtaaccagtcaatcaaatttggccaattggactaattagtctaattcgaccaatttgaccaattcgcccaattcgtccaataagtccaataagtccaatcaagcaacagccactgcaatcatgagcgacgacgacttcctcccccagcgggggaactaccgctaactcattgcctatcaaaaggccgagtgcatctacgacatcacctactacttcgctcatcacttcctgtctaaaggcgaccgcaccattgaccaaatggtccaggcagcacgcagtggcaaacagaacatcgccgaaggctgttcagcatcaacaacatcacgagaaaccgagttaaagctcatcaacgtagcccgagccagtttccaagaactgctggttgactatgaagactacctgcgtgtcaagaaccttgaacagtgggacagcgaccatcccaaagccatccactcacgacaagtcagcctccagcacaacgactcggctttctaccgtgaagccatcacccgcacgagcgacgtgaatatcgccaacatcgccatcaccctactccatcaagaagattacctgttgcgcaaactcatcgaccgcctcaagcaagccttccttgagcaaggcggcatccgcgaagaaatgtatcgcgcccgcacccaataccgtcaaaaccaccccaacaaacccgactaagacaaccaccccaatcaccccaatcagtcaaatcaccccaatttgaccaatcagcccaattgatagaaaacaacccagcagagccaaaatacggcaccgtcctgcctctttttttgcagaataaaaactagttataaaataaaaaactcccaccgaagcgggagtataggtgttacccttcggccatgaaggccttattgtgataagatgtaggaatcttatggatgcaaaattataactattattttgcagagtcaaacatttgaagtaaatttaccgaaaattaacaattaaaacatcactttatggaaagaatactaggaattgacacaggaactaacagccttggatgggcaataattgaaaagaatgataacggtgaaaccaaattattgcacaaaggaacaaacatatttaccgaaggtgtaaaaatcgaaaaaggcattgaatcatctaaagccgccgagcgcaccgagcacagggctttacgaaagcactattggcggcgaaaagtaaggaaaattcgcctacttacagtgctagttaagaatcgtttatgccctcctgttgacaccgagcaattgcgcgattggcgtctgaagggcatctatcctcatgatgaagaattcttggactggcaacgcactgaagataagaataatgtaaatccctatcagttcaggcacatctgtttgacacaaaaattggatttatcaaacttgactcaacgatatatcttggggcgagccctgtatcacctgaaccaacgccgaggatttctgagcaaccgaaaagagacgaccaaggcatccgagggagcagtcagcgaaggaatcagcagcctgactgccgagatgcaagctgcaggatgtgagtttttaggcgaatacttctaccgtctctatcaatcaggagagaaaatcaggaaccactataccgcacgcaatgagcattatcttaaagaattcaatgctatttgcgagaaacaacaattgcccgaagatttggtgaccgacctcaggcgcgccatcttcttccagcgcccgctaaagtctcagaaaggcactgtcggcacatgcgcttttgaaaagggcaagactcgctgtccggcatcacatcccctgtttgaggagttccgtctttacagtttcctgaacaatatcaaaatcaagacgcctgatgatgccgatatgcgctacttgacgggtgatgaaaaggctgccatcctgccccttttcaagaaatatcggaaaagcaagcacacctttaattttgaggacatcgccaagaaacttgccggtaaaggaaaatacatgtatttccgtgacaaggatgacaagccttaccagttcaattaccaaatggatactcctgtgcccattagcacagttactgctcaactcgaagaaatcttcggtgaaaattggctggaaggtgcttgcgaagtctatactctcgccgatgggaaaacgccgttccagatcatgaacgatatctggcatgccctgttcttctttgacgatgaagagaaactgaaattatttgccatagatcgcctgcagttgagtgatgaggatgccgaaaaatttgctcatatctcaatgcccaatgattatgcctcgctcagcctcaaggccatccgcaagatattgcctttcctcaaagattatggcctcatctattcacaagccgtctttctggccaacctagatgaagtgttgccttcttatttcataaggcatgaggacgaacatcaaaaggccatcaacgaggctattgatgtcattctttcctatggtagcaagcaagatgagcgtccacttgagatctatttcaaggattacttgatgacaagatatgaagaatatggcatcaaagaagatttgccgaaactttatcacccgtcgatgatggagcagtaccctcgtgtgcaacccagtgatgccggcatctaccagttgggctctcctcgcatcagcagcgtgaggaatccgatggcaatgcgctccatgttcaggttgcgcaaggtggtgaatctgctcttggcaaaaggatatattgacaaggacaccaaggttcacatcgagttttctagagacctcaacgatgctaaccgccgttgggcgattcagcagtggcaacgccaacaggagaaaaacaaagaggaaatcaggaagagaattcaggaagatgcccacatcgacaatcctaccgataccgacatcctgaagtaccagttatgggaagagcagaaccacatctgtatttatacaggcaatcaaatcgggatttctgatttcctgtgttcaaatcccaaatatgatatcgagcacactgttccccaaagtgcaggcggagacagcaccaagatgaacctgacattatgtgagtgcgcttataaccgcaagacaaaaaagactaaactgccatcagaactgccccatcacgaagcaatgttgcaacgcatcgagcactggaatgagcgggccgaagagctgagcaagcgcattcgcaaactcaagggtagccgtgccgcgacaaaagaggaaaaggacagcatcattcgccgtcgccaccagctgtcgctggaacgggattactgtaggggcaagtacaagagattcacaatgaccgaagtacccgagggcttctcgcgccgtcagggaaccgatatcagtgtcatctcacgctatgcccgcatgtacctgaagtcagtctttgacagagtctatattgtcaagggcatcgccacatccgatttcaggaagatgtggggcatacaggaagaatatacggccaaggagcgtgtcaatcatgttcaccactgcattgatgccatcaccatcgcttgcattgataaagtgcaatacgacaaactggctcaattctatcatgaagaggatgactatcgacagggcaagggcaagaaaccgcaattcgagaaaccgtggccaacatttgtcgccgacatcaaacacattcaggacgaactccttgtagcacattacgccaaggacaatatgcccaagcatacaaaaaagaaaggaggctataacttcattcaaggtgatacagcccgaggctcactccataacgatacctattatggggccattgaacttgaaggtgacatcaaatatgttgtccgcaagagtctggatatgctcgaggcaaaagatgtggacaagattgtggatgaagaggttaagcgcaaagtcaatgaggcgattgctgcccatggcagcctcaaggcagccgtcgaagcaaccatctggatgaatgaggaaaaacatattcccatcaaaaaagtaagactgtttgcaaacgctgttacccgacccatcaacatccgccagcatcgcgacaagtcaaggcatgagcataaacgtcaattccatgtgcagaacgaccgcaactacatgatggcaatctatgtcggccttgatgaacgcggcaaggagaaacgcgcatttgaactcatcagtaacatcagggccgccaacttctaccgaaggagtggacaaaatgctgcagagaataagcagctggtgcccgatgccaaaaatggattaccattaaaatatgaattaaaaatcggcacaatggttctcttgtatgagaacaatcctgacgagatttggaatgcaaatcaacaagaattgcaacgtcgattatataaggtgacaggtctttcatcaatgcttattcagtctcatgcctatggaataatggcaatgatacataatcaggatgcaaggcctagcagcattattaaactaaagaatggagcgtatacctccggagaagaattccgcccaggcattaagatgctacatactcaattcaaggctcttattaatggtgtggactttgaactgaatgacttgggagaaatcaggagaataagcaatgattaagcagacgctgatgttcacttcaccagttgccttatccctaaaatatgggcaactggtggtgaagagcctcgaagatgataaaaccctcacaaggccagtcgaagatatcggctttgtcgtcattgacaatcccatgatatcattaaccattccgttgctgaatgaactggcggccaataatgtggcggtcatcatctgtgacaagaagcagatgcctcaggctatgctgcagccgcttgcgggcaacacgacccttcaagaaacttataagttccagattgaggcatcatcaccgctcaaaaagcagatgtggaagcaattggtagaggccaaaatcaagaatcaggctgctttacttgaccgggtgggtaaagaggggaaaatgttgaaacccttttattcaaatgtgaaatcaggcgacaccgataaccgagaaggtgctgccgcccgtgtctactggtcacagttgtttgatgacagtttcaagcgtgaacgtgaaggagactcgcccaatcagttcctgaattatggctataccattcttagggcggcagtggccagagctctagtcggatcaggattgtatcccgcatttggcatctttcaccgcaacaggtacaatgcctttccccttgccgatgacgtgatggagccttaccgtccatttgtggacgaggtggtttatgccctctgccagaacgacaagaataccgatttagacaaaaatgtaaagagctgactgcttcgggtattgtttgcagatgtaaaaatcggaagaatgacgcgaccactggaggttgcattgtcgttgacaacggcttcagtggtcaagatgttcaagggtgacacccaaaagctttctctcccccagatggcatgagtgaaaatagaataaatgcttatcgcatcatgtggctttttgtcttctttgatttacctgtcgtaaccaagaaacaaaggaaagcagcaacgctgtttcgtaataacttgatgaaggatggctttgtcatgttccagtattcgatttacatcaggcactgcgggtcgctagagagtctgcaggtgcacgctaaacgagtaaaactgtttgttccaaatgaggggaaagtgagtgtattaagtgtgactgataaacaatatggtgatatcatcaattattggggcaagaaagaaaaaggcaaaaagcccccaactaaacctgtgcagttagaaataatttggtaattttgccactaaatactgcatctattgccacttcttaattgaagattgattcatatcttattggaaataagacggatatccgaattaggttgtggtttgatgtaggaaccagataagatacaacagcgattacggttactatggctcatcctctgttgtggtttgatgtaggaaccagataagatacaacgccgatgagagctcaggctatgacggcacggttgtggtttgatgtaggaaccagataagatacaacgagggttagtaatttcctcggcattaatcggttgtggtttgatgtaggaaccagataagatacaactcttcaatgcgacctatggcgatgactcggttgtggtttgatgtaggaaccagataagatacaacacgacgagaagctcatacgcttgcgcatagttgtggtttgatgtaggaaccagataagatacaaccataatttcagaaaaatagatattgataggttgtggcttgatgtaggaaactaaagagttacatataacaaacttgggcaacgggctttttagggcctgttgtccaagttgttgtttattggttgtttgggttgtttgagagagtggcgggttagaagcctttccaggtttggagccagaagtcgtgggccatctgttgccagcggtaggcggcggcgccgagcatgtcctgggtgtagttgttgaggtaacgggcggctttgtccttttcctgggcgttgagttgctgccaggtggtttccaccatggggagttcgctcaggcctttctcgaggaaatggtcgcgggcgggctcaagggtcttgcggaaaacgccccagcgcagcgaagccaatcggttggccttgcggaactgccacagggggctgttatcgtcctcggcgctgtggccgcagattttcagcgatgcgggcaggtcggtgttgccgcagaagacggggaacctggggctctcgccggggttgtcgaaggcgatccatgccacaccgcccacctcgtcggggagccaggagcgcagctggatgacggtgctgtaggagcaccagggaacgctgacggtgcgtgtccacttcatcgccgagtcacccatggcgtaatacatggccaactgctcgttggtgatccaggggttggcaacgggcgagacgatgctgtcaggctgattctcgacgaggttgccctgcttgtccttgcgcttggggttggggatcttgtggcgggcactcaggtcgagcgctgtgccctcgtagtagctgcccagcagtcgcgacacgtcctcgacgctcaccttcttgtcgggcttgacgctcacgggcaggttctcgatgctgtcgtccagtcccagcgacggagcgagctgctgcatgatgtagagttcgcgggtgctgtagttcttgacttctttcttgtagttggtgccgctgtaggccttccagaagcagaaaggttccttgccgtcccacagtttcagtttgcgggccacgtcaaacacgttgtccgaggccatatagtggtcggggtcgctcaggtcgagggcaccgatgcgcgagatattggccgaaacggcgatctcgtcatcggggatgcgcacggcagcccacacggctcccaccttcttgggaccctcgccgaagacctcgaacagccacgcctcgtccttgtcggcaatggtgaggcactcgccgctgtcgccatagccgtatttcttggccaagtcacccatcaggcggatggcctcgcgcgccgtggtgcaacgctccagggcgatgcgcgagagttcctcgatcatgaaaatgcccgccttgttgcgcaacgtgtcgcgtcccgagattgtcgtctcgcccatggccaactgcttctcgttgaggcagggataggcggtgtcgaggaagcgataggtgtggcgcacctgcgggatgacgcccaggcgcggcatattggtgctgtcggcagcgctgcgggtatggaagcggttcttgtaaactgcggtgaccgtgtcgcgctcgtagtcgcgggccggcacgatggccatccaggtgcggtagcgcgcgtcacaggtgtgtgacgtgatgaccgagccgtcggcactggccttcttgcccaccatgatgctggtgcaggattctgtcatgcgctcagcgtcctgagcgtggattgcggtagcgaaagccatcatcagcaggatggcgataaagcatttcttcatatctgtattgacggttaattgttatggggcaaaggtagtgttttttttcggattgccaagccacgtcatcccacaaaaaaagcagccccgctgccgagagcagggctgccatcatatcaagccttcaaggcaggaatcacttcttgatgtacttcttgccgttgtggatgtacaaaccgggagcgccgggagcagcaacacggtctcatctacttgagtgacacttccaatatcgtgtcaatgcctgtggggacagcgggcagcaggacggtgatgccgtcgccactggcggtgtagcgcaacttggtcttgtcgctgaacaggcgaacctgcttgacacgcttgccgctcaagggcaggtacagggcattgtccttgaggttgaggatgtggacatacagggtattgccgcgctgcgtggtcacgccccagtcgtgcggagggatgaggccgccgcgggtgccgtagatgctctcgccgttgacgcgcatccactcgcccaactggtgcaggcgctccacggcctcgtcgggcaagcagccgtcgggccgcggtcccacgttgatgagcaggttgccgttacgcccggcagcacgcacgagggtgcggatgatttcgtcggcactcttgtaggccttatcggtgatacggtaaccccaggtgtagttcatcgtcatacaagtctcgagcggcagctggctgatgccgctctcgcccgaatagccggcggtgttctcgccgggaacgtcctgctcaaagatctggatatcctcgccggggaaaggcacctcgtggtggttgttgccaatcaggcaggcgggctgcagtcgatggatgagggcatactgctcgtccagttgccagtcaaacggcacggggtcggtgtcatgttcccacttgccgtcgaaccagatggcgcccacggggccgtagttggtgagcaactcggtcaactggtcgttcatgaaacggtagtactgtggccagttggtcgtggcggggtcatggggcatatcattctggtgacggcccagcggatagtccaagcggtgccagtcgaggtgggaataatagaaatgcaacttgatgctgtgccgctggcaggcatcggcgagttccttgagcacatcgcgcttgaagggggtggcatccacgatgttgtagtcgctggcagcgctcttgaacatcgagaaaccgtcgtggtgacgcgaggtgatgcagatgtaacgcgcaccggcatccttgatggcacgcacccacgcgtcggcatcgaagcgcgagggatagaagcctgcaggcagctgggcatactcgtcacggtcgattttcttgttgtgcatcacccactcgccgtcggcaagcatcgaatagacgccccaatggatgaacacgcccagtttattgtcctggaactcctggcgcgccttgaggttctcttgggtaggtacataagcggcttgctgagccaggccgcacagccatgagatggccaaaatcagggaaaaagctgtttttttcatatagtcaatggttattttgatttctttttagaacggcggcgcagcttgactatgagccataccaacagcagcacgacagcgagtaacgagccgatggtgattccggcataccatggtgccttgtctagcaagtcgctgaaaacgggcgagatgtattccttcaagagcgggctgatataaacaagttgccccggcaacttatcgttgttataaacagtaatcgaggttttatccagaatcattgtcgcaccctgcagcgattcataggcaggccagtaatgtgatggcgtgctgggattgcctgtcgcggcaaagttgacccacatctgctgcacctcacttgccaatgccgagtcagtcacttcatcggtttttatctggcgtcccgtgttcaggacataacacacctcagaggcgtgacaggccccataataagtgccctgtgggctggtctgcagtttttggcgccaaagatacatgtaggtcttgccacctgattgagcatgtcgctttgccatctcaattgcagggccgcggaacatcaagtcattcaagaacgcttgcgccgtctggggtccttccatgtgttcatcctggtcacggaaatacttgaaataactgttggcactattgctctcggcactgtcgagcgacatcatgatgtaacggcaccacagttcagcggcaagatcaaacttgcgctcgccgcccatggcgtcaatccaatatcggacctcgtcggcattggagccgatgagcatatcgatagttgagttgaagccatcgaaacggctgtaggggttctcggggatgaggtcaccgtcgcgctcggggaaacggaagaacttgcccacctcgtcgttgagagcgattatctcgtcggtggatagcgccttcaactcggccaccgtcttggctcccgttgcatcgagcacgcgtctggtcaacgactggcagtcctcacggctgctggtaaaggccacgctgccgctctgcatgatggcacgacggaacaggccctgcgcctcgtcgatactggccagcagcgaccgcgatgttcctttttacccaccgcagcgcctcgacctggtcgagaatgcccagattgccgctgtaggcatagtccttgccgtcgggcaacgaggaaaggtccaggaagcccaacaggcccaatcggtaattgattgaaaccatgacgacctcggggtgagccttgacaaatttatcaccccagtcacgcggattggccgtgccgttgttcacataggagcccccgtgaatccacaccatcacggggcggcgggcactgcgcatgccgtcggctgccgtccacacgttcagggtcaggcagtcctcgccctgtggatagagcgaagcggcattaccttgggaacgccactggatagacgtgtggccaaaatgtttagcctcacgcaccaggcggctgtcgggctcaggcttggccacctgccagcggcggtcgcccgtgggctgcaaagcgtatggtatacccttgaatgcaagcaggttgctgtcgcgctcgcccacaaacacaccatttgacgcctcaacggccagcgaatcagggtattccccctcaatcaccttgttctcaccgtacagcgccatcatcttctgctccaatgccgacggcccttcaggccgctcctcctgcttggaaccacaagcccccaacaccagaagaagaatcatataaactgtgatccgtttcatatccacctagaattaatcttgcgtgcaaagttaatgaaagcgaagcacatcagcaaaaaaaacagggcactcttcatgcaagagcgagaaaagttgtacctttgtacccaaatacaaaaaagtaacgtaatatgggactgtttaagaagttattctcgcgtgagaagaaggagaccctcgacaagggcctggagaagactaaacagggcgtgtttgagaaaatcaagcatgccgtggccggcaaatcgacggttgacgacgatgtgctcgacaacctggaggaagtgttcgtcaccagcgacgtgggcgttgacacgaccgtcaaaatcatcgagcgtctgcaggaacgcgtggcacgcgacaaatatgtaggcaccgaggagctgaacgagctgctgtgtgacgaaatctcacagatgctggccgacaacaataacgccgaactcgaggatttcactgtccccgaggacagcaagccctacgtcatcatggtcgtgggtgtgaacggtgtgggcaagaccaccaccatcggcaaactcgcttaccagttcaagcaggccggcaacaaggtggtgcttggcgctgccgacacctatcgtgccgctgccgatgagcagttggaaatctggggcaaccgcgtgggcgttcccgtgatcaagcacaagatgggcaccgaccccgccgccgtggcctatgacgccgtccagagcgccgtggcccagcatgccgacgtggtcatcatcgacaccgccggccgcctgcacaacaacgtgagcttgatgaaccagctgaccaagatcaagaacaccatgcgcaaggtgctgcccgaggccccgcaggaagtgctgctcgtgctcgacggctcgacaggccagaatgcctttgagcaggccaagcagttctcggccgctaccgaggtcaatgccctggccatcaccaagcttgacggcaccgccaagggcggcgttgtcatcggcgtgagcgaccagttccagattcccgtgaagtacatcggcctgggcgagcagatgaccgacctgcagattttcaacaagaaggaattcgtgaaatcgctgttcggtgtaaccaaggaagaatagtccctataggaactataataacacatctcgatgaggaaaaacaagatcgacatcatctcgctgggctgttccaagaaccttgtggacagcgagcagttgatgcgccagtttcaggcagcaggctacaaggtggcccacaacgcagatcgcatcgacggcgagaccgtcgtggtcaacacctgcggctttattgccgatgcccagcaggaatctatcgacaccatcctctcgctgggcgaagccaagcggcaaggcaaaatccgcaacctgatcgtcatgggttgcctggccgagcgtttccgcgccgacctcatcgaggcgttgcccgaggtggaccgcttctacggcaagtttgactggaaaggcatgctagccgacctgggtcatgcctatcgtgccgatcttgcccgcgagcgttacctcacaaccccaccccactactgttacctcaagatttcggaaggctgcaaccgcttctgcgccttctgcgccattcccctgataaccggccgtcacacctcggtgccgatgcagcaactgctcgacgaggtgcgccagctgaccgagcgcggcgtcaaggaattcaacgtcatcgcccaagacctctcgtcctacggtctggacttggaaaaccgcatgatgctgcccgagctcatcgaccgcatggccgacatccagggcgtggagtggatacgcctgcactacgcctaccccacccaattcccctatgacatcctgcccgtgatggccaaccgcgacaacgtgtgcagctacctggacatcgccctgcagcacatcagcgacaaggtgttgaccaacatgcgtcgccacatcacccgccaagagaccctcgacctgctggcacgtctgcgccgcgaggtgccgggcatccacatccgcaccaccctgatggtgggcttccccggcgagggcgaacaggagttcgaggagctgatggactttgtgcgcgaggcacgcttcgagcgcatgggagcctttgcctacagcgaggagaacggcacctgggccgctcagaacctgagcgacgacacccctcaggaggtcaagcaagaccgcttgcaacgcctcatgtcactgcaagaagacatctcgctcgacatccaggagcacaaggtgggccagaccctacgtgtcatcgtggatcgcgaggaggacgactactacatcggccgtaccgagtgggacagtcccgaggtggatcccgaagtactcatctccaaggacaaaccgttgaccgtcggcgagttcgcccaggtgcacatcaagcaagcattgccgtttgagttgatcggcagcgctgaataaccagcacactttttttccgcctattatatgcgatagccactagttggctgtcgtgcaatcgtttgcgcaataatttaagaaaaattccttattaaaaaaatgtattagtgaaaaaattagtaactttgagcgacttaaaaactacaaagtttcaggtaggagaacaaaccaactttattcacatgtttaattaataaaattcaagtttatttttcatgaagagattaacgttaattttatcaatgttgattgcgctcgttagctacaatgctaatgcagcgatgtacattgtgggcaacgttcccttcggcgattggcacacctacactggtgctgagatgaccgacaacgggaatggcgtctacacttatgtgaccgatcagatcaatggtaccgtctggtttgtctttgccgacaacctgacccctggtcccaatgatgattggaatacgttcaacggcaactaccgttatggtcctctcacctcaggccaggccgtcagccccaatgttgagtacacgacccagaaatcaaccaacggcagcgtgtcctacagttttgaaggcgcagcaggtcaatcctaccagttcaccttcgataccaacacgatgaagttcaaggttgaaggttatgttcctcccgtagagatcgacgtctacagtgtagccggcgaacccgctgctgtatttggcgagacgtggaacgagaaagccaccgcaaccgagatgacgcttgtcaacggtctctacacctggaccaagaacggtgttgagctgagcagcggcaccacgattgccttcaaggttgtgggcaaccacgactggggtcatgcatggcctacagacaattacacctacgacatcaccgagaacggcatct

SEQ ID NO: 4191 - DNA, 23612 bp, synthetic construct
  source 1..23612: mol_type = other DNA
  misc_feature 1..23612: note = Synthetic
catcttcaaacgacaggttcaaacagtcttccttctggaagctgatgatatcctgtagtcctttttcggcaactttttttctaccaatctccatcataccttcgctgatgtcggcaccaacaaggtgctcaggcttcagcatttgtgcagagagaatggcaaagtcgccagttccagtggcaatgtcgagcattgtcttaggagcaaaaggttccagctgctttatagctttcttgcgccagcctttatcaatatcccacgacagtcgatgattaagtgtgtcgtaggtaggggcgatgttgtcaaacatctcctctaccagttttcctttctcaccctctttgccgtagggtcttatcttttcctgcttatacactgtaattactaattttttattaacgcttcagtgatgccagacaatcagctacattcttttctattcttgcagcaatatcgcctgtttctgtagctttgtcaaacttctcgcctgtgatgtgctcatacaattcaatgtagcgttctgatacactctctgcatattcgtcggtaatttcaggcattgtctgtccaggctcattcatgaaattgtgctcaataagccactggcgtacaaactccttagagagctgtcgctgtggttccccctcagcgagtttttcctcgtaaccttcagcatagaaataacggcttgagtcaggagtgtgaatctcgtcgatgaggtaaactttaccgtcacgtttaccaaattcatattttgtgtcaacaagaatgagtccgcgtttagctgcaatctcctgtccacgtgcaaaaagcttgcgtgtgtagtcttccatcacagcatagtcttcagcactaacaataccctgagcaatgatttcctcttttgatatgttcatgtcgtgcccctcatcagcctttgtagtaggagtgatgataggttctgggaaacgttcattctctttcatgccgtcagggagtttcactccacaaagttcgcggcaaccattcttgtactcacgccatgcgctaccagtgagtatagaacggataatcatctctacgcggaaaccctcgcattttagtccgacagttaccattgggtctggagtagcaagtttccagttagggcagatgtcgcttgttgcatcaagaaattgagctgcaatctggttgagaacctgacctttgaatggaatacccttaggaaggacaacatcgaatgccgagatacggtcggtagctaccattaccatcacgtcgtcgttaatgtcataaacatcacgtactttaccatgataaacactcttttgtccattgaaatggaaatctgtcttagttaatgctttcattttttttagtctttttatcttagttgatattttcttctccgtttgttgtaacgtgcagttttatcttgtcgtttttcgtcgccttctttgcacgtttgtttttcttttcttctgtggtgctttcggcttgtttcttgtcgtaagcctcataagcattcactattcgggtaacaagcttgtggcgcacaatatcttttttacccagttcaacaacgccaataccttcgatgccatttaatatgcgcaacgactctcttagaccacttttctgttctcttggcaagtcaatctgtgttaggtcgccggtaatcaccatcttggtgttccatcccatacgggtgagaaacattcttatctgttgtggagtggtgttttgtgcttcatcgagaataactacagcatcgctaagtgttcgtccacgcatgaatgccaatggagctatctgtataatgtgtttcgccatcatgtcctgaagctttgttgcaggaatcatgtcttcaagtgcatcatacaatggttgcagataaggatcaatcttatccttcatgtcgccaggaaggaatcctaacttctctccagcttccactgcagggcggcttaggatgatgcgtttcacctgtttgtctttaagtgctttcacagccaaggcaatactcaagtaggtttttcctgtaccagcaggaccaacagcaaacaccatatctttcttttcaaactcatcgataagtttctgctggttttcgcttcggctctttatcggacgtcctgaaatactataaacgaggacacccttcaccgcatcagcctttgtttttcggcctttaatgatgtcaagaatgtcctcgtcggttattgtattatattttagcacatgcttgcgcatggtttcaatgtcttcttcagccttggccatttcttcttcgtcgccaagaattcttatcacattgtcccttgccacaatcctgagcttagggaaaagtgattttatcatcacaagatgacagttgttgacaccatagaaagttactgggtcaatatcttctaaaacaatatgtttctctatcaatgtaatattacttaaatttggatgcaaaaatacaataaaaaagtgaaatcagcaaaaaaaaatagtatctttgcattcgataaaaaaagaaagatgaaaatatcaaaaaatagatatctacaaggttttggaatcatagttgttattttagcaatcatcaggtgtgcttgtcctcaggttgcagaacagcgtaatgtgaaaaataaccagaacacagcagttgattctcttgtgtgtgattctgattctgtatctgctgttgcgtccgttcctgttgcaaaagatactgttcctgcatctccttcacgtttttttaaggctgatggtagtttggtaaagaatcgcatacttagcgttcctaatttcggtaatgcttttcctgatcagaacgatgtacagcttgtggctgcaaataaatatggtgtgaagccggtgactgatggcaaagatgccgaaaagcgcaaaaacgaactcacttatgtaggttctaatccttatttctatgttgaccgtctgcgcacatctattccttatcttgtgccacgtgcctctgtgctccttcaagatataggtcgcaatttctttgatagtctgcaaacaaagggtgtgcctcttcataagattatcgttacaagtgtgatgcgttctaaagaagatgtgaagcgtttgcgcactcacaaccagaatgcaacagaaaactcatgtcatctctatggtaccaccttcgatatctgttataatcgctacaaaacagttgaggctccaggtgaacaccgtagagtggtaactaacgacaccctgaaatggattctttccgaggtgcttaatgatatgcgtaagcaacagcgatgccttgtgaaatacgaagtgcatcagggctgtttccatatcacggtgaattgaaaccagcgcgaagcggagcttcgctaattacttccttcactgttatgtttgcacctgctacgcagacagcaaacgctcagtcagtgaccgttggttgataaatgatagatgaaaaatgataaagaagcgcaaagcgctttaaatatgtgcatctttacttcccttgctaatgtttagtcattctttgaaattatcgtctaaaaagttgcaagatacggcaactttttagtatttttgtacccatgaaacgtaagatacttacatacggtggctattttgaagctttcatgagcacactaaaagaaaaggagcaggagaaaatccaatatggattgcttcttctgaaaactcaagaacgtctttcgaaaaagttcgtgaaacatattagagacggcatctatgagttgagaacggaatatgctggtaacatatatagtatattttttatctttgataatggacaaattgttgtgctattcaatggttttcaaaagaaaactcagaagacgccagcaaatgaaatagaaaaggcaataaaaattaaagaagcatattatgcagacaaacaatcacaaaatagttgattacgacctcgtacttgatgagaagtttggtaaagagggaacacaagagcgtattaaggcagaagaagctgcttattcgttctattctggtcagattcttcaagatgcaagaaaagaggctaaagttactcaagaggagttagcgcgtcgtactaacacaactaagtcttacatctctaagattgagaacggcattatcgttccaagcgtcggagtgttttaccgaattatcaatgcacttggacttagagtagaagtggtgaaaccactatattaataaactctacaacgcgaagcggagcttcgctaaatggttaatgataaagaaaagtctcttgcagatattatgcaagagacttttttctttttataattcaagttaactaatcttttcagcaagatactcaagcaagttggttagtccaagaaagatgtaaatattgaaccgaaggtcactgactgagagtttgcagtctgcgtagcaggtgcaaacataaaagcgaaggagataatagcaaaggcggcataatgccgccttctttatcatttatcatttatcatttttcatttagcgaagctttgcttcgcgctagggatgggggaggtttctttatttcgtatagaaatcaatcactctcttcaaggctctactgcaaacggggcagaaaacggggttctcgtttgtgcgcatgcggcagtcgtatgaagggcgataaacacctttgagagaatatcctgctccttcaaacacaccaacctttttctttgttttctcagtaacctttgttggtatcttggcgtttgcgtcaagcatgtcttcccattttccatggaaatcggcaagggttgttaagttaggttcccatggctccacatcgtgagggtaggcgggaatctgttcaaagtcgtaagcatactcgtctcccagtccgccaaagctgtgcccaaactcatgcaccaccacctgaggggtgtatttgttgtcggctggcgacaaaaggtagctgttcaaaattccaccaccaccatatttttctgtattcacgagaatgatgatgtgctcgtatggaatacctgcaagaatgtcgtgtaacttcttgatatgcagtgtagttaagtatctatcgctatagaaagtatcgaagttactttgcagtgctgtgttcttccatatcccttcgtgaggaatacttgtttcactctcaagagaagcactttcaacagcagttatcatgaatcggtctttcatgcttttgaaaggttcgtattcaaagagataacccatgcaacgcttcacatcattcaggaattttggcatctcttcctttttatatccctcggcaacataagccagttttatgcacttgttgctgtcggcaggtgcaagcattgtggtgtgtggtgttacaaaacgctcgcccgttttgcgaataagaatatcgctgggcaccacctgatgagttaaactggtggagagttcgcgtcggttgttgtaaagcgaaagagttacgtcaactgtatctttaggcattggcacaagaaacacattctcaaaggcttgagtgttcttctctgcctcaggatatgttatccattcctgaaaaagggttgaaaacgaatttctgtatattgttctttgcgatttgtgctctcttacagtaatctgtccgttgccctccataggcagttcagttagtcggtgtcttttgccataccatcgtggtgatgttgacaactcgtcaaccgacacatgctgctctttagcgtttccgctgaagatataatcaatgcgaagggttctatcggtgaaataatcgttgaatgattgtgcctttgctccagtaacaatagataccaaggctaaacataaaaaaaactttttcatgagttaatctgtttcaagtttttataataaatgctccccctttgcagtaaagggggagtatggtgcttttaatacagtttcagtctgtcgccaactctcagttggtaatctttgtccaaatcgttcttcttgtacaggctcttcagcttaataccatactgctgagcgatagaatacatgctctctccgttcttaacaatatgtggacgacgcttgtattcctttggagccttcgaacgctttttcttcagccaaataatctcgcctggaaccagactgtctttgcgacttcgctcgttgtatttagcaagtttgcgatacgaaataccaatctcctttgcaatgctcttccatgtatcaccctgtcgagcgttcagataatagttcttgttatatatatgtatagggtgcagacttcctccaactcgtgcaggctgatcagtggcattgtgcttagccataaatctgtcgtaatccttagcagagtcatattcatacaatctgtaaagctgaataatctcaatcaacttctgggcatatcgtgggtttgtggcatatccacaagccttcaaaccataagcccaaccctgatagtcggtgcggctcagtctgaacaaattcgcatagcgtgagttgtctttaagaaatctcgaatgatcctcgtagctttgcagcacgttgtcgtaggctctgaaacattcacctttctcatcgtcgtcgtgataaatgcctctgccttcccatccgtggcactttataccgaaatgattgttacccttcaccgatagctcacttcttcctgcactactctcaaaaagtccttgtgcaagagtaatacttgcgggaatgccatagcgcagcatctcgtgaatagctaaatccttatattgattaatgtattgctgataagcctgattccatctcatttgagcaatagaaacagatgaaaccaacacagaaagcaatagtaatacaaatcttttcatactttgcaaaattactaaatatcataaaaaaacaaaaaaaaacaaacacgtttaagaataattagtaattttgtaaaaaatgcagtcactacataaaattatattggcaataggttccaatcacaatgctgagtccaacattgttttggcaaagatgaagatacaaaaccttttcaaggatgttatcttcaccgaagagttgtggactgatcctataggattgcccgaaggtacagaaccattcctaaactgtctggcacaaggatacaccaggcatggactgtcgcaaattaaaatgggactaaagcgccttgaacgtgaatgtggaaacagcaagggtaaacggtctgaaaacatagtagctcttgatgttgatgtgttgctatatggcgacgaaaaactcaaggaagacgactggaatagaccgtatgtgaaaaaactaatgagacaattttgaaataatcgtctcaaaatttggttatctcatccaaaactattacttttgcacccgatttgatggttccgtagctcagttggattagagcaacagccttctaagctgtgggtcttgggttcgaaccccaacggaatcacttttcatgagttttaagccatcctttttgggtggctttttttgttgtcctagagcaacaaccaaagcgctgctgggtcttgggttcgaaccccaacggaatcactaatcttatgtttaaagccatccattcttgggtggcttttttgttgtcttagagcaacaaccaaagcgctgctgggcttgggttcgaaccccaacggaatcactcgtcaacactgggaacttccttattttaaagggagttccttttttcgttatagtccattggggaaagaaatatttcccccaattgtattatctttgtgtaatctgttggttaaccccaagtaaaattgaaagatggaacctaaggtcactggccgagtggatgctgtctgcgtagttagtgcatccaaactagcgagggaagtaaatatttaaagcgctttgcgcttcatttttcaatattcaatgttcaatcttcaatagcgaagctttgcttcgcgctgagggatgggggaggctttcaatgcgtcttacagcaacaaccaaagcgctgctgggtcttgggttcgaaccccaacggaatcacttaacaaaatccgcaagaaactgaaattcagaattttgcggatttttctatttacataatgcaccacatttgcaccactaagcttctattattatccaatgtccatggcttgctgacccttctctatcaaggagtctgatgctttttagtttattaacatgcttttgaactgcagtcacagagatacctactttcttggcaatatcgcctcttgtgatatagttatcagcatatatcagtttataaatggttgcagcagtttcagacaaccctttagataactctttagataaccttatagacaacctttcaggcaactctatggataactcattaggcaaccctacattacttgacttaggtgacgggactggcaatatcaattccacctcgtcaacatccagtttgttcaacagttgcggttcaccccaattggtttccttccatgctgctataatcttggggaatccagagccaacattctcaccaaatccaatcatgcggagcatattctgaatcatccgttgcctccaaagaacacttgcagttccaacggtcaccaggatggtgatcgtttcagaacgggtcgtcaacaggcaatgtgagtttcatttgccaatataccttatgtgcgctatctggttctgcagatatagtaggcatccaacggatgttagagttgtgtatagctaaaaatgtctgtcttggcattagaagaaacaacggcaagaaaaacaagtatgttgtcgagttgcaaagtaagattatagatgttgtcgtggaacttgtggatgagagcgagatgctgcgagcgataaggcaatgagaaatcgtatagcgatatgattgagattagttgggtgacgaaataaaaggttaagcccctcgacgttcacacgctgaggggcttttgctatttatgaattgtttaaacataggaggtcacaggcttatcaatcattagcccagcacctaagtcttttgaaatcttttcaataccttcacgaatcttatctaactgtttctgtcttggctctctgattgctgttatatactgacgtaaaacagaggcgtttatccctatatattttgcaactgctgttgcatcaagtgggtaataatcgaagaaagctcctatatcgaatttgtattcaaaagtaacggtatctggaaaagattctctgttttcttttgcaagttcacggcattcacttaacgccatatgtaaatcttcaatggcttcacgggctgtagttccatatcctgcaagcccatattttccaatgctttctgttgaaaaacaagagaaattacgtttccctttcccacgttcaactataactaaacgtttcataatgctatatattgatgttatgtaatttttctttaaaagagaccttttatcaatttcatacaatagaattgctaataaaaggagtgcctgggctaaagcccaagcaattccttttcaagatttttaagaagtccgatagggatttctttagttccgtgtctcggcacaggtttttgtttcccggtaacggggctaaaccataagtcgtgacgaccaccatgtcttacgataaagcatcctgcttttcgaagacgtttaaacaattcattgtgtgtcatgaaacaaagatctctttgtcatttgttgacagcgcaaaagtaacaaataagttgcggataatcaaattaaaacgcaacttttttgttaactttgtgtgtttttaacatttacacagatattatagtgtgggcagctttgtttgttggagaagtattaatataagaaatgagcattaaatataaaaaggctgtctttgttttggaaggaatgcttctttgatactgattttgaaaaaagattattggataatacagttcaaaaaaaactcccaccgaagcgggagtataggataacatccttcggcaattactgccttattgcgataagatgtaggaaaaatacttatcttgctgcaaatatgataaatttatttggaacttccaaaagaaaaagctaattttacgaaatcttaatagttttgaaaagaaatggaaaagattcttggtattgatacgggcacaaatagtcttggatgggctattgtagaaaaacatgaagatggctataaacttctccataagggtgttaatatctttcaggaaggagtgaaaatagagaaaggtattgaatcgtcaaaggctgcagaaagaacagagcatcgttctgcacgagtaagatattatcgtataaaggtaagaaagattcgtttgcttaaagttcttagtgataataatttgtgccctcctgtaacttctaaagaattgatgatgtggcgtcatcgtaatatatatcctaaaaacgatttgttgctgaaatgggaatctacagatgatatagagaacaaaaatccttatgcttatagatataagtgtttgaatgagaaacttgatcttacggatataacacagcgatatattcttggcagagcgttgtatcatattaatcagcgcagaggttttttaagtaatcgcaagagtgaagatagtgatgatgaaggaaaagtaaaatcaggcattagtgaattatctaaggaaatagaaaatgcaggatgtaaattccttggtgaatatttttatcagctatatcaaaaaggtgagaaaataagaaatcattataccgcacgtaatgatcattatcttgcagagtttaaggctatttgtgaaaaacagcaacttgacgaaactttgataaagaaacttgaagaggttatattctttcagcgacctttaaagtcgcaaaaaggattagttggacattgtgtatttgaacctaaaaaaacaaagtgtcctgcttctcatcctttctttgaggaatttcgtatgttacagtttgtcaataatataaagatacaaactccacatgatgaagttttacgtccattaaatgaagaagaacgtgagaagattcttccaaagtttttccgtaaatcaaagacttcatttgagtttgaggatatagcaaaggaacttgcaggaaaaaataactacgcttattataaaaatcccaaggggaagccatatcagtttaattatcaaatggatatttcagtatctggttgtcctgttactgctggtttaaaagaggtctttggcgaagattggcaagatgctgtttgtgaggtttatgataaggctacagataaaagtcaataccaaataatcaatgatatttggcatgtcctatttgatttttcagataaagagcatgttgttgaatttggtaagaaacatcttcagctaaatgatgaagtcgcaacgaagtttggaaatataaaggttcattcagactacgcatctttaagtcttaaagcaatttgtaagatactcccttatttaaggatgggacttatttatccaatagcaacgttcttaggaaagatagaagatataataccttctaatgtttggaatgtagaagaaaatagaaagcagattattgatgagttgctatctgctatttctaagaaagatgataatcctgcagatgttagaacgacggaacaatgtattaaggattatcttatttctcattttggagtgaacgaggaagatgctgataaactttaccatccttctatgatagagtcttatcctcatgtaccagagggagtaaataaacttggctcaccccgtataaatagtgtacgtaaccctatggcaatgcgttcactgttccgtatgcgtcatgttatcaacacgttgttagcagaaggtaagatagatcgtgacacgactattcatatagagtttgcacgtgaacttaatgatgcaaataaacgtcaggctgtttatcgtataaacagagaaaacgagaaagaacgtcagaaagcaaaagacgaaataatcaaactgtataaggtagaaactggtaaggatataattcctacagatacagatattttgaaatacctgttgtgggaagagcagaatcatagatgtatttataccgatgaagagattggtatatcggagttcttaggtgagaatccaaaatatgatatagaacataccatccctcgtagtgttggtggcgatagtacaatgatgaatttaacgctttgtaatagtaagtttaatcgtgatataaagcaaacatctttgccatcacaattgtctaatcatgaggacatccttgttcgtatagaagaatggaaaaagaaatacgaagaattggataagcgtattcataagaatcgtactatcgctggtatggcaaaggatgttaaagatcgtaggatccaagaacgtaattatctgaaattacgtcgtgactattggtatggaaagtatcagcgatttgttatgaccgaagtaccagagggctttagtcgtaggcaaggatcaggaataagtgtaatttcaaagtatgggaggttatatctaaaatcattctttaacagagtgtttgtagtgaagggacttgctacatcggatttccgaaagatatggggtattcaagaggtttattcaaagaaagaacgagtaaatcatgtgcatcattgcatagatgcaattgtgatagcatgtattggtcctggtgaatatagtaaacttgcagaatattatcatgacgaggagaatcaaaagtggtatggcgcatcaaaagctaaattcgatgctccatggtctacttttgctgctgatataaataagattcagcaagatattatagttgctcatcacacagccgataatatggctaaaaagggtaagcacaagatattgctgaaaggtaagaaagtatgggcagatggagatacagcaagagcttcattgcatttggacacatattatggcgcaatagaacgcgatggagaaataaaatatgttgtccgtaaagctcttgatgaaaactttaaagattctgatgttaagaatattgttgacgaaacagttaaagaaattgttttgaatgcaataaaagagcatggaaatcttaaaaaggctattgctgagggtatatggatgaataaagaaaagggtgttgcaataaagaaggttagatgctttactccttctgtaacacgacctctggatattcgtaagcaacgcgatttgtcacctaaagaatataaacagcaataccatgttatgaatgatggcaattatgctatggctatttatattggtcatgacaagaagggtaaggagaaacgtgcctttgaaatgatcaataacctcgatgcaagtaggtattataaggtaagtaacgacaaagaatcagttgactataaccttgtaccgctttcaaagaaagattatccacttgcttatgttctaaagaagggcactatggtcttgctgtatgaaaatacaccagaagaaatagaagaatgtagtaggttggatcttgttaagcgtttatataagataacaggactgtcgtctatggaaacttctagtagtgaattcggaagaatcgttttaactcattcacaggaagctcgcccaagtggagaattaaaagctcaaaatggtgcttataaaagtcaggaactgtttagaaataaaataataatgcttcacactcaaataaaggctcttgttgaaggttataattttattataaatgacataggagaaattaaaatgttacgttgatgcttaaacaaacattgttcttttcaacgccagtaaagttgtcactaaagaatttacagttggtgatatcttggaaggatagtaacgatattgttactcgtccgatagaagatataggttttgttgtgatagaaaatcagatgatatcaattagcataccgcttttaaatgagcttgtaaacaacaatgtttgtgttatcatctgtgattccaaaggaatgccatcatccatgcttatgggattagaaaataatgcaactcaggcagaaagtttgaaatatcagttagatgtttctgaaccagcaaagaaacaagcatggaaacaacttgtagagcaaaagataaaaaatcaatcttttgttttagataaagtgggggcatcaaatcataacttgaaagcattttatactacggtgttgagtggtgattcttctaatagagaaggaattgctgctcgacaatactggactcatttgtttgggaaagactttaaacgagaacgtgaaggctttgctccaaataatcttttgaattatggatatgctatattacgagcagcaacagcaagagcattgatgggatcaggtttgttaccggcattgggtatatttcatagaaataggtataatgcttttccgcttgctgatgatattatggaaccatatcgtccttatgttgacgaaatcgtttttaatgcagcagaagaaggattgttggaacttgataaggagacaaaagcaagacttttgaaccttttgtttacggatgtaaaaataggaaaagtaactcgtcctcttactaatgctttgactatcacttctgcgtcacttttgaaatactataaaggtgaaacaaagaaactgactttaccggtttttgaatgacattagaaagattaaatgcttatcacattatgtggctatttgtattctttgatctgcctgtaacgactaagaaggaacgccatgatgcgatgcagtttcgtaagaatctggaaaaagatggattttctatgatgcagttttctgtatatgttcgtcattgtggttcttacgagagtatggaagtgcatataaaacgtgtaaaggcatttgttccaacggcaggtttagtaagtattttgtctgtaacagataaacagtatggtaatattgtaaattatcgagggaaaatgaaaactgcaaaatcagacaaaaagataaataaaatcataagtgagccaattcaattagaatttttttagtacttttgtagctggaaatattacctacactatcgtttttttatacttagaagtagttataaaccctttatttatagtatgtttctaaggtaaggttgcggtttgatgtaggaaaacaaagatatacaaccgcctgactattaccaggtgatcgccaacgttgcggtttgatgtaggaaaacaaagatatacaactaatcagaagttgaatttcgccctgaagggttgcggtttgatgtaggaaaacaaagatatacaactagattctttaataatatgttccgtttgcggttgcggtttgatgtaggaaaacaaagatatacaacgaaacaagagccaaggctgcggagcaggagttgcggtttgatgtaggaaaacaaagatatacaaccgtatggaagacggtagctatcgtggtaaagttgcggtttgatgtaggaaaacaaagatatacaacttatttggctttgatatgccactcgaagaagttgcggtttgatgtaggaaaacaaagatatacaacaaggcaaataacaccccaataagcctatgagttgcggtttgatgtaggaaaacaaagatatacaacacaaggctatcaaagaaaattacgtattggttgcggtttgatgtaggaaaacaaagatatacaactgttggtgtttcgtcttcgtcttcttcgtagttgcggtttgatgtaggaaaacaaagatatacaaccagctcttgatcatgaatctccacaatatagttgcggtttgatgtaggaaaacaaagatatacaacccagaggctggtgatgaatggctttacctgttgcggtttgatgtaggaaaacaaagatatacaacttttgatagcagcagttgtaactcgcttagttgcggtttgatgtaggaaaacaaagatatacaacatatcgggcaaacgtttttctaacatgagagttgcggtttgatgtaggaaaacaaagatatacaacttccttgttgcgttcctcttttagttgttagttgcggtttgatgtaggaaaacaaagatatacaactcttcaccagatgctgcggcagatgcctggttgcggtttgatgtaggaaaacaaagatatacaacacataagtgaaccactgcaacaggtggtagttgcggtttgatgtaggaaaacaaagatatacaacaacagaacgtactatcacactttgtggtaagttgcggtttgatgtaggaaaacaaagatatacaaccacttgtggctcgtgaagacgggcggctagttgcggtttgatgtaggaaaacaaagatatacaaccttccgcgacgactgggaagacaccgaaaagttgcggtttgatgtaggaaaacaaagatatacaacataatcacagatgtttgtttggcaaaactagttgcggtttgatgtaggaaaacaaagatatacaacacaacataagtaccgaaccaccattattagttgcggtttgatgtaggaaaacaaagatatacaactgacaaaagtaaacctaaagcagcataatgttgcggtttgatgtaggaaaacaaagatatacaacagatgcagaatcttctcgccaaaatgctatgttgcggtttgatgtaggaaaacaaagatatacaacataatgacagaggacgagaagcagcgagagttgcggtttgatgtaggaaaacaaagatatacaactcgttactttctttcataaattgctcacctgttgcggtttgatgtaggaaaacaaagatatacaaccacaagaaatgttggctaagttcgaagcagttgcggtttgatgtaggaaaacaaagatatacaaccaaggcaacaagatagattccttccagtagttgcggtttgatgtaggaaaacaaagatatacaacacaacacttccgttctgctcggtatctgcagttgcggtttgatgtaggaaaacaaagatatacaacttacctgtgatacctttgatcacgtcgatgttgcggtttgatgtaggaaaacaaagatatacaactcagcagcaagaagataccttcaaggtagggttgcggtttgatgtaggaaaacaaagatatacaacacagcatgagcataggatattcgccgggaagttgcggtttgatgtaggaaaacaaagatatacaacctcaacatcaacaagcaaagaaccatcagagttgcggtttgatgtaggaaaacaaagatatacaaccgagtgcctgcaatagcaacattgttgctagttgcggtttgatgtaggaaaacaaagatatacaacactgatttttcacaagataaaattgaataggttgcggtttgatgtaggaaaacaaagatatacaacatgggcaatggcgtgcacaaccgccacgagttgcggtttgatgtaggaaaacaaagatatacaaccgtaggcagtttccaaatatcggtgtattcgttgcggtttgatgtaggaaaacaaagatatacaacgcaggagatgtacttgtagatactgaagataggctaccatttatattttctactattggtaatgatggggcaaaagcttatggtggtttagacagtgaaggatttcatctaccatggcatagtgcggaaaatgacgcatgggttactaatgatgtaaagcccgcaacatcagaacaacgtgaacttttattctcaaagatgaaagaagcaggttatgaatgggctgcggatgctcttgaactaaagaagattaagccgaagttctggagcgataataaaagcaatacctttggtggtttctatatagacatctgttcagagatttcagaaatagttaaagtacccaatacagaaactaactatgatgtttttgcaacagagaagcaaactaaatcagctcttgcaatgtcaaggattagccagataatggctaatgatattgcaaactttggaggcgttattactgatgaagagtggaataatgatgaatggaaatttgttatctatagaaatggaagttgtatttgtaaaacagctataatacatgactatcatgtccttgctttttatacagaaaaacaaagagatttgttcctaaaaatatacccacagctggtttaggattacctaatgatatagaaaaataacgctgtgaaagcagcgttattcagtttaaaacattatatttgcagcagatatgaaagaagaatttacaacagaaatgcacgccgaacttatcggtaaggagatttcaaattttgacctcaaagttatggggggctatggagctgttgcccgtggtgttgccattgaggaagcgttgaaacgttatgaactaacttttgaacaatacgaaaagaatattgatagagtattatcaacgtaaataacgctctaaaactccatgctgtcgagcgtcagtcaaatcaagtaccccttcccaataaccgccaagcagggctttctctccataaggaagttttgctattcggttcatcgggaaaggtgtattagaattgtcaaaatgctcatttataatatccattatctttttttcttgtttggttgttagggaggggaaacgtattgcatttatggtttcgctcctgttttttgtacaaaaaccatatcgtgcccaagcgtaaccgccaatatcaatattggcaaagagttcaatacgttccacacctgtaatgcggtattgttcatacaggttgcggtttgatgtaggaaaacaaagatatacccctatttatttgtaatacttaagataaaactttttgaatggttgaattgcgcttatcaatgaatgatatgttttttgcgtatctgttgaataatatggctttgtatgataaaggtatgctgtcggaagcctcaaacgtagataaacctaaaacagtcgtaagattaaaagcagacaacccaaatcagaaaattataatgttgaggcttaatgatgtaaaaaagattaatattgtgtttattttatggtgaaatcttggaaaaagtccatatatgctatatctttgtaattgatacgacataaagcttctacctggaaaacagctgtaaactaaaactttgtattcaaaatcggagttttactctgcgctatataggctgtaagcatattactgctacggtattgccatagtattgcgtcgttatagacagcatacaagcagcatattggcagtgtatatgtccagtatttgtccagtacttgtccagtatatgtccagtacttgtccagtgatacactgaacatatagtgtagaactactgtacttaaaatgaagaaaaactgaacatatatagggggaataaggaggcaataagctaggtagaacgagagaatagtatagcaaatgtgtaagtttaataataacttaaatataggaggttttaactatgaaacaaaaaagtaaaattggaggtatgttaatgcttggtagcttacgctctgcaggtattactacttacatgagaaatggtaaggtgattactcgagtggcacaatcttttcaaaagcgtagtaatacgcgttatcagtttattcaaagacagagaatgcgtcacaccatttctttatggaaaaaactgaagtattgtaatgtgatgtttacacaacgtcctgttgcgtaccagaattttgcatcgttagcaaatagattgcctgcagtattcttttcttggagatgtcgtgatgttactttcctgatgccaggcattccaattagtgatggctctttgcctactattaatcaatatttaggagaggttgatggtgtgccagccttgttgactgattttaaaaagacggatcttgattttcatgatactctgcgactatatactgcagagcaaaagtgtggtgaatttcctgaaattgaattctgtatgcgtgaattgtcgttccgtgagttgacgttggttgatggtagatttgtacttaagggtgaggaattttctgataacttgaaaggatgggcattggttcgtgttaatcgtaatcgttgttcaccgcagggcatagttacacgttgcactttctatgaacagtacacaacagaagaggcaatgcagaaagcagccaaggaatatggtggactcacagaaactgctataactcatttcctgtgagttcggaatataaaatgcaaagttttactcgaaaaatgtaccattaattacacgaaatataattagcgaaaaattgcttaccctcgctaacgcgaacagtcagcttacgcagtggcgataattgcacgttcaaaaaacagcaaggaacatctttatcatttatcatttatcctttatcatttagcaaagctgcgctttgcgccgcattacattctcgctttttcgctctcaccggcacctgttcccttatacttgctcttctgggcattgaaggtgtaacggatggagatgtcgagacggtgattacggcttcgtgttttctgcagagcgtagaagaaaccgcagtcatgagccatatcctgtacgctacgctggaacacatcgccgatgctggcacgcaggcacagggcatcgttcttcagccagcacttctgtaccacaaaacggatgttgtatgagggcgagagcatacggaagtttagcacatcacccttggtttggatgttggcgttggcctccaactgccagctgtgcttaaagcggaaggtgttgttcaggtcgaagaagaagattggcttgttgaatgttacatcagttttgcctgtagcactacgaggatcgtcgaatgtcattgtgttccagaacttctgaccgccaatggtccagcttgggctatacacgccccatgtgggattggctgaaaggaagatggcgagattgcgtactgggtcgggcagattggcctgctttagcaacatcacaccctcgttgttatatgccataggcatctgtgtgatggcgttgtcgcgacgttcgtaggcagcaaacaggtttatccacttccaacgggcattgatgcttagctcctgcatggttgcgtttttcagtttcgagtcgccttgcagcagggtatatgagttcagatagataatatggtcgttcagtgcgctgtagcttggacgcacggttttcatggtgtagcttagcgaggtctggataggccccaactgctttgaccatgtgatattagggaagaactcgtcctgatagcgtgtcatattgttctcggcattcaagttgtcgatatagtcgaatcccacatgctcgtagcgcagtccggcacttacggtgccatatttatccaagttggcattgtaagccacaaaggcagcaatgttgttttcctttacatccgcatcggtagagggtaggggatagttggttatcgacgtactgttctgtcgcttaacaaaactcatctctgttccagcctgcagctgtcctttccatacaggataggtcagcaccagtttggtagcccatagtcgcgaccatgtatttgagttctgttgcatggtttgggcttcaggcaaatacacatctatcagattgtcgtcattctccttttctgtcatgaaatccacgttaaggtcgatgttgagttttcccacctgaccgctataataggcattaccctgccaattataggggtagtgtgtatgatcgtcctggtgcgaaaggtcgcgacctgtgagattgttgtcagtatctacccacatgttgtaatacgttttaaactggtcgtggcgttccactctggcacctaatgaatgcttgtcgttaatctgccagttaaagcccagattgtagttcatgccctctccacgccaatagttacgagtgtgggtgtcctgaagaatattactgatgccttcatcggtctttaagaatgtggattgcgtaatgtgcagatcgtcggggctatcccacgaccagtagtttaccataccaaacaggtcgaggttgttgtggcgataacgcagattaagtgtgctgctgggatcgctgtagccagatatcagattctgattgttggcagccatcaggtcgaagccgaaaccagcaccttcgcggcgaacagtcttgatacgtaccactgccgagatggtggcatcgtattgcgcacctggattggtaatcacctcaacgctcttaatctcttccgaacgaagtcgtttcagttcgtccttatcctgcatctttcttccgttaatataaaagataggggtacccttgcccagcacctcaaggtcttcgcccttcagagtcataccaggcactttagacagcatttcctgagcagtacccgacttgcctaagatagtaccctcgatggtggttatcatcgagttgcccgtaagctgggttttaggcatctgtccctttaccacaatttctttcagcatctgcttgtcttcctccatctgaatggtacctatttctgtgccattcacgttaacatacttggtgcgataacctatgtatgagaatcgcagaatgcagcagtcttctgtggttttaatctggaagttaccatccacatcgctggttgcaccttgtatatatgtagagtcgacagtgagcagtgccacgctaacaaatggcaagggttccccctgagcattaattactcgtccgccaacatcctcggttttgagcacagctcgacctctgtcgcgactcgacatatctgatgcaagcatcgctctgttctcgctgttccatcggtttgcctcggctgttaaacacatcatcaatgcagctatcaaagctaccagtttaaaactaaactttttcattttcttttcagatttaattgttttgtctgtatgacatagaaaagacataaaaagctgcagacaattacatttctgggatgaatgacatgtttttgtgacgagtgactctttacgttttatttttctccgtataatttaccgtataattaagacgttaattttatcgttaatcttattcttgtgattcgtgttctgctttactgctgatgaagtttttttgaccactaatctaacgaatcgatttctgtaagcaattcactgaagtttcgtaagtgaatatttactctaaaatattatcaagaattagagaattagagaatttttaggctaacgcccctatgtttctaattaattctccatgcaagggcgcaagccaattctcaaattcttaaattcttgataagagataaacttacgaaacttcagtaaaaacattaaagaaaatgcttaagcatgagcggcttcttcaaagccttgtggcatatttttctgaacctttttgtgagcaagctcacatcaggttcatataaatattcctgcctcacaagttcgggctctcatgcttaagcttggaaaatgtagcgctgatgcgcaattgcacaattgtgcaaaggatatcaacctaacaactttgaacattgagttttgaagattgatttttttcgcaagttaaggagataaaggaagtttactctattggaatctgaatcaccgacagccatttctctgggtcttcctgattccatacgccatcaatataacatgtgcgatgctgtccaaccaccttgtagccttgttcctcaatgtagcggaaggcttcggtgaacgactcatagaagcgttcgtaaggacctacgtgcttcatgcatagggctttgtgtactgctggcagtcgcttgaacttgatgatggcactatcctgtcccatttcctccacctgttcgcaatactcaatgtcgatgtcggtgggggtgtactcctt

SEQ ID NO: 4192 - DNA, 23612 bp, synthetic construct
  source 1..23612: mol_type = other DNA
  misc_feature 1..23612: note = Synthetic
ggccccggtatagacaaggggctgcaaatgctggtggatatcaagtccaagtaccagctgcgcatcctgaccgatatccacgaggcgtggcaagctgagcgggcgggccaagtggctgatgtcctgcagataccggccttcctgtgccggcagaccgatttgctcgtggcagcggccaagacgggcaggattgtcaacatcaagaaggctcagtttctgagcggtgaggatatggtctatgcctattgcaaggcgacggagagtggagcccgcgaggtgtggctcacggagcgtggcaactgcttcggatacaacaatcttgtcgtggattttcgcaacatccccgtgatgaagcgtttttgcaagaccgttatcatggactgcacccacagcgttcagcgccctggggctgccggcggcaagaccggcggtgaccgggaatatgtgcccatgatggcccgtgcggcgcgcgtatttggagccgatggatacttctttgaggttcaccccgaccctgaccatgcactcagtgatgggcccaatatgctgccgcttgaccaacttgaagatgtaatagcttccctcttatgaacgactggaatactatagctatacagtgcctccgcgatgaggctcaggcacttctcaatctgattcctaatgttgactcagactttggcaaagctgtcgacctcatcctccactgtcagggcaaggtcattatcacgggcgtgggcaagagcggacacgttggggccaagattgctgccaccctgagttcaacagggactcctagcttctttgtcaatcccctggacctgtatcatggagaccttggagtcgtccagcccgatgacatcgtgatggcgatatcctacagcgggcagaccgatgaactgctccgcatcgtcccctctttggtcgaacgcaaagtgcccatcataggcgtcagcggataccgtgacagcttgttggccaagtacagcaccgcccatatctgcatctatgtggaggaggaggctcgccccctgcgtctcgcgcccacttgctcgtcaacagccactcttgccatgggtgacgccattgcctgctgcctgatggaggcgcgcggatttaaggagcaggatttcgcccgtttccatcccggaggcgtactcggcaagcgcctgttgacccgcgcttcagacgtcatgaagcgcgacgatctccctgtcgcctctcctcagttgcgtctcgccgacgccttgattctgataagtcagggacgcttgggcgtctgtgtggccgtagaggaggacaaagttgtcggtctcatcaccgacggtgacctaaggcgtgccctggagcgcggccgtgaccacttctacgacctcaccattgccgacgtcatgacgcgttcgcccaaaactgtctctcccgatacccggatcatcgagatcgaccatatccttaatcagaacaagatccactgtgtactggtcgttgaccaggaggaccatctgctgggcatcgtggactccttccgtactgtactctgatttgtcctgatgcatagttctctcatcgttcgcctcctgccgctggttcctcttctgagcctatcctgtcagtcagcatcagtgggagaaggctcccattgtgcagatggtatcgcccccattcaggaggctgtgagccccttgacagagaaggtcggcatagaggacgcggcctcagggccgcagccggcggaagaagcacatccgtcgttttcgtccgcacagcttgcgttttctccggactctcttcttgccagccagttcccctgggtcaaggacgtgagctccaataatagcctcgtctttttcaagaatgggcaggagaagtttgacgatctctttcgcgccgtaagacaggcccgcagcacaattcacatggagtactttaacttcagggacgactccatcgccaacgcgctctttgacctcctggccatcaaggccaagcagggggtcaaggtgagacttctctttgacgcctttggcaatgactccaacaataagcccttgcggcgcaagaaactgcaggagctccgccggcgtgggttggaaatctacgtctatgacccgctggacttcccgtggctcacccacgtcttcagccgggaccaccgcaagattgtcgtcatcgacggccagaccgcctacagcgggggcatgaatatcgccgactactatatcaagggcaaagctgagtttggccagtggcgggacatccacttcaggattgagggcgatgccgtcgcgagctatcagaagatttttctccgcatctggaatcgcactactggtcagcatgtgcacggcgcagacctctatcccggcatgtcgctccccgagaaggcgctgcagggactcaagcaggacacgacgtccacccgcggccacaagacgattgccgtggtcaaccgcgagccgtgtctcaccccggacgtcatacgccgcaccttcgtcagcgcaatcagtcacgcccagcggctcatccagattatcaatccctacttcaccctgcgtcgccccgtacgtcgggccttgcaggaggcaatcaagaggggcgtgcgtgtcgaaatcattgtgtccgacaagagcgacatcccaatcacgccgcaagtcgtggattacaatgtgcgccggctccagcgtcggggcgcccatgtgtactatttccagggcggcttccaccacagcaagatcatgatgattgacagcctctattgttttgcaggcagtgccaatctcgatagccgcagcctgtactttgactacgaggtcaatgcgctgattctcgaccccccgtcgacccacgcgctgcaatcgatttttgagtcggacaagctacaccgctgccgccccctgaccgatgactattggcgccagcgcagcaagggcaaacgtttctctcagtggctgtaccacttcctcgagccttggatttagcggcccctgtgccggaaaatgggtttctagcgcctgaagaaggtctccacatcgtattgggtgcaatagaaagctgtgccgatggtctaaaaagcctctacaagtgctgtattgggtgcgacagaaagacggcgtcgagggcctgtggcggctggatggcgaggcggcgatgcgatttttttgagaatgaaatgtccggatagtgcttttttttaggaagacaagggcaaaggaatgggctgaaatgtgtatttttgcaggcgagtaggcgaggcgtttccgtctgacgtccttctcagtcggttcctgcattttcctcacacactggcaggtccgctgtgtcggtttagagacttttatacgagataatcttatatattaagactatggtttatactaaagaaattgagaacatgtgcgttgtggccaaagggcccaaccacggacctgcgcccattcccgaagagggcaaatggattcaggccaaggagatcaaggacatctccggtttttcccacggtgtaggatggtgtgcaccccagcagggagcctgcaagctctcgctcaatgtcaaggaaggcgtgattgaggagtgcctcattgagaccatcggctgctccggtatgacccactccgctgccatggcgagcgagattctcccgggcaagaccattctcgaagcgctcaataccgacttggtctgcgacgctatcaatacggccatgcgcgagctctttctccagatcgtctacggacgtacacagagcgccttctccgagggcggcctcgctgtcggcgccggtcttgaggacctgggcaagggcctcattagccagacgggtacgctctacggcactcgcaagaagggcacacgctatctgcagctcaccgagggttatatcaccaagatgtatctggacaaggacgaccaggtgatcggctacgagtttgtccacatgggcaagttcatggaccagattaagaagggcgtcgatgccaacgaggccctcaagagtgtgaccggtcactatggccgtacgacagcagagcagggagtagtgaaatcaattgatccacgtaaagaataataggagggccacactatgattagagaagtaaaatttgaaagtcaggaccgccgtatcaagcagattctcgctgcgctcaacaaacacggcatcaaggatatcgaagaagccaacaagatctgtgacgcagcaggtctcgatccttacaagacttgtgaggagacccagatgatatgcttcgaaaacgcgaagtgggcctatgtcgtaggcaccgccatcgcgctgaaggaaaaggcaaaaaatgcagtcgaggctgcagaatatattggcgaaggcttgcagagcttctgcatccccggttctgtcgccgatgatcgtaaggtcggactcggccacggaaagctcggcgcccgtctgttgagccctgagactcagtgcttcgccttcctggccggccacgagagcttcgccgctgctgagggcgctatcaagattgcccagatggccaacaagtcgagacccgcggacaagcccctgcgctgcatcctcaatggacttggcaaggacgccgcccagatcatcagccgcatcaacggcttcacctacgtgcagaccaagtttgactactatacgagtgagctcaaggttgtccgcgagattgcctacagcgatggccccagagccgccgtcaagtgctatggtgctgacgatgtacgcgaaggcgttgccatcatgtggaaggaaggcgtcgacgtctccatcaccggtaactcgaccaatcctactcgcttccagcaccccgtagccggtacttacaagaaggagcgcatccaggcaggcaagccctacttcagcgtagcctccggtggtggtacgggccgcaccctgcaccccgacaatatggctgccggaccggcttcctatggtatgactgacacgatgggccgtatgcacagtgatgcccagttcgccggctctagctccgtgcccgcccacgtagagatgatgggcttccttggcattggcaacaatcctatggtcggctgcactgtcgcctgcgccgtcaatgttgacctcgcgcttaacaagcactaatccgaccaattcacttctgatatagacagccccctgatggcgatacgttcatcggggggctgcttgttgtttgttccctccaaagcgcagcgcagccgcctctccgcgggagaaaatcctccttgctctcgttgcagtttttagggattggggaaaagttttggggagaagaagccttcttctgtggcccgtaagccgtacagatgcttatggatgaggaatgaagtccgttcccaaagaacctttctgtgcctcctgaggagtaaatgcggccgccctgtgggggttgccgaagtatgactaggatggcgaataggagaggaatatgtgggctctggtctgccctcgcgtgaggatagatgtgcggcgtcagttgggggcctgttgaggcccttggggcgcttggctgagcttgagaattgtgatattttggctgctcttggggtctacggcatagcggcggtcgatgcgccgtcccgtcacccagcagatgtcgtcgccgctcagcatcactgtctggctctcgcgctcatacggcgtcagcttcaggtcgttgaggtagtcgctcacgagtttgctgcccttcatgccaaagggagcgaagcggtccccctgctgccagggacgcacctggagcggccaactcagccggtccgtgttgagggcaaaggagacatggtcgtgagggatctgactgggctgggcgtacgcctccgtgtggaccgtgaggcagtagcccggtagccgatatgtgccctctcggtctatccgcagcggctcttggggctcctgcggcatgatggggtgaagcagcagctgtccgtgccacttgtccacctgccatgctgaggaccgccatgtcgcgtcagccgccgtatcagccgcctccgtcatctccgctatctgggttggattaaatccatagtcctgtagccagtggagcagcagcaggtgaggggaaggcaccgtgcgcagcttgtccagcgagagcgcccgttggccctcaggaactggtacgcggcagccctttgcttcctcgtccagatggtgctccatgtattggtacgcctccgcgatatgaccagctgctagggcgatgcgacgcttggccctggggctgatttcctccatcagtggcagcagttgcagcctcactctgttgcgcagcacgtcggcaacgaggttggagctgtccgtcacatagtcctgatggatagcgtccagatagcggagcacctcttcccgcgtcacccccagcagggggcggatgacgtagccattggcccacttcatgcccgccagtcccttgatgcctgaaccgcgcagcaagtggagcagcagtgtctccgcattgtcgtcctggtgatgggccacgcatatcctatccgcacggagtgccttccgtcgctgctcaaaataggcgtatctcagttcgcgggccgccatctcgatgctcacgccctgccgccgggcgtaggcgcgggtgtcaaaggaagccacgtccagccccaagtccagctgggcgcacagtcttcggcaaaaagtctcgtcccgctgcgactcctccccgcgcaggtggaagttgcagtggaccggcctcacgtccatccccagcgttacgaggcatctgagcagggccaccgagtctgcgccgccgctcagcccatagacaatcacgtcgcctcggcttgcgaggtgatgctcctgcagggcgcgtgtcacttggcgtgtcaggtcttccatgtcacaaatgtacaaaaagccaaggagatggggaaaaaatgggcccaaaagttttgtaagtaggaaaaaatccttacctttgcatccgcaaaagcgtgagtccccgcgttcctcacctgcgaagctcaccctttttcgtccccctggtaccttgaccgagtggctaggtaacggtctgcaaaaccgtgtacagcagttcgaatctgctaggtacctctcttttttttctcccacttttctcactattcaagccccgtcagagagggttgaaaaatctatataataatttttttagcctaaatcgccgctacttgtccgggtataggaatgaaaacatattcgaattattttcgtaatttgctgtaagacaaagaattgagacaacactcgttgtgctcgaaacgcgctgattttcagaggataacaaggtgtcttctcgtttaaacgacatcagacttagttgcaccgacatcaaaccctgtagcgcgaacaaggcgacttgaaatgccgaaaacgtgcgtttatgaggccacttctcggatttattatataattttccctctctttgctcaaaaacctgtgttggccgcttgcgagtcccaatacgccccttgtcgaaggctcaccgtacactctaccgaacgagctgtgctgtcgccagtagagtccagaaacaccccttttccgaaagcctagcttagtcttttattgagcgtataaagtgtagtctcctgttgtatgcttatgcctcagaacggggttttaatgcaagggagagagaaatcgtcacggaagaagattgacaagcccgtagaggctctttagaagcgtctgaaggcacccgatttatgccacaaatcttccaaccgcccaatagggctcaaaaagcaagcaaatcggccgtcaggttcccacgtgatgggctcaatattcgtggttggagatcctcgcagttatttcgcaagataatctttctccagcggctgcaaaggcatcgtatggacctttgaatattttgctgctattttccttcctgtatagctatgatgtataatccagtaatatgtggtgactggaataatacaaaaaatcccgacaatcatttaagattatcgggatagtgattattcagaaattaacaaggctaattagaaaagataatgatcattggcacatctccagaagtttttgcatcaaagaatctgccttataataggtggaactgtccttgcccaccttttgaggattataatccaataggcgaacgatattcatgtattgagtaaatgccttctttatcttatcctcctcgaaattaatatataaaggattaaacttccatctaagaacctcaccctcgagatccattaactctgtaaggctacaaacaatggggtagaagaatccataagcgtacttgtagtctgattgttttgggaatgaattaaaaggtccgctatacgtggttaggggcttctgagatacagctccctttattcttccaaacgagccaccattataattgtatatcaaaggaaaatagtaatacatcatgtcgcaaaatttcatgatatctacgacaaggtccaatgcagattttacagttgtattatgcagtatgtatttccccttcccagatgttgatatcttttcgttcataatgatattaccaaaaaactttacgcatttgcttttctgtaaataaatgttaaccttattaagtgtggcaccaacatctatgccttgatcctcgaaatatttcagaggtaccagttttatcaaaggtatgcacgccaatgcagttacatcttcaacttttgtcgttcctgtttcgccactcttccaaatcactttgaagtcctttggcataatctgcttcaaatactcgtaacatccacgctgattgctctttgcagcatctgtaagttgtacattcgagtttcttgcagagcagatatcggcgatattgtcatagaaatttgctaatgattcctctgtattatctgatggtgttatgatctcgataggtatggagaaataaaaatcgtcgggcgaatggtagtctctaaatttttgttcaagatctgcgtagtgagcatcatcatcccaaaaagatttcaattctttccattccttaaaccggcatgttccatataattttgagtatataaatctgccgatggcaaaggcattgtgcccaccatccatgataccctctgtctgtgcatcatcaaatgaaagccttatacgatttctctcaagcaactcgcaattttgggtagaaattagtaagcccttggtcttgaagaaatacaattccggagagacgttgagtgtttcctcgatgcttctgacaataggattaagggtggctgtacgcggattgaccttgttgtcagcacactttaatagatgtacaaaatcttttggtgatattgaggaaacaaccttactgattttcttttcctcaagagaattttgtttttcaaatttgtgattaagtttaataatcacgttagtcgttttttttaatgcttagatttttcatctttacttttttgattgttagaaaataaaattaataagctaagatgaagaaaagaaaataggctatagttttttttacctagatatttttcaatatcttcacctcgttctatccagaatataaacattgcatccgcaatgcaccttatccaaggtggaacaaaggtactactttattttaccaaattttttacgcaaaaaataatgaaagctgacatacatgggcaatttatggaattattctgacaatcggcgagtctaagggcagccaagagctgcgcggggttgcggcatacctgaagcgcattgagaacacgctatatattataatggtacaaggagcgcagagtatctccttgcgtgagaaaatagcgggcacaccctatatataattgtacaagggatgcgcctatgcctgcggaaaatcgtgatttttaggcaaaaaaaatcccgccgaagcgggatcataggataacatccttcggcaatgactgccttattgcgataagatgtaggaaaaatcttattctgggtgcaaatataagagaaatatttggtgttaccaagaaaagataataaatttacgcagaaattttaaaaacatactgttatatggagaaaattttgggtattgacacgggtaccaacagccttggctgggcgattgtcgagcagcagggcgaaggctacaaactcgtggataagggggtcaacatttttcaggaaggagtaaagatagagaaaggcatagagtcgtccaaggccgcagaacggacgactcatcgctctgctcgtgtcagatattatcgtattaaagtgcgcaagatccgtctactgaagatactcagcgactaccatttgtgtcctccggtgacctcagcagagctaagccaatggcgtcttaggaatgtctatcccgacaatgagctattgcatcaatgggagggaacggacgacaagtcggacaaaaatccctatacctatagatataaatgccttacggagcaactggatctgaccgataccacccagcgatatatcctgggcagggcgctctatcatatcaatcagcgtaggggcttcctgagcaaccgtaaaagtgaggatggtgacggcgaaggcgccgtgaagtcaggtatcagcgatctgacgaaagagatggaggcggctggctgtcattatctgagcgagtatttctaccacctgtatcacaagggagtcaagatccgtggccactatacagcccgcaatgagcactatctgaacgagtttgatgccatctgcgagaagcagcacctgtcggaggagctggccaagaaactcaagaatgtcatcttcttccagcgccctctgaagtctcagaaaggactggtgggccactgtgtctttgagcccaagaagacaaaaagtccggcatcacaccccctgtttgaggagtttaggatgctgtgctttgtcaacgatatcaagatcaaaacgcctcaggacgacgagttgcgtcccttgactgaagaagagcgcaagaagatactccccaaattttatcgcaagtcgaagcccgattttgactttgaggatatcgccaaggagctggcgggcaagggaaaatatgcctattacagagatcctcagggtaagccttatctcttcaactaccggatggacacctcagtgtccggctgcccagtgacggcagggttacgggacatatttggggaagactgggtcaacgcaatctgtgaggtctacgataaggccaaaggcaagaccctcctgcagatagtaaatgatatctggcacgtcctctttgatttttccgacaaagaacacctcatcgagtttggcaagaagcatctgcaactcagcgatgaggaggcaaagaagtttggcaatatcaggctcagttctgaatatgcctctttgagcctcaaggcgataggcaagatcctcccgtatctgcgcgggggcatgatctactctctgtcggccttctttgccaatctaggggaagttgtgccggctgatatctggcaagaggagtccaacaggccacagattatcaatgggatcctggaggccattgctcgccgagacagcaacgaactggaccacaggaccacagagaggtgtataaaagactatctgatagcacagtatgaagtcaccgaaaaggagaccgacaagctttatcacccctccatgatggaggcttacccccgtgtgccggaaggggtcaaccaactcggttcgccaaggatcagcagcctccgcaacccgatggcgatgcgttcgctttttcgcttgcgtcatgtcatcaatacgctgttggcagaggggaagatagaccgggacaccacgatacgtatcgaatttgcgcgagaactcaatgacgccaataagcggcaggccttggcacggtatgtcaaggaaaacgagaacgagcgcaagaaggccagagccgagattgttcaactctacaagggagagacaggaaaggccattgagccgacagataccgatatcttgaaatatcagctgtgggaggagcaagaccaccgctgtatctataccgatgagcagattggcatcgctgactttctgggcccgaaccctaagtatgacatcgagcacacgattccccggagtgccggcggagacagtacgaagatgaatctgacgctatgcaatagccggttcaatcgcgaggtcaagcagactctgctgccctcccagctggccaatcatcaggagatcctgctccgcatcgcagggtggaaggagcggtacgaagagctggacaaacgcattcgcaggatacgtacgtcgagcagtatgaccaagcagcaaaaagaccagaagatacaagcccgcaacctcttgaaattgcgcagagactactggtatggcaagtatcagcgctttgtgatgaccaaagaaccagaaggcttcagccgtcgacaaggcacagatatcagcataatatcaaagtatgctcgtctgtatctgaaatctttcttcaacagagtctttgtcgtcaaagggctggccacgtccgactttcgcaagatatggggcatacaggacatctatgcaaaaaaagaaagggtaaaccacgtccaccactgtatcgacgccatcgtaattgcctgtatggggtctgtcggatatagcagactggcgcagtactatcatgacgaggaaaaccataaatggtatggctccgccaaggggcatctcgctgcgccgtgggagacattccaggaggatatgaacaagatccagagggagatcatcgtgtctcacagtactcaggacaacatcggaaaatccggccgacgcaggatacggctcaagggcaaaaaagtctgggttgacggcgacgctgcgcgtgcttcgctgcacaatgatacctactatggcgccatcgagagagacggaaaaattaagtatgtggtacgcaaagccctggatgatagttttaaggagtcagatgtggacaaaatcgtagatgacacggtcagaggtatcgtaaaagaagccatcagcgcgtgtggcagtctaaaggaagccctggcccaaggtatatggatgaacaaggagaagggtatacctatcctcaaggtaagatgcttcacaccatccgtcacccgtccgctcaatatccgccatcagcgtgacgtgtctgccaaggaatacaaacggcaatatcatgtcacgagcgagaccaactatgcgatggctatctatgtcggccacgacaaacgaggcaaggagaagcgggcctttgagctcgtcagcaatctggatgcatgtgactactacaaggaaagcaataacaaggaagtacaaggttaccacctcgtaccgccgactaaaaatggctaccctctgacctatctcctgaaaaaaggcacgatggtgctgctctatgagaatacgccggatgagattagagactgtaccaaggcggagctcgtgagacgactatacaagatcaccggtttctcctcaatggtcgtgggtgggaatgaatatggcacattgaccatgctgcattctcaggaggcacggccgtcaagcagtataaagacaaaaaatggagcgtataagcaaaatgaagaattcagaagttccatcgctatgtatcatactcagttgaaggcacttgtggccggacgggactttgagatcaatgacttgggagagatcaaatggttaaagtgatgctaaagcagacactcttattctcatcccctgtacgactctcgttgaaaaacagacagctggtcatctcccccagagatgaagatcggattatcacccgtccgatagaggatataggctttgtggtcatcgagaaccagatggtctctgtcagtattcccctcctcaatgagctggtcagcaacaatgtcagtgtgatcatctgtgatgctaaaggcatgccttcgtcaatgctgatgggattggaccacaatgcgacgcaggcagaaagcctaaggtatcaacttgatgtttccgaaccctcgcgaaagcaagcgtggaagcagctggtagaacaaaagatcagaaatcaggcttcagtgctcgacaagctcggaagaggaccccacaacttgaagatctactatagtgccgtactaagtggcgactcaaccaatcgtgagggaatagctgcacgacagtattggcttcacctgtttggaaacagttttaggagggagcgggaaggatttcctcccaacaatctgctgaattatggatatgccatcctcagagcagcaactgccagagccttgatagggtcgggattgctgccggcactgggcctgtttcataggaataggtacaatgcctttccgctcgccgatgatatcatggagccttatagaccctatgttgacgaaatcgtatttgaagcagcagaagaaggactccttaatcttgacaaagaggtcaaagcaaaattactaaatttacttgtcacggatgtcaagataggacaggtcatccgcccactgtcaatagctcttactacgacatcagcatctctcctgaaatactacaaaggcgaagcaaaaaaattgactttacccatgttcacatgacattagatcgacttaatgcttatcatatcatgtggttattcgtattcttcgatttgccagtaacaagtaagacagagcgtcgcgatgctgcactctttcgcaagaatttggaaaaagacggattctctatgatgcagttttctgtgtatatccgacagtgtggctcttatgagagtgcagaggtccatattagacgtgtaaaaagttttgttcccaaatatggggtagtgagcatagtgtctatcacagataagcaatacagtaatatatacaatttccgaggaatacctaaaaatcaaaaatgtaaagaaagatatatcagtgcacccatacaactggaaattttttagtatatttgtaggggaaatcatcctacacgtccgttttttattactcgatagaggggcgattcctttatttataggggatttcgagtattagggttgcggtttgatgtaggataaggaagaaatacaactattgcttgcatatccgagaccgacaatagttgcggtttgatgtaggataaggaagaaatacaactagcgtaaggaagtaggaagggtaagtaagttgcggtttgatgtaggataaggaagaaatacaaccgacgcgttcacggtgctaaccgtcgttagttgcggtttgatgtaggataaggaagaaatacaacaaggaacgccgctacgctatcaatgagcagttgcggtttgatgtaggataaggaagaaatacaaccgttacgactttggacggcacgaagtggaagttgcggtttgatgtaggataaggaagaaatacaactgggcttctaagttcactcctggcgacgggttgcggtttgatgtaggataaggaagaaatacaacttggtatttcatggtactcagcaaaacgagttgcggtttgatgtaggataaggaagaaatacaacaaaaagcgttgacgatggcaaagagatacagttgcggtttgatgtaggataaggaagaaatacaacactctcgatctgcaaagtcgccgtacttggttgcggtttgatgtaggataaggaagaaatacaacccgcttcaagctcaacggagttgtaaccagttgcggtttgatgtaggataaggaagaaatacaacaccgcgaaaaacgaatgtcaggatgtcgtgttgcggtttgatgtaggataaggaagaaatacaacctacattaaagtaaatccaaaggtggcaagttgcggtttgatgtaggataaggaagaaatacaactaaagccgcagcaaagaaaatggcaaggggttgcggtttgatgtaggataaggaagaaatacaacctgctgacagccgttcaggctgcccgtgagttgcggtttgatgtaggataaggaagaaatacaactttagcggacgcatacagcgtaacagatagttgcggtttgatgtaggataaggaagaaatacaacgacgagattttatcaaaaaaagtagacatggttgcggtttgatgtaggataaggaagaaatacaacaccctttgtcgtagttcaaaggctcatatagttgcggtttgatgtaggataaggaagaaatacaacaagaagctcgaaagcgtattgtatcagattgttgcggtttgatgtagggaaggaagcctaagtgtggccaagggacggccttaggccgctgccctgccgggggtgagaacttaaggatagttggatttcttgcccggagaggggagaaatttggtgaaaaattgtctgataggacgtttttcttccgttttgggtacaaaaatgtaccgtgtggcataaaaaataaagcaaaacgttggctgttttgaacaaatgctgtacttttgcaactgaaatcagtctacaaagacaagatacagacacgacatgacgacgagcaacaattggttcggcttttacttttacttttactttactactcccaagaagtgaagcggtacgtcgtgcgcaacagatgataataaacaacacagataacaataaggtcccgctccacaaaaaagagcgggacttcttttgataagaaaagaaacagacagacacggacaaatgatcaaggtagcgatacagggcatcaagggctcgtttcacgatatagcggctcacaagtacttcggacaggaggaggtggaactgatatgctgcgacacctttgagaacctctttgtggcgatgcacaaggacagcagcgtggtgggggtcatggcgatcgaaaacacgatagcgggcagcctgctccacaactatgagctcctgcgctccagtggcgcgacagtggtgggcgagcaaaagatacacatcgagcatagcctgctctgcctgccggaggacgacgaggcggatatcgtggagatcaactcccacccggtggcgctgatgcagtgtcgacagttcctcaagacgatgccgcagtgcaaggtggcggagacggaggacacggcgggcgcggcggaggctatcagccgactgagactgaggggacacgcggcgatctgctccaaggaggcagcgccaatctaccacatgaaggtgctcagagaggcgatagaggacaataagcacaactatacgcgcttcctcatcctctccgacccgtggagcgcggacgcctaccgcgacgcgagcaagagcaacaagagcagcatcgtcttcagcgtgtcgcacgagtgcggacagctgagccaggtcttgagcatcttctcattttaccatatcaatatgactaagatacagtctctgccaatcatcgggcatgagtgggagtacctcttctacgtggacttgacctatactgactatacacgctacaagcagagcatcgacgcgatacgtccactgaccaaacaactgaaaatactcggagaatatgaatcagacaatcaatagcctagccggagtcaagacgattgagccggcggcaaggctggcacaggtgggtgaatactacttcagccgcaagctcaaggaaattgcccgccgcaaccggcaaggagaacatatcattagcttggcgattgggagccccgacatgccgccttcggaggcgacgatagagacgctctgtcaggaggcgcgcaagagtgatgcccacggctatcagccgactgcgggtatcccccagctgagggaggcgatggcggactggtacaggcggtggttcggcgtagcgctcgatccagagggggagatacagccgctaatcggcagtaaggagggtatactgcacgtgacgctggcctttgccaacgtgggagaccaggtgcttgtgcccgatccgggctaccccacctacacgtcgctgagcaagatactgggctgcgaagtggtgaagtatgacctgacggcggaggacggctggcagcccgactttgacgcgctggaggcgatggacctgagccgcgtcaagatcatgtggactaactaccccaatatgcctacgggggccaacgcgcggatggagacttatgagcggctggtggattttgcccgtcgccacggcatactggtggtcaatgacaatccgtacagcttcattctcaacgaccacccgcagagcatcctccaggtgaagggcgccaaggactgctgcatcgagtttaactcgatgagcaagagccacaatatgcccggatggcgtgtcggactgctggccagcaatgcacagtttgtgagctggatactcaaggtgaagtccaatatcgacaatggcaccttccgccccctccagctcgctgccgcacgggcttaccacaacgatcccgagtggcaccaggaggctaatatacaggtgtacaggtcacgccgcgacgtggcggaggagatcatgagggcgctgggctgcacctatgacccggcgcaggtgggaatgtttctctggggccggatacccgacgactgtcccgatgtggagcagctgacggagaaggtgctcaacgaggcccacgtatttatcacaccgggcttcattttcgggcacaatggcgagcgctatatccgcatctcgctctgcgccaagcgggagcagatggtcgaggcactgcgacggatacggcaggtcttctagggagacaaaagtaaaaacaagatttcaaataataaaaaataaaataagcaacgattatggaactagatttgcaacctctcaatctccccggcattagcaacaagcgcccgttggtcatcgccggcccgtgcagcgcagagagcgaggagcagctactggagacggccaagcaactggctgcaataggcgtcaaaatatttagagccggcatatggaagccgaggaccaagccaggaggctttgagggcgtcggtgagccgggactgaagtggatgatggaggtgaagcagcagacgggcatgcttacggcgacggaggtggcgacacccaagcacgtggagcaggcgctggcagctggcatcgacatcctctggataggggcgcgcacagcggccaacccctttgccgtacaggacatcgccgatgcgctcaagggcgtggacgtgccagtgctctacaaaaacccggtcaaccctgacctcgagctctggattggcggtatggagcgtatcaatgctgcgggtatcaagcgcatggcggctatccacagaggctttaccgcctatgagaaggtgatctaccgtaacctgccgatgtggcacatccccatcgaactgagacgccgcattcccaatctgcctatcatctgtgacccgagccacatgggcggacgccgagaactgatcgcgccaatcagccagcaagcgatggacctgggatttgatggactgatcatcgagagtcactgtgagccggagaatgcctggagcgacgctaagcagcaggtgacacccgacgtgctgagctttatcctggacaaactggtaatccgcgatacgggcgagacgacggagagcctgcgtgccctccgtaagcagatagacgaactggacgacaaggtgatcgaaatcctctccaagcgtatgcgtgtgagccgcgagatcgcccgctacaagaaggaacacagcatgactattgtgcagcccaaccgctacgacgagatcatcagcaagcgcagcgcacagggcatactctgtggcatgagcggcgacttcatgaagacggtctttgaggctatccacgaggagagcgtgcgccagcaggtggagctgattaataaggaataaccgtatcacatacaaacggagaaatcgcatcagacaagaagaaaatgaaaatactggtactgggagcgggcaagatgggctccttttttgtcgacttactgagttttgaccacgaggtggcggtgtatgagaccgatgccaagcggctgcggtttatgtacaatacccagcgcttcacgagcctggacgagataaacggatttgccccggaactggtcatcaatgccgtcacgctcaatcatacgctcgacgtctattgcgaggtgacgccccacctgcctaagaattgcatactgagcgacatcgcctcggtcaagacgcatctcaaggagtactacgaccagtgcggattccgctacgtgagcacgcaccccatgtttggccccacctttgccaacctgggacagctgagccaggagaatgccatcgtcatcaacgagggggactacatgggacgggtcttctttcgcgacctctacaagcgtctggggcttaatgtcagagagtactcctttgaggagcatgacgaggttgtctcatactcgctctcgatccccttcatctcgaccttcgtcttcgctgccgtcatgaagcatcaggatgcgcccggtaccacctttaaaaggcacatggccatcgccaagggcgtgctgagcgaggaccgcaaccttctgcgggagattcttttcaacccccgtacgactgagcagttgggcaagatacaaaacgagctgcggcttctgaccgatatcatcgagcaccacgatgagaagggactcaatgactatattactcgtatcagtcagaatatcaagtaaaaaatagaacagtagaaagcctttcacctttttcttatggtagataagcaacagctgattcactttgacagcgactacttgtgtctggcccacccggccatcgtgcagcgcatggccgaggaagtgctcgtgcctcacacgggatatggatgtgacgagatctcggagcacgcgcggcagaggatcagggaagtctgtggctgcgagacggctctggttgcgtttttgacaggcgggacgcagaccaatgcggttgtaatcgacgcactgctggcctcttatcagggcgtgctgggagccgatacggcccatatcggaatgcacgaggcgggggccatcgaggcaatgggccacaaggtgattacgttgccctctcatgagggcaagatcagcgcagagacggtggacagctacatgaaggtcttttgcggagacgagagctgggaacactgcgcccagcccggcatggtgtacatcacctttcctacggaatatggctccgtctacacgctcagcgaactggaggacctgcacgccgtctgcaagcgccaccggctatggctctacctcgacggtgcacgcatcggatacggtctggcggcggctgggacggatgttacgctgaaggatatcgcatgtctgtgtgacgccttctacctcggcgggactaagtgcggggccatgtttggtgaggcggtggtcatcccccgcgcggggattgtcagccacttctttacccagatcaagcgccatggcgccttgctcgccaagggatggagctgctcgctgcaatttgatacgctcctgagcgacgacctctacttcaagattacccgctatggcgtcgagatgggacagcggttgaaggagcaactggtacagaagggctatcggctgctgcaggactcgccaaccaatctgctcttttttgtgctcgacaaccggcaactgacgctgtggagacgcttggcgacctttgacatatgggagaagcgcgctgacggaagagccatcgtgcgcctcgtgacgagctggtcgacgcgggaggaggaaatccgcgacttcgtcgcccaggtataggcgccggcccatatatcaaaaaaaaataaggaacaaaatgtctctgcctttaccaaaatgactatatttgcaagactgaatgaccgtggttatactaagaaaaagaagcaaaacaaaatagtcataaataatcataaagtaaaacgagtatgaagaagatcctattaatcgcatgcgtagctgtggctacgatgatggcgtcctgctccaaagagggggccaatctgaccaagtcgggacttaatcccgctgattttagctatgtcaccgacggagacaccaccgcactctatactctgaccaataaaaacggcatggaggtctgcgtgaccaacttcggcgcccgtatcgtcagcatcatggtgcctgacaagcagggcaagatgacggatgttgtgctgggctacgacagcatcggcaagtatatcaacaatcagagtgactttggcgccgctatcggccgctatgccaaccgcatcaacaagggacagatcacggtcgaaggcaaaaaaatccagctcccgatcaacaactacggacactgcctccacggcggccccaagggatggcaatacaaggtctacaaggctaaccaaatcaacgaccatacgctccagctgacactcaactctcctgacggcgatcagaacttccccggcaacgtcaaggcaatcgtgacctacaagctgacggacgacaatactatcgacatcaagtatgaggccactacagacaaggagacggtaatcaatatgaccaaccacagctacttcaatctcaacggcgatcctactatccccgtgaccaacgatacgctgtttgtcaacgccaaggcctttacgcctgtagacagcacctttatgacgacgggccagatcgcctcggtctacgatacaccgtttgactttattaccaagccgatgaccataggcgcccgtatcgacagcgacaaccagcagctcaagaatggacacggctacgaccacaactgggtactcaataccgcaggcgatatctcccgcatcgccgctcgcgtggtcagcccgattacgggcatcgtcctcgaggtctgcaccgaccagcccggtatccagatctatactggcaacttcctggatggcacgcaggtgggcaagaagggcatcaagtacggtcaccgcactgctatatgcctcgagactcaggtctatcccgacagccccaacaagaagggacgtccgggctggcctaacgcctatctcaagccgggtgagaaatatacccatgagacgctcttccatttctctgtggagaaatagtttgtagcccggcccgcgcaaagccgcaggccaacgcgataccaatcagcaccgtccctgtctccccatcggaggcggggacgtgttgtgtttgatgccatgctgcggcgctgagccatcaaatcgaggaccgagaggtgtcatagggataggctataaggcgagttgaggagaagtatcgggcgaagagacccttgcgtcagccgtatggaggtagtagaagcgcctatgctggggagagatgtctatttcatcgcaaagcttaatgggaaaagcggcctcgtctcgcttcgtcccgccgggtccgttggcgagaggagtcgctcatgagctgaccaggaaggcaacaacggtcgctgcaagcaacagggtctcaatgaggcatcaggcgacaaaggcgcacgatgccctcagctgcgactcagggagcaaaaatcgagggatatccttcctcgaaaggccaatgcaccgatgatgctaaatccatcataggagagagtgcaggacttttacgcatattaagggcgaaggaatagcagtttggatacgccacagatgggtgtgtggaaatccaaatgaggtaagggctgatatccgtaggcgagagcgcgggggtattgagagctgtgaggaaattttttcacttaaaccgattgccatcccactgcatgataatctcgtccttgagataaggcttcaggcg

SEQ ID NO: 4193 - DNA, 23609 bp, synthetic construct
  source 1..23609: mol_type = other DNA
  misc_feature 1..23609: note = Synthetic
ataaggatgataaccatgcttgggatgatgaaatggtcggcactgaatatcgtgaggcacagccccgagatgatcagtccggaaatactgctggtatggtctttttcccgaagccagttgtcggcgaagatagccgtaaacatggcggtcagcacgaagtccaatcctttgaggtcgaaggtgagaaacggaccgatgaggccgcccagcgttgccccaataacccaataggtttcatcgagccaggtaatccagagcaggtaccatcctttatctgttccttccggaatcttggaagcgcttgtcagggcaaaagtctcgtccgacatgccgaagataaggaagaatttcttccatcccagtcccttatatttttcgagcatcgaaagtccatagaatagatgtcgtgcattcaccatcagcaccatcagaaaggcttgcaggggatggaagctgcccagcagcatgttgccaagcaagaactctgcgcttccggcataaacagtaatggcgagcagcattgggtacagaaagttgaagcctaactcatgcatgtaaataccataagtcagtcccagaaatccatatccagccatgattggcagcgaagtatggaaagcgtgatataaagcgattcttctttttcccatctctcttaattatgtttgtagattcgtcttgcttgtaattgagaatttctcctgtttaaatttgaggactcctcctgtaaatcttctgcaaaagtactcacattttatgaggaaaagaaagaaactgccaggaatgtgaatgtggcagatgaaaaatagcatagttgtggtatgccataagtatgatacttagccatcgtaaccatgatacttagctatcgtatctatcttgtttacgccagacttaccctacccacccctaaaagggcaggtcggggacggtattctgctggggcttgctgttgtttgcaacgttctctaaataagagtgagggtgaacacttggcaatgaagtcggtgaagggtgaaccccgaagccgaaaaggtgaatactttgggcaagtgttcaccccgctgttcaccattcggtaacttaagattgaaagtacttgtttactttatgtcttatgaggctgaacatcaggctggatactgaactctgaacactgaaaatagggtaaaaatagcgttttatgaatcttttaaatcctatataacccattgatacatatttctttatattctttagcatgcgctgcttataaaaagagtgaaacgctaaagttcagcttcagccctcctcggcgacagtagtaatgtggtacgcactctcaaggtggctggccactacgcctgcagaaactatgatgatttgttggagaagggtcatacttttctttttttgagggtgagaaatataaggatgataaccatgcttgggatgatgaaatggtcggcactgaatattgtgaggcacagccccgagataatcagtccggaaatactactcatgcatataaatgccataagtcagtcccagaaatccatatccagccatgattggcagggaggtatggcaaaagtactcacattttatgaaaaaaagaaagaatcttccaggaatatgaatgtggcagatgaaaaatagcatagttgtggtatgttttggtttatgcttggttggcaaaataaaaagcggagcgtgatttcacaaccacactccgcgcaaacttaaacaaccaataaaagaaatagattgatcgttctttgttatatctgatgaagagtagctcttttagagcttttgcgttttctttttcttaaacgaaaactataacttataattaaaccagaaaattgcttattatctgatgaagagaagctcacgatacttaggcaatgtccagagctcatcggctacagtcaactccaacttatcaatctgataacggatttcctccatctttggagctaccgtgtcatgataagctatcgccttatcgtgctcattctcaatcttgttggcaaccttgcgggcattaaccaactcctcaacaccggtctcgataatctgagtgcgctcggcaatcttcttgatgatattgatgttgcgggcagtcaacttcttgccttcctcgtcaccgaagatgtcaatcatgttctccacattcttggccaactggctctgatagtgagtagccacagggatgatgtggttcatgctcaagtcgcccattacacgagcctcaatctgaatcttcttggtgtaggtctcccatttcacctcgttgcgggcttccaactcgttcttcttcatgacacccatatcctcgaacatcttgatagatgcagggtcgagataacgctcgaagatctttggacagctcttctcgcagtccagaccacgcttggctgcttcctctacccactcatctgagtaaccattaccgtcgaaacggataggcttgcaggtcttcaaatcctgacgaacgatatcgatgatggcagaagtcttatcctcacccttggcaatcaactcatccacacgcttcttgaagtcggtcaaagcctcggctacagcggtgttcaatacgatcattgcagatgcacagttagcctcagaacctacggcacggaactcgaaacggttaccggtgaaggcaaatggtgatgtacggttacggtcggtgttatcaatcatcaactctggaatctcagggatatccaacttcatgccctgcttgccagccacggtgaagagatccttcttgtcggctttctcaatgtgctcgagaaggtcggtcaactgcttgccgaggaatgaagagatgattgctggaggtgcctcgttggcgcccagacgatgagcattggtagcgctcatgatagaagccttgagcaaaccattgtgcttatatacacccatcaaagtctctgtgatgaagactacgaaacggaggttgtcctctggtgtcttgcctggaccatggagcaggatgccggtatcagtagcgagactccagttgttgtgcttacctgaaccgttgatgcctgcgaatggcttctcatggagaagtacgcggaaaccgtgatggcgagccaccttcttcatcaagctcatcaggagcatgttgtggtcaacggcaaggttggtctcctcaaagataggtgccaactcaaactggtttggtgctacctcgttgtggcgggtcttgcaaggaataccgagctcgagagcctggatttccaaatccttcatgaatgcctgaacacgctctgggatggcgccgaagtagtggtcgtccatctgctggttcttggcagaatcgtgacccatcagggtgcggcctgtcaacatcaggtcaggacgtgcagcatacaaactctcatctaccaggaagtactcctgctcccaaccgagattggaaataactttcttgacatcagggttgaagtagtggcaaacctctgtagcagctacgtttacagcgtgcaatgaacggagcaatggagccttatagtcgagagcctcacctgtataagagatgaagacagtagggatacagagtgtatcgtcgatgatgaatacaggcgatgttggatcccatgcagaataaccgcgggcctcgaaggtagagcggataccaccagaagggaaagatgaagcatcaggctcctgctgaacgagcaacttacctgaaaattcctcgatcataccacccttgccgtcatgctcgatgaaggcatcgtgcttctcggcagtaccttctgtcagtggctggaaccagtgggtgtagtgggttacgccattctcgtcagcccactgcttgatgcctttggctacggcgttggcgatattacggtcgagacgtgctccgttgtcgatgacatctaccagtttctcatagacatctgcagggagatacttgtacatcttctgtcggttgaataccttctttccgaagaattcacttggccgctcgctaggagcggttacctcaacaggctttctcttggaagcctctgaaacagcttcaaatcttaagttgctcataccttatataatttaaaatttctgattttcaatgtttttataatctgttggaacgtttattttcccagccatttagcgattctctccatagcctccttgcagtcttcgtgctcaccgaaggcggtaagacggatgtagccttcgcccgaaggaccgaagccgacacctggggtgcagactacgcttgcgccatagagcatttcctcgaagaacttccagcttggtgtatcgttaggagtcttcacccagagatatggagcattctcgccaccatatactctcagtccgagtttctgaagttccgctctcatgaagtgggcgttctccatatagtaattgatggttgccttcacctgctccttaccctcaggggtgtagatggcttcggcagcacgctggctgatatagctggtaccattgaatttggtgcactggcggcgatcccagattgggttcagtgccacttcctcaccagtcaatgtctttgccttcaactctttaggaacgatggtgtaaccacaacgcacaccggtgaatccggcagtcttggaataactgtggaattcgatggctacctttctggctccacgaatctcgtagatagaatgaggaatatctggatcggtgatgtatgcctcgtaggctgcatcatagaggatgatgctctcgttcttgatagcgtagttcacccattttctgagttcctccttcgagatgaccgtacctgttgggttatttggatagcagagataaatcatatccacacggtggtctggaatctgagggatgaagtcatcgctctcatcacatggcatgtaggttacattgctccacttgccgttctcaaagactcccgctctgccaatcatcacgttagagtcgatatatacaggataaatcgggtcggtgacgccgatgttgttatcccatctcaaaatctcctggatatttcctgtgtcgctcttggctccgtcgtttacgaacacctcgttggcatccagatgaatgccgcgaggcaggaagtcgttcttgatgatagcctcacggaggaagtcgtagcctcgttccggaccgtagcctcggaaggaagcctgtacggccatctcatccactgccttgtgcatcgccttgatgacggcagggcagaggggctgggttacatcaccgatgcccaaactgataactcgttgcttcgggtgggcaatcttgtaagcgtttaccttctttgcgatgtcggcaaacaagtaattgctagccaacttcaggaaatgttcattaactaatgccatatttttgttctcctttattgcggtctttttatcaacctttgttatttaagtttgctcttaatttataattcaatttctccttcgaagacgaaggcggcaggtcccgtcatatagacatggtcgtctgcctcgcagtattctatttccagcgttccgccatccattacgatactgctctttctaccggcacgcttggtctgggctgcggctacagctgtggcacaagctcctgttccgcaagccattgttattccgcttcccctttcccaaactcgtgtccttataatgtcagtgtctgtaatttgtgcgaactcgatgttgcatcgttgaggaaaggcttcgtctctttctagaatcttgccatagtgggcgatgtcgatggtgtcgatatcatccacaaaggttacgaaatgcggattgcccatgcagacgtaggtgccttcgaagattctgccatcggcttcgagtaccgaaggacctctgaattgctgtggattttccagtctcggcttcagcatatccactgtcaccgaatctacaaccttcttattatcctgaagatgcaatttcaatatcttgatgcccgatagcgtctccagtcggatggtttcctttcgggtcaatcctttttcataaagatactttccgatgcatcggcttgcattgccgcacatcatcgcttctgaaccatcggcattgaagatgcgcatcgaatagtcggctcttctgccatcctgtggctttccgatgagaaccagtccgtcgcttccgatgcctgtatgataagcactccaagctatggctgccttttcggggtctgggatgttgtacagctgggtatctacatagatgtagtcattacccgccccatgcatcttggtgaaatgaactgtttctttcatattgcgttgtcctttaagtttgaatactcttcttttatctctcacgtcttgcctcttgtgaggcttgactttttgatagtctttcgaatgttttcgatgactatttgtttgatttcggttgcaaaggtacgactttttgttggaatagacaagaaaaaacatacaagaaatgaagataaattttagtcttctttcaatttgtaatgaagaaaagcaggattacttacaaattgtaaggagaatacgatatgactggataaatttaaaataatcgcgaaaaagtagcaacgaaatgtttttgattgctttaaaatactgacaaaatgtattaattttgcagccgaaaacgaacataatgtaaaggatgacttgatttgagtgacaatcaaagatggtccgttttcaatagagacaatcaataaaagtagtaacacattattaattattaaaggattatgaagaagattgaggcaattatccgcaagtctagattcgaggatgtcaagaaggcacttttggctgccgacatcgagtggttctcttattataatgtaagaggtgagggaaagatgcgccaggctcgcatttatcgtggtgtgatgtacgataccagcagcatcgaacgcgtacttttgaatattgtggttcgtgataagaatgtggagccaaccatcgctgccatccagggagctgcacagactggcgaagtgggagatggtagaatcttcgtgattcctgtactggataccgtcagaatcagaacaggcgaacgaggtgatatcgcattgtataatgctgagaaagaggagtagagagacttttatataatattgtattctaatttaactataagatatatatatgagcagtttattgttgacaactcttgatacgggtaacacagcgtggatgatcatggcaaccatcttggtgctcttgatgtcaatcccaggtattgcacttttttatggcggtttggtgcgccagaagaatatcctgagcatcctgatgcagacggtattcatcgtggcagtagtcagtttgatatgggtggtcttcggatattcctgggctttctctacagaatatgcggatagcggtaactctttggcttgcatcatcggaggtttcgataagtgcttcctccacggcattggcttggatgccatcatgccaacgggtattccagagctcactttcgtgatgttccagtgcatgtttgccctcatcactccagccctgattctcggtgcattcgccgagcgtgtcaagttcagcggttatgtacttttcaccattctctgggtcatcatcgcctatctccctatggctcactgggtatggggcggtggtttcctgcagcagatgggagccatcgactttgcgggtggtaccgtggtacatatcaatgctggtgtggctgctttggtcatggcgctctgtgtcggcaagcgtgatgattatcgtgcaggtcatcctatcactcctcacaacatcaccttcgtgttcatgggaatgtcgttcctctggctgggatggttcggcttcaatgccggtagcggattggcagctgatggtctggcagccaatgccttcctggtaactcatatcgcaacagctgcagcagccaccacctggatgctcatcgactggattgtcaacaagaagccaaccacggtgggtgcttgtactggtgccgttgccggtttggttgccatcactcctgcagcaggtagtacggatattttaggtgccttctgcatcggtatcatttccaccatcgtctgcttcttcatggtagccgtagtgaaggagaagttcaagtatgatgatgccctcgatgccttcggtgtgcatggtatgggtggtatcctgggatcagtcctcaccggtgtcttcgctacaagatacgtaactggagccgagggtgtgcagggtgctctctatggcgactggcatcagctttggattcaggtggtagccaccgtggtaagcatcatctacagcatcgtagttacctatattatcttcaaggtggtagataagacagtaggtgtacgtgttgacaagcgagtagaggaggaaggtcttgacatctacgagcatggtgagagtgcttatagcaactaagatagagaatgaatatatgtataacaccttgactgtatgttttgtatggtcaaggtgttttctattataataatgtgtaaacctgattttgcctaaattcttcttgttgttttatcatttgcctgcttttttgtgttaaatcttataaacacttagttacagaatcaattctttttattatatttgtcaacaaattaaagagctgacaattatgactaataactcattttcaataagattgcgagaagcgcgcctgatgatgggactcagtatggataaactcgtagagcgaaccaacggagccatcaccaagcagagtatatcccgttatgagaaaggcatcatgcgccctaagcgtgatgccctgcaagccatagccaaagccctcaatatcagcgaggcatatttcgatggtaccaatatcaagatagatgttccgatgctccgcaccacctccaatgggaaggtatccgaagacgagttgcaagccctggaagcaaaactctctttttgggcagagcagtatcttgccaaggagaaagaagcgggttttcctacccagttcaagaatccgataaaaggcaccaaggtatcaacgctggaagatgccatccaggcatccagtcttcttcgtgaaatgtggcattgcggtgatggtcccatcgccagcatcctgagactcttggaaagaaaaggcatcatgatacttgctgctactctcccggattatgtcttcggaatgagtacctgggcagataagaagcatccgctgatgattctcgatttcaatccggaaaagagtagtgtggagaaacttcgttttacggcagctcatgagttagcccatcttcttctcctcttcccggaagacagtccgttgaaactggagaagcgctgtgatctctttgccagtttcttccttcttcccaagttgacgcttatcgaagagttgggttccaagaaacgtgagaagattacgctggaagagatgatagacatcaagaagctatatggcgcctctctcgccgcttccatcattgccgccagagattacggcatcatcaccaccgagtataaacggacatggtatgccgagcatatagagcctaatcctcgtgaaataggtaatggccactatgcatttcctgagacattgggaagggagaagagagtcaattcgatagtagattcgtgaatgttgaatgtcggtgtaaatgtcagcatttgatgatatttaaaataggaaatactaattcttaatagtgttagatatgaagcagaataataatgaacaaattgtcttcgatatgttcgaagaggttgcaaccgaaagcatcgctgaggctcggaatgcatacacctatgaagaaattgatgggtgctatcaggatgcaagggagattgctgataaggtaagggggatgttatgggaaaagatggaaggtacataaaaaacaaaactcccaccgaagcgggagtataggttttacaccttcggcaattactgccttattgtgataagatgtaggaaatcttattttctgctgcaaatataatataaaatatttgtttatccaataaaaaagttgtaattttacagaaaattaataattaagtatataaaactatactgatatgactaaaatacttggaattgataccggaactaatagtcttggatgggctatagtggaaaaacaggcagatgaatatcatttgcttgataaaggtgttaacatcttccaggaaggtgttaagatagaaaaaggcatagagtcttctaaagctgctgagcgtacagctcataaagcagcaagagtaagaaactatcgtattaaattacgtaagatacgtttgcttcgtattttaagtgatgcacatttgtgtccaccactttctaaggtagaactttctgcctggagactcaagaaggagtatcctaagaatgaattgtttatgcaatggcaaagtactgatgatgaatcagaaaagacaccatacgcttataggcataagtgtcttcatgattgtttggatttcagcagcgtaactgatagatatattctgggtcgtgctttttatcacatgattcagcgacgtggctttttaagtaatcgtaaagatcagagtgctgatgatacaggaaaggtaaaagaaagcatcagtaatcttactcaagagatgcatgatgctggttatgagtatcttggtgattatttttattctctctataataaaggagagaagattcgcaatcattatactgcgcgcaatgagcattatctggcagagtttaaggccatttgtgagaagcaggatttagataagaatcttggccctgaggtggtacgccaaatagaaaaagccattttcgaccagcgaccattaaagtcgcaaaagggacaagttggtaaatgcgtatttgagaagaacaagaccaaatgtccttcttcacatcctatgtatgaagagtttagaatgctctcttttatcaacaacataaagattcagacgccaaatgatggtgtgttacgccctctgtctccagaggagcgagcactcattatgcctttgttcttccgtaaatcaaagaagttgtttgactttgaagatatagcaaagaaattggcgccccaaaaacaatatggattttacaagaagagttctgatgctgaaatgccatatcttttcaattaccctatggatacatctgtctctagttgttctgtaactaccgctttaaaagatatctttggggatgattggattgattctctttgcgaaacctatacgctagccgagggtaaaagtcgtttgaatgtagttaatgatatttggcatgtattgtgcttctatacagacgatacaaagcttgcagagtttgcaaagaatcgtctgcaattgaatgatgaagaagcaaagaagttttgtgagatttctttgccgggtgattatgcgtctttaagtttgaaggctatctgtaagattcttccttatcttagaagaggtttgatttattctcatgccgtattcttgggtaacttatgtgaagtgatgccgcaatatgaatgggatatagaagaaatgcgtaatgcagccattgatcatattatccacgaaatgaatcagattgattctaaagatgcacgtactttcgagatgtgtattaaggagtatctgaaggaacagtatcatatatctgaagagaaacttaagaagttataccatccttctatgatggaggtatatcctagagtgcagcgcaccaacaaccatggtgtttatcagcttggttcacctcgaattgatagtgtgcgtaatccaatggctatgcgttctatgttcagattacgtaaattggtaaatcgtttgttggaagaggggaagatagattctgatactgagattcatattgaatttgctcgtgaattaaatgatgcaaataagcgtaatgctattgccgcatttacgaaagagaatcaaaataagaatgatgaggctcgcaagaaaataaaaaatttctttaaggcagaaacgggaaaagatatagagccgactgatgttgatgtcttgaaatatgtcctttgggaagagcagggacatatctgtttatatacaggtaagcagatatgcatatcagactttatagggggaaacccaaagtttgatatagagcatactattcctcgtagtgtaggtggtgacagtacaaaaatgaatttgacactttgtgatagtcgtttcaatagagatgtcaagaaaaccaagttaccaacagagttgcctaatcatgaggaaattatggcacgtattaatgactggagagaaaagtatgagtctcttgatggtcaaattcgtagacaaaagaagatgtcaaagggagcaactacgaaagatcaaaaggatgcaatcattcgtaaacggcatcttttagaattgcaacgcgattattggcgtggtaagtatttgcgtttcactatggagagtgtacctgaaggatttagtcgtcgtcaaggtactgatatcagtgtgatttctaagtatgctcgtctttacttgaaatctcttttcaagcatgtctatacagtaaaaggcattgctacttctgattttagaaaaatttggggtattcaaaaggcatatagtaagaaggaacgtgtaaaccatgttcatcattgtattgatgccatcgttattgcttgtatcggcttagatgaatataataagttgggagcatattatcatgatgaagaaaatcatgaatggtatggtatgtcaaaggcttattttaaaaagccttggtcaacatttgttgaggatattgagaaggtgcaggatgaaatattggtttatcattatacaccagacaatatgccaaaacaaggtcgacgcagaattcttattgatggaaaaagggtattatctaagggtgatgctgcaagagggtcattgcataacgatacttactatggtgctataaagaacgatggcgtagtaagatacgttaaacgtattaatttggcatcaatgaaggagagtgatgtcaaaaatttcgtagatgatgttgttagaggcattgtagaagctactatcagagagaaaggctttaaagaagctatggctggaactatttggatgaatgaagaaaagcagattccgattaaaaaagtaagatgctatacttcaataaaaaatccgttatctttcgataagaaaaagcaaagagatttgtcagataaagaatataaaagaaactattatgttaccactgatggtaattatatggttgcgttatatgtcggttctgcaaaaacaggtaagaaaaaaactttctatgaatttgtaaacatgatggaagctgctgattattataagacgagctatgataagtctgttataggacataatatagttccacttgaaaaagataattgccagttggcttttatcttaaaaaagggaactatggttattttttataaagaaactaaagaggaggtatgggattattctcaaaaagagaaagacagaaatctttattacgtatccgtgatagaatccgatggtagagtaacgtttaagtatcatcaggaagcgagacaagataaagaacttcctcgaaatgcttctgatacatcagatataaggcctaagataagagtcggtttggcttctgcaaaaatactggttcaaggctatgacttcgagattaatgaattaggtgaaattaaaagattaaaatgaaatgattaagcagacattgttcttttcaactccagtttgtctttcactcaagaattgccagattgtaatctcttggaaagatagtgatgacaagattacacgccctatagaagacatagggtgtgtagttttggaaaatcaaatgataagcattactttaccgcttctcaacgagttggtaaagaataatgttgctgttatcttatgtgataacaagatgatgccaacatctatgttgcaaagcttagatgctaatactacgcaagctgaaagtttaaaatttcagcttgctgttactgagccaatgaaaaagcaggcttggaaacaaattatagagtcaaagatagaaaatcaagctgctgtcttggctcttgctggtaagaataaagatattctgaagccttattataataatgtaaagagtggagattctgacaatagggagggattggcggcaaaggtgtattggaattgccttttcggtaactctttcaaaagagcaagagacggatgtactcctaatgctcttctaaattatggttatgccatattgcgtgcagctgtagcacgtgctttgctaggttctggtttgcttcctaatttgggcatctttcataaaagtagatataatgcttttcctttagctgatgatgtaatggagccatatcgcccatttgtagatgacatcgtttatcgactttatagcaatggatttaccgaattgaataaagaatcaaaatctgagataattcgtgtgttgaattgtgatgtcaatataggaaaggttaagcggccattacagatagctttaaccatgacaacagcctctcttgtgaaatactattcaggagaaatcaagaaactttctttacctattataacatgacagaagatagacttaatgcgtatcatataatgtggttatttgtatttttcgatttacctgttactacgaaaaaagaaatgaaggcagcttctcttttccgcaagaacttggagaaagatggtttctccatgatgcagttttctgtctatatacgtcattgtgcatcaagggaaagtttggaagtgcatataaaacgggtaaaatctttgcttccggagacaggaaaagttagtttattaagtgttactgataagcaatatggagatatttataacttctggggtaaacccaaaagtattaataagagtaaaatatcgaaaaaagttatcagtgaacctattcaattggaatttttttagtacttttgcatagaaaattataccctactcatcatttcttattagaaaaagtgattgttatgtgctggaaatcagtactttcaaatctataggttgtggtttgatgtaggagtcaaaagatatacaacctcccaaccaaaatggctgcatacaacaaagttgtggtttgatgtaggagtcaaaagatatacaacggcaagcaatattattgctattctggagaagttgtggtttgatgtaggagtcaaaagatatacaacccaaagcgttgcacgtagatcggcacaccggttgtggtttgatgtaggagtcaaaagatatacaacccatcgagcgcatcaacaccttcaatcccgttgtggtttgatgtaggagtcaaaagatatacaaccaaagaagcagctggagaacttgacactcgttgtggtttgatgtaggagtcaaaagatatacaacacggttaccgtgagtcgtaccgtctggctgttgtggtttgatgtaggagtcaaaagatatacaacagaatattcagcatccaagacttactacggttgtggtttgatgtaggagtcaaaagatatacaacaacggcaaagctgttcctactgcccaatggttgtggtttgatgtaggagtcaaaagatatacaaccaagaaggctgagacttggtatcaggcaacgttgtggtttgatgtaggagtcaaaagatatactacatcgtgctgtaatcctcaccaataggaggttgtggtttgatgtagatactaaggaattgtgtgtcacaccctgtatgggtgtgtggattgaaacacccacgctttttattgggtgattatcgctttagacacttttggatattttgggaaagtaatcaattctgtaattggtctgtgaacactggaggttgatgctgttttgtcggtgtaaattaaaagtggcggtaatagtggtggtaatgccgatgtaaatgtcggagattttacgggcggtaaaaagagatttgacggtaatgcaaatacgaatatactattagactcaaacctattgacagaaaactcgccaaactttaatttgtttgcactaattttctttatttaactccgaaattaagtggaatatcagagaaaatctataaatttgcatccaaatacaatattttgtaaagaatggaagatagagaactgttgctgaaaagtgacccagagtttgaccgcctcgcctttacggtgttggctatcgaggcttcggcacaaaaaatgggtatatcgccgtctgaaatgagaaagcgattggataaggtgggactaatcaagagtctcattcaagattgctatgacactctacataccgagagccgggaagctgtagcgaatgatgtggtcgaagctcttaaaaattgggaaagaaaagaataatggaaaagcaaatataatctcatggttcaaatgtctttgttgagtatactctccgcaagatttgcattttaagccaagagatagttgataagtatttgcaattcaaatcatatgaaagggtataattatgttggatttcttattatggaataaaatcgctcgtatcataaagcaactagccgatacgttacatatatcaaccgacagagctttacagatattctatgactctgatgtttgccgtatgttacatgacaaagaacttggcttgcatctaatgagtgatacatatattgtaaatgatttgatagaagagctgaggaataagcaataatcttcgaatgaaaagataaagcagcattagtggtatctcctttcacagaatgtggattatgttgaaaacgagagagttaagtgtgaaaggaaaaatctctttattttgaaatggtaattgatggctaagcttaaatatggcgatgtgccttgctccgatagggaatagtgagcgtcttgataatgaatagtgggtgtctttgttatgaatggtgggatgaagcatagtaactagaaggatgagggatagatattggcaggcgaaaagagacgatttattggctggatgactaagttcgtctatatggatgactcgggtcatctatatggctcactcccgtcatctatatggatgacccgggtcatccgatacaaagaagccttctctattccttttgtgatagtagctttctcctttagactaagttgccttctccttatattaatagtactttctgctgattgttattgttgtttcagagaattctcctttcacacttaagagtctgactatgagtaaactctgttgattgtgaaaggagaatgaaatttgaattattgtttttgagaagctatttcagaaggtgactttatgttgatctagttttatatccattgtttggaaggttatgttgcggtaattttatttctttatcaccttcagaacctggtcggcaaggcttctcattcccttgattgttgggtgaccgttcttcttgtctatgtcatgaagggcgatgaccggaacctgataggtcttgcagatcttttttactgactcgttgatctcatccttcagctctgagttcagaatgaagtagatatctacattcggatgacgctgacggagatcggaaagcaacttcgccagggcaggacggaaacagtagaggtcggcacgcttccagttgctgtactggtaattgccaataggggcattcgcccaactgtcgttcgttccgccgcaaatcagaatgatgtctggattgcccagcagggtagtgcggttgatgaatgaacggtcgctgtaatcctcatcccgatagccggtgttgcagatggtggaaccggaataggaattgatgttgcccatcttgtaaccaccttccttgataacctgccaccaccaggtttgctccaccttgttgacatcggttgctttttgaaccgcagtggtgtaccaggtggcatatccctttgggatgaaaccttcgaaagttgaatacgagtcgccgagcacggcaacagtctgcttcacctgtgccagcagaggcatcagggcgaagataaagaggcagacgataactgataatcttttcatgacgttttttatatagtttgattttttaatgtgatcctctctttggatagggtttgaaacccgattgcaaagatacgatattatttgtggatatacaaatttcccttaaggaaaaaataaaaacccttaaggaaaaattctcaatctcttctttccctattttttcgggtatttttgcctgattttctttcttaagaatattgtttacatagggatgatggggaagatcctcttttactaataaatgttatattcctgaaattccttccctaaatcatttgttctctcccaaatttacagtatttttgcagtaagtatctgattaaagattaaaagtgtgattcaaaataagatatagattatgcaatacaagaatatcatattcgatttaggtaatgtcttggtgaagcttaatcctgaaggatgcatcggggctttcaaggcgataggaatgggggaattggttgatacgaatcctcagagtgaggggatgaagctgatgagcaagctgggggtggggatgatcaccaccgaagaattctgtgaagcagcccgtaagttgacagagactgatgtaacgaatgaagagatcatcgatgctgccaacaagatgctggtggagattcctgatgataaaaaggagcgactcctgcagttgaagaaggctggctatcgcctcttcctcctgagtaataccattgatattcattgggattattgcgtggagcatctcttcccttatcagaactatggggtagaggattatttcgagcagtgtttcctctctcagagaatgcatctggcaaagcctaatgcccgcatctatgaggaggtaatcaggcaggcgaacatccatcccgacgaaaccctcttcatcgatgatttgaaggaaaactgtgaggctgccgagaagctgggcatccatactttccagaacgtgaagttcgatgactggcttgcacttcgattctgacggatatgtcagaatcgaagcttttattaaatgccattaggctgatttgtcaaataatactaggtaatttatcaaatggtgtcaggcatgcatagagcggaacattgatcatccaatcttgatccttatagggaagcatggagtagcggagtcccttcagttccggattgttggtgatgaatgttctgagagatttggccttgacgttcacctctgcctttacttcaatcggtataacccggtcgtgccattgggctaggaaatcaatctctattgtggagttatccacagcatgatagtataatgaaatatcctggctcttcaactgggtgaagacatataattccgtgaaggctcctttatattcagagaaaatgccatctcctaccaacatcgattctgctgaagtctctgccatcgctcccatcagtcccacatcgagcatgaagagtttgaaggcgttcaggtcttcatagaatttgaaagggaggcgtggggtattgactctctgaaccttatatgccagtcctgcatctatcagccattggatggccagttcgaaatctgcggctctggcacttttcttcacggctccatagataaacttcttgttctctttggcaagttgggcagggatactgtcccacaccatattaatgcgaggcacttctctatctggtgcgtgcttcgagaaatctcggcgatagtcttgtataatctgcttttggatggaacggacttcctgcagtcccttctgctctacatgggcgagtacggcggctggcattcctcctacataataatattgtcgcagcaggctgatcaattctgtttccagtaaattgatgacgttccaatttccttctttcaagatgcttgccagtttcgcttttcccatggcatcgaggaattcgatgaagttcatcgggtagaggcgcagctcttctacttttcctactggatatgacaccccgctatggagtgatattcccaacagggatcctgccacgatgatatgaatatcaggagcatcctcgcaaaagaactttaaagcttctaatgctttgggacaatcctgtatctcatcgagtaccataagggtatcgttgggggtaatatctacctggctgatggcggagagtgccatcagtatatcagcagttgtgcctcctttttcaaacacttctgctgccttctgatttctgtcgagactgaagaatgcaagctttttatattctctttttccgaattcttgcaggatataggtcttgcctacttgtcttgctccgttgagaatcagaggtttatgatttcgcttgttcttccattcaacgagtttattatagatgcttctttccatgatttacactttttatgatgaataatcgtataaacttcacattttttctaacgaatatctgtagattctcacactttttctgacgaatacatggaagttttttacactttttctaatgaataacggaacaaagatacactttttctaatgaataaccaaggaaaaggctgactttttctctttttctattaaaacttaatatttgttatacattgaggataattcgctttttccaataaaatgttatacctttgccaactcataataactaacatacaatatcaaaatgaatttttacaagacattaggactgaaaaacagccgtattgatgtggctgatgccttgcgaggattggccgtagcaggtattattctctatcactccgtggagcatttcaatatgtacgatggaagcatagcgcatgcttatacgctgggttgtgatgattggatggcagatgtgctggctttgctgttgtcgggaaagatgtatggcatctttgccctgctcttcggattgagcttctttatcatgaatgataatcagcagcagcgtggaaattgcttttcgggtagattcgcctggcgaatgttcctcctggcaatgctcggtatcgtgaacacagccttcttcgatggagacatcctcttctcctatgccatctatggactggttctcatcccattgagttatcttcctaccaaatggctctggtgggtggttgccttcctctttatccaaccgatagaaatctattccctcatttcgggatggcaggtagatgcgtcgtcgttgagagaggtgtatggaaatatgtataatggtcatcagcacggcagtttcctggagaatgcctatggcaacctgcgatacggacaggtggctacttattactggtgcatgatgaagggaagacatacgcagaccatctgcctcttcatactcggaatgctggtgggtagaaagcgttggttctacaatgagaacaacaacctggctttgtggaagaaggtgttggcggtttccatactggtattgattgtgggaggcatagctgatgtgcgccacatggaaacatggaacaattggctttatcctatctacaacttcttcattctctcgttcgtagtttcaggcttcgtactgttgtggtatggtaaggaatggttcagaaagggattgtcgttcctgcgccagtttggcaagatgagtctgaccaactatttcctccagtctatcatcggttgcggactgtttgcttattatggcttcaatctccagacgaagctcggcatcacctatgccttctttgtgggtattgccatggtggtagtacaatgcctcttctccaacctctggctcaagtatcattcccatggtcctttcgagggaatatggaagaagctgacctggattaagttctaaaactttttagattttgagataaaaaaaggtgtgtcataactccatgacacaccttttttataaaaaatgccctcctgtctttcggcagaagggcacaaactaattattctcgtacaattagttttgtcaaatgaatagttgatataggttagagtatgaatgaagatctatattattatatatcaacttgagtatgccgatggaaggcttagagtggaatgtactccacaaatgcttccatagcctcgtagcaagccagacctaactcatcatagagctgggcggtgccacggttgcggtcttctgcacgctgccagaagagacgctcatcgttacccaggaatggagcactctccatctgtgactggtgcttgaggatagagttacgctttgctctcaactcctcaggactcaatggaacacacatctcgatgttctcaatctcccattctgcccaagcgccacggtacatccagatgcggcagtccttcaaccactctgcgccagccttcttctcctcgtcgatggctgcgagaacagcgtcggtacacttcttgtgagttccgtgagggtcagccaagtcaccagcaacataaatctgatgaggcttcacctcctggagcaatgctctaacgatctcaacgtccttctctgtcataggcaacttctcaatcttgccgctctcatagaatggcaagtcaaggaagtgaacgcggttcaaaggaatctcgttgaatgtacaagctgtacgagcctcgccacgacgaatcagacccttgatggtcagaatgtcacgggtatcgaaatcgctctccttcttgtgtgcgaagaactccttgatttcctgatatttcttagagatcacgctatccttggagtctgcgaagatctggttgaaaccattgatgaagtgcatgaatcttgtaacctcctcgtcgcctactgcgatgttaccggatgtctcgtaagctacatgtacctcgtgcttctgctgtaccaatcggcggatagtaccacccatagagatcacgtcatcgtctggatgtggagagaatacgatcactctcttagggaatggtttcgcacgctcaggacgataggtgtcgtcagcatttggcttaccgcctggccagcctgtgatggtatgctgcaagtcgttgaagatcttgatgtttgcattgtatgctgagccatagagagccaggagctcactcagaccattctcgttgtagtccttgttggtcaacttcaggataggcttgtgcaatttctggcagagccataccaatgcactgcgtaccagcttgtctgtccactcgcagtttgttacgagccaaggatgcttgatacgtgtcaggtgtgaagctgcgctcaggtcaagaataacgtttgcattaggatgagtctggaggaagctggctggcaatgtgtcagtgatgtttccttctactaccttctgcatgatttctgccttctcgtcgccccatgctgtgaggtaaacactcttggcagagagcagggtagcgatacccatggtgagagagcaaggaggaacctgctcgttggtgccgaagctgttctccatttcctcgcgggaagtattgccgatgaggatcagacgggtgatagactggataccagagcctggctcgttggcagcgatattacccattcttccgataccgaggagagcgatgtcgagaccgccgaaggtcttgatgcgcttctcgtagaggtgacaggtatcctgcactgcgtcctgtgccacactgccatccaatgtgaagatgttctgtggatcgatgtcaacatggtcgaggaagcgctccttcaactggttgatgctcttcagagaactttccttctgtactggatagtactcgtaagcattgaatactaccacgtttctgaaactgagctgcttag

SEQ ID NO: 4194 - DNA, 23609 bp, synthetic construct
  misc_feature 1..23609: note = Synthetic
  source 1..23609: mol_type = other DNA
ttcttcaggttgctggctgtggttccgccgccaatgttgcaccactcgccgatgacggcatcacccaggaaaccgtcatgtgccttgttgctgtagccgataaagacggtattctcgacctcaccgccgatcttgacatgcggtccgagcgtagtcgctccatagaccttggcaccgatgcgaaccttggcgtcatggcaagcagcgaagccgccacggatgcaggcgccttccatcacttcgacatcgcggccgatgtagatgggaccaccattggtgttaagcattgcgccctcgatataggcaccctgctcaacgaagatgcgagatggatcgccgatgacggtattggtcgctgataacggctgtgactctcgcccagcagtaatgcgggcaaagtcctgttccagaaccacgccgttgaactcaaagatgtcatacaagtgacggatgatgagcgggatatccttcgcgaagtgcacgcgtgtgtagtgacgggcatcatagtcatgagccgtgccgttaaaggcgatgagctcttcgcccaccatcaaggcctcgccttcctgtaaggacaggacctgctgcgcgagttcgggcgtaggaatgacgtgtcccgcaatcatcagattggtggagcggcgtacgtgcaacgggaacttcttcttgaggtaaggcactgtgagatagctgtatgtggcttcgccaagcatcgcctgccatttctcgctgatggtggtgatgcccaagcgcaacatggcagtgggacgagtataggtaaacggcatcaggtgcttgcgaacctcgttgtcgtcaaagaggatgacattgcgtgcggtcttcttcatagcttttttcgcttcttgttgttaacgggcagcaaaagtacgtgtttttcttgaataatgttgcatcggcagtcaaaaatggttaactttgccccatatttcatcaaatcaactactggaaatgacttttattgaacaggatatcaagggcgtatgggtgatagaacccaaacggttcggtgacaagcggggatacttcagcgaggtgttcaagcaagctgagtttgatgctcacgttggacatgtcgattttgtgcaggacaacgagtctttctcgaccaagggcgtgttgagaggactgcatttccaacgtggcgagtggagccaagcaaagttggtgcgcgtctctcaaggctgtgtccttgacgtggcggtggacctgcgacacggcagccccacttggggccagcatgttgccattgaactcagcgctgatacaggtcgccaattgtttattcctcgtggctttgcccacggttttgtggtgctcagcgatgtcgcccagttccagtataaggtagataatatctacgccccacagagtgaggcgaccttgcgcttcaacgatcctgccctaggcattgattggcgcatcactcccgatgaaatgatcctgagtgataaggatttaaaaggacgccctcttgacgagatgacccccgatttcctgggattttaaaggattttggcccatttagaggcgcaaaagaatccatataacataacaacgtgggcaacagcatgatcgctgttgcccacgttagtgaatgataattgtccgtttagttcttgaagatgagctgatcgtcctgtgcgtcgatgatgataggacgctcacggttgaccttcatagcgatgatatccttgctcaactggttaagtaccaggttctggatggctcgcttaacgggtcgtgcaccgaactcagggtcatatccagccttgcctaacagccggatagcttcatcggtagcctcaagggtaatgccgttcttgtccaacatcttcttgacacccttgagctgcatcttgacaatctggcggatctgctcctcgtcgagcggcgtgaacatgatgatctcgtcgatacggttgaggaattcaggacggatcgtctgtttcagcatgcccataacgtcatcacgagtcttgccgatgatttcttcacgattgacgtctgtcagatgctcgaagcgttcgcgaatcaggctggagcccaggttgctcgtcatgatgatgatggtgttcttgaagttcacggtgcgacctttgttatcggtcaaacgtccgtcatcaagcacttgcagcaagacgttaaacacgtcaggattggctttctcgatctcgtcaaacaagacgactgaatacggcttacgccttacggcttcggtcaattgaccaccctcatcgtaacccacgtagccaggaggcgaaccgatgagcctggtcacagagaatttctcctgatactcgctcatgtcaatgcgggtcatcatgttctcatcattgaacatgtaatctgcaagggccttagccaactcagtcttgccgacacctgtagtgcccaggaagatgaatgagccgatggggcgtctgggatcgttaagtccggcacgactgcggcgtacggcatcgctgatggccttaatggcatcgtcctggcctacgacacgcttgtggagttcctcctcaagatgaaggagtttctctttctcgctctgcagcatcttggttacaggaatacctgtccagcgggatacaatatcggcaatgtcgtcgctatcgacttcctctttgatgagagccttgtcgccctgcatgtcacgcaagcgttcctggttctggcggttttcgtcttccttctgcttgatgagcgagtagcgtatctcggcaactcgaccgtagtcaccgttgcgttcggcgcgttctgcctcaaagttgagttgctcgatgtcaatcttattttgctgaatcctgttgatcaactccttttcactcttccatttggcattataatcactctcacggtccttaagttccgcaatctgcttatccaaatctgcgatacgaacctcatctccgtcacgtttgatggcggcacgctcgatttcaagctgcgaaatcttgcgggaaatctcatcaagtccctggggcacactgtccatctcaatgcgcagcttggctgcggcttcatcgatcaggtcaatggctttatcgggcaggaaacggtcgctgatgtaacgctgactcagctgtacggcagcaatgatagcgtcatccttgatacgcaccttgtggtggttctcatacttttctttcaaaccacgcaggatggcgatactgctttcctcgtcaggctcatcgaccataacaatctggaaacggcgttccagggccttatccttctcaaagtacttctgatactcatcaagggtggtggctccgatactgcgcaggtcgccacgggccaaagcgggcttcaggatgttagcggcatccatggcaccgctgctcttgccagcaccgacgagggtgtgaatctcatcgatgaaaaggatgatctcaccattagcctgagtgatctcattaatgaccgatttgaggcgttcctcaaattcgccctgatacttagcgcctgcaatcaaggcgcccatatcgagagagaaaacttgtttcatcttcaggttctcgggtacatctccacgcacgatacgttgggctaatccttcgacgatagccgtctttcccgtacccggttctccaatcaggatggggttgtttttggtgcggcggctcagaatctgcaacacgcgacggatctcgtcgtcacgtccgataacggggtcgagcttgccttggcgtgctcgctcattaaggttgacggcatacttgctcagggcattatactgctcttcggcactttgtgaagttgcattcttgcccttgcgaagttcgtcaatggcggctttgagatcatcacgggtcatgccggcatccttaaggatggtcgatgcggttgacttgacctcaaacaatgccattaacatggcctcaacagtaacatactggtcgccgttcttgctggcaatgtcgttggctttgtcgagaacttggcttgcgccattgctcaggtatggctctccgccgctcacatgcggcagtttctgcaatacggcctccaatggccgctcaacattcatgaggctgatgtccaacttctggaagatgaagcgcactacggtatcaccctcagcaataatggccttgagcaagtgctcaggctcaatagcttgatgaccattggtgcgagtcagttgaactgccttctggacaacctcttgtgctttgatagtaaaattgttgaaattcatattattgtgtctcctttcattctctgtttgaaatgctttttacacataacatgacatcaacacttgtgccaaagataagaaaactgacaaaatgtcagcaacgaaaaacggctcatcttttggatgaaccgttatctcttgtcaactgtagtggtaggctatttctttgccagtacagtgataaatgtaatgagcgacatggcagtacccatcatgctgataccaaatgagaacaatggaccagcactccaaatgctgcgtttcttgtatttgttaggctcaacgtagagaatgtcgttctgttgcaattggaactcttgagaggccaaaaatctagcatcattcaagttgaagcgttttacggttcgttggccattattgtcagttctaattaacaacacgttgtcatgaaggccgctggctgcaacatcaccgctcatagcaatcgcttcaattagattaagacgtccgttttcagcatgaacaactcctgcatgaccgaaatcaccaatgaggaatactctgaaattctgaatacggcactctacattgggtttttctgtgaggtatttgggatatatcaggttggcaatatagtcctccagttccagtttggtcatgccaataatgtgaattctgccaatcacagggaaatcgatattgccattgtcatcaacaagatagaaaacggtagaacgatcacccacattatagcttgagctaccgagagtgctgatgtattgaaccttgttgaacggtttcacggcgtcctcgttggatcctgacacattaatgtgcaacatgtcaccaggtctaatggtgaagtcaccggccttaaccttggcggcagcaagttccgctgaaggaatctcatcgatgttggtcatgtaggcaatgttctcgctgggattgcacgctgcaagaacgagcgagatgattgcaagtagaaatagattacggatattcatattctttatatttttgattttgtattctaaactgcaaagttagtaaaaaatgcaatattgggtacttttttcaggaaaaacatctttctattatcattttttcgctatttttgctgacatgaacaatcatcaaccacacattgaacggcatccctggccgccctatatccccagcggtgctagataccttttcctgggcacgttcccgccgaaggaggaacgctggtccatgccttttttctaccctaacaagatcaatgacttctggcgggtaatgggtcttatttttcatcaggataaggactatttctggaataatgatgcccgatgttttgacctcccggccatcaaggcgatgcttgaccgcgaaggtatcgccctgtgggacacggcgatggccgttcgtcggcttaaggataacgccagcgacaagttccttgagattgtcgagcccattgacttagagtcgcttctggatcaacacccttcaatcatgaccgtgattactaccggcgagaaggcctctggagtcattgccgcccaggctggtattgaggttccggcgattggcattcctgtagaggttcaagtcggttgccatcacatcactttctggcggatgccctctacctctcgggcctatccgttgccgcttgagaagaaggctgcagcctatagcaagcttttcggcaaatagcccttaccgcttttgttaataacttttttggcgatttttaaggtcaaatattttgccgtggagttgaaactgtgtacttttgtatgatgttttcgataattgaacatatagagtacttgatgacgcgccacgattgtgtggttattcccggatggggcgcgtttatcgccaactatggcgttgctggctatgacgaggactctgaggtgatggggcgtccccaacgcttgattaccttcaactccagcgtttcacacaacgacgggttgattgctcagtcaatcgtccgtcgcgagggcttggattataacgaggctatgcgattcatagccgatagcgttactgcattccgccagcaactgtcaggaggcaatgaggtttccatgggtcgcttgggctatttcagggcttgtggcgacgctcgcatggagtttgtgcctttccagaacgaatatgcttgcgacggcttctatggactgtcggatatggaactcaagacggtatcagtccttgagcaagagcttgctgatcaggaggctgcccgcacggctatcgttcctcataagcccaacctgttcagccgcaaggctgcccagattgcggcatcggtcgctgtgctgataggtctcggcgtcttgctctccacccccattattgtggaccgcaaccatggaatggcaggtatggctcccgaagtcaccgcgccgcagtcccagcagttgggcgtatctgtccagcagggcgttgtggcacagcctgttgaggtggtggacaatcatcccggtattgctgccgtgggcaactcctcgggtaaatattacatggtcatcgcgaccctgcgcaatcagcaggagttggatagcttcaaggcaaagtatgctgcccttgttccttatatgaagttgctggaatacaagggatatacctgtgtgtatgtcgctcgcagcgacgattacggcacgttaatggaccttcgtggtgaactgcctgagcgcctgcgtgacgtctggatctacaactgatgccggcaacatcaggcaagtgtagcacttgccgctgagcatcagcaacaacgcatcatcttttcctatgatatcgcgcacgtcatcccaaccgatgacgtgcgttttcattcgctcatcggtgaagctcagggtgatgccttgctcatcgacggttacggtcttttccatgatggaccaccgtgcctcgggcgagaggccgtagtagaagtagagcagcgccagcaccatgggcagggcgataaagagcaccatcatcgcaacgatgacaaagcgcacgtcgatccatatcgccagcacggcgcacagggcgacaggtgccaccagccacaaccagttgtcggcgatgaacatggtgcacaggtgtcgcatgtaggcgctcgacgagacgctacaatcttggatggtgaaatctccttccacgttcattccttgttggtgaaggtgtgtcatcattcgcttctgaattcttaatcggctttacacccgagaacctttaactcggcgaagccaatggtgacacatcctcccgatgggtcatttcttatttttgccctttttggtcttattgtagagggcgcggcggcgggcaatctcctcatagccgcgcttataggcctggcggtttttcagggtgagggtctggcagtagccggttccctcgttgttgtagagtttggagaggttcaggtactgcttgccgttgccgcgaacgacggggaagacctcctgcttgcgtttgttcaccttgtcgcattgcaccgagtggttctcggcagtggtgcccgtcagctcgggggctacaccgtcctcgccgacccacacgggatagacctcggcacaggggggatagcccaaggcgatccacatcgtcgtcaggcgaggattctcaccggggatgatgccctcgatgaccacgctcgccgtcgagatgcggcgcgggatgaagtcctgatccacaatccacgtgtccccgctgcgggtgtagtccttgccaatcagcgagttgtagaatgtgcgggatagttcctcggtgaataccgccggggtgatgtcctgattgatgatatggggctcgagcaggtgtttctcgttcttctcgcgcacgtagcccatgcccttgtccttctcgccgctataggaatagttggtgcgcatgaggatgccgctagtcgcatcgtcgaggtcaaacttcacatatttaaagttgccggtctcgaagtaggccccattgccctgggcatcgatgacgccgaagttggcctccacgccgaggggtttgggcagggtcttcaacaggttctcaaagtcgtccaccgtcttgcagcgttccagagcatagcgcatcagttcgccctcacggtccatgttcttcacgccgtcgttgccgttcaggttgtaggacgccgtgttcatgatggcgaagccggcttcgttgaagcccatccacgctgccgtgtcctgcaggtcgcgcgcgtcaaacagggcgacaaactccatcaggccgtcgtgcgccaagatgcgctccacgcggttgttcaggtcgttggtatcgcggtttttccacatcagtggccgcccgttggcagtcagttttccgctcacgatggccgacgtgcaggcgtcagccgcaacaatcacacccagcactgccaccagggcaatcaataatctctttttcatgtctttgtctagtttttgtgtactttgggtacaaaaataaaaagaatttttcaaatacattacttataaggggtaaatctattaagaaaaacccttatcgagcgggcggggatagggggttgataggatagggataggacttgatagggtctcatgagatcttataggctcctatcatctcctatcatctcctatcatctcctattatcccctatcatgtcccatcatcccctatctcccctgccaggtgcaggagtcttgctaattcttgttccctgatggtcagctcctgctcgcgggcggtcaaggctgcctcgcgggcggcgagttgttgttctcgggcggtgagttcggcttcacagcgcgagagggctgtggtggtagctgcgggttgctgctgcgggtgctctcggcggtaggcgaggcggccgcgggtcatttcttcgcggataccgccttgctcgaggaaggcctgcttgtgatactcgatgaggttccggagcatgacgtcggtctggcagatgagggtgatggcaatattgcagatcatctcatcggtgcagttgggcaggatggtgttgtagtattcgcggtcgttgtgttcgcggcaacgctgacgcgtgtggcggtagcggcggtcggtggatttccactgctccaggttgtggtgggccaggtagtccttgtagtcctcgagcaactcttggtggctggctttggcgacgttgagcagtttgatttcggtctctttgctggtggcagaggcggcagtgccctcgacgatattctgtttgccgctgcgagcggcttgcaccatctggtcaacggtacggtcgcgatggcggtccaagaaggttttgcagaagtagtccgtcacatcgcagatgcactccgacttcttatagaccatcagggcctcgtattgcccgtcttggggcaagaaatcacgattcagctttgccatttggtaataatcaggtgtgaatgatgagttgttgtggttaatcatgcaaagttactgtgttttttgttgcattgcaaaaaatgccccaccttttggcgtaactcaatgagttcggcctacttcctatgagatagggctcgagccccccaaggaattccctataaagcccccatcactccccatcccctcctataaaaccctatccccctttatctcctcctataaaaccctatctcctcctatcaccccctataacccctcatctcaacaattcttactagaataaaaaaactcccaccgaagcgggagtataggttttacccttcggccatgatggccttattgtgataagatgtaggaatcttatgggtgcaaaattacaatgtttttttgtaacctcaaagaattatcgtaattttaccgaataataacaataataattaagatatggaaagaatactaggaatagatactggtaccaatagtcttggttgggctattattgaaaagaacgacaagggtgaaacccgactgttgcacaagggtactaatatctttaccgaaggggtaaagatagaaaaaggaatagagttgtccaaggcggcagagcgaacaactcaccgtgctttacgcaggcaatactggcgccgtaaggtgagaaagattcgcctgttaactgtgcttgtagagaatcgcttgtgtcctcctgtggattcgagacaattgagagattggagactaaaaaagatttacccacacgacgaggagttcttggcatggcagctcactgaggataagaataatgtcaatccataccagttcaggcacatttgcttgacacagaaattggatttaaacaaccttacacaacgttacatcttggggcgtgcgctttaccacatcaatcagcgacgtggttttttgagcaaccgcaaggaaacgacaaaagcatccgatggtgccgtcagtgagggtatcagcaaactgactgccgagatgaaccaggctggttgccaatacttgggggaatacttttatcaactctatcaatctggtcagaagattagagggcattataccgcacgcaatgagcattaccttaatgagttttatgctatttgtgaaaaacagcagttgcccgaggacttggtgaagaaacttgaaagagccattttctttcagcgtccgctgaaatctcagaaagggactgtcggaacatgtacttttgagaaaggcaaggcaagatgcccggcatcacatcccttgtatgaggaattccgactttacagttttttgaacaacatcaaaatcaagacgccccaagacgcacagttgcgctatctgaacggtgatgaaaaagcgaccgttttacctttgttcaagaaatatcgcaagagcaagcatacctttaattttgaggagatagccaagaaactcgctggaaagaataaatacatgtatttccgtgacaaggatgataaaccttttcagttcaactatcaaatggatacacctgtccccatcagcatcgtaactgcacaacttgaaggcatctttggtgataattggctggagggcgtttgtgaggtttatacattggccgatggcaagactcctttccagataatgaatgatgtgtggcacgctttgttcttttatgatgacagtgagaaactgaaagactttgcaataaatcgattgcaacttaacgaggaagacgctgagaggtttgccagtatctcaatgcccaatgattatgcttcgcttagtcttaaagctatccgaaagattctcccgttcctcaaggactatggcctcatctactcccttgccgtctttatggcaaacttggatgcagtgttaccagcgcatttcatgatacacgaggatgagcaccagaaagccatcaacgaggctgttgacgttctcttggcctacgatagcaagaatgatgaccgtccacttgagctctatttcaaggattacttgatgtacagatatgaagagtatggtttgtgttctgaagaattacagaaactttatcacccatcaatgctggagcagtacccacgtgttttgcccaataaggatggcatttatcagttgggatctccacgcatcagcagcgtgaggaatccgatggcaatgcgttcgatgttccgtctgcgcaaggtggtaaatctgctacttgctaagggctatattgacgagaacaccaaggtacatattgaattctcaagagatctcaatgacgccaatcgtcgatgggcaattcagcagtggcaacgccagcaagagaaaaacagagaggaaatcagaaagaggattcaggaagatgcacacatcgagaatccaaccgatactgacatcctgaagtatcaattatgggaagaacagaatcatatctgtatttactcaggcaatcaaatcggaatctcagatttcctgtgctccaatcccaaatatgatatcgagcacacggtcccccagagcgcgggtggtgatagcaccaagatgaacttgacattatgtgagagcgggtataaccgcaaaacaaagaagactaaactgccttcagaattgcccgatcatgaagagatgctgcagcgcattgaacactggaatgagcgcgctgaagacttgagcaagcgaatccgcaaactcaaaggcagcagggcgacgacaaaagatgaaaaagatagcatcatccgtcgtcggcacctgttggcacttgaacgcgattactggagaggaaaatacctgcgttttatgatgactgaagtacccgagggcttttctcgccgtcaaggcacggatatcagtgtcatatcccgctatgctcgcttgtttctcaagtcggttttcaagcatgtatatatcgtcaagggtattgccacatccgatttcaggaagatgtggggtattcaggaggaatatacagccaaggagcgtgtcaaccatgtccaccactgcattgatgccatcaccattgcctgtattgacaagacgcagtatgataaattggcgcaattctatcatgatgaggacaactatcgtcaaggaaagggtaagaagccgcaatttgagaaaccctggcccacgtttgttgccgatatgaaacatattcaggatgaactcttgattgcgcattacaccaaggacaatatgcccaagcatacgagaaagagaagtggtgatgtttttttgcaaggtgacacagctcgaggttcactccataacgacacctattatggtgccattgagcatgatggcgatatcagatatgttgtccgcaagagcctagatatgctcgatgccaaagacgttgacaagattgttgatgaagaagtgaaaagcaaagtcaaagaggcaatagcaacccatggtagcctcaaggcggctgtcgaagcaactatctggatgaatgagggaaagcaaatccccattaagaaggtgaggatatttgccaactctgtgacaaggcccatcaacatcaggaaacatcgtgacaagtctcggcatgaatacaagcagcaattccatgtgcagaatgaccgtaactatatgatggctatctatgccggcctggatgaacatggcagggaaagaagtgtatgtgaacttgttagtaacattgctgcagccaaattttatcgcaggagtattcatggtgcttttgaaaatcaggatattgtccctgataccaagaacggatatcaacttaagtatcaattaaaaattggtacaatggtgctattatttgagagtaatcctgatgaattgtggcatctggataaacaggacttgcaaaaacgcctctataaagtgataggcttaaactcgtttcaatctggtacaagtgtttatggccgtatctcattggtccatcatcaagatgcgagaccaagtggtttgattaaactcaagaatggtgcttttagttcatctgaagaattccgatccggtattttgttgcttcatggtcagttcaaagcacttgttgaaggtgttgattttgaattaaatgatttgggtgaaattagtagattaagatgataaagcaaacattgatgttcacgtcaccagttgcactatcggttaagtataggcaactggtggtgaactcaagggagggtgcatgctaaacgggtgaaaatatttgtcacggttgagggaaaggtcagcgtcctaagtgtgaccgataaacaatatggagatatcgtcaatttctgggggaagaaagaaaagaacaaaaaagctatttctggacctgtccaattagaaattatttggtaattttgtaacaaatactgcatctatcgccacttcttaagccagttttattgcgtattttgctgtgaatgagataaatatttgacttaggttgtggtttgatgtaggaacaatagaagatacaacacaaagacgcgctcgccgctgccgtcaacgttgtggtttgatgtaggaacaatagaagatacaacatgtgcgtgatacactctctgcggtggtcggttgtggtttgatgtaggaacaatagaagatacaaccttccaaactgaacaaggggggcaagagcgttgtggtttgatgtaggaacaatagaagatacaacgtaagattatgccaaactatttctcacacgttgtggtttgatgtaggaacaatagaagatacaacgcagctcagttgctatgccgtgatgttcggttgtggtttgatgtaggaacaatagaagatacaaccagaggtgggagacgcaaaattttgcgtctctacttctttgattcttagcgtttagcgaacgagtgtaagttccatggaatcagatgcccccaattcctcaaaacgtagctttttacccttgtcaacgcttagccgtcccattacctttgccgaataaatgatcaaccaaatttttttaaagctatgaagacattaaacaacatccagcccccaagatttaacctatcccatgttatcccccaccaacaacctataaatcaatgaattgtaaaaacattaacattattttaacacttcccccccaaaattttttatttcaaacacacactccccatcgctccccatcccctcctataaaaccctatctcctcctatcaccccctatacccccctataaccccttatctcaacaattctctctgatatctattctctattatctaaaatagtattacctttgcggcgtgattcaatgagtttggggtgctccctgggagatgggggctgagaacatacccatgggatctgatccggacaatgccggcgtagagaacatttattgattcaagtttcgcaaccgcttgcgaaacttgaggtttagggtttagagtttagggtttagtggcgaagcgcctttaaacattaacctttaaccattaaactttgagtgggagcaacagggttgcgggacttgggaaaacgaattattgcatgaagaagacttttttgacggctgccacggtggtggcaggccttgttgcggtggcgcagcctgccgcgaccgacacggtgcctaccgtcgcactcagcgaggtggaggtgctgggtacccgtgcgagtgctagcactcctgtagcgtttactaacctgaccggcaagcagttggctgccgagaaccatggcctggacattccgctcctgctgacgatgaccccgagcgtgatcacgacgagcgacgcgggtgcgggtgtgggctacacgtcgatgcgcgtgcgtggcactgatgccacccgcatcaacatcaccgtgaacgatattccgatgaacgatgccgagagtcacagcatctactgggtgaacacgccggactttgcgtcatcggtgcgcgacatccaggtgcagcgtggtgcgggtacctcgaccaacggctcgggcgccttcggtggcagcgtgaacatgaggacccagggattctcacgcgatccctatgccgaggtgtcgggcagctatggctcgtacaacaccaacaaggagaccctgcgcgtgggaacgggcctgctgggcgaccactgggccatcgagtcgcgcctgtcgcacatcggcagcgacggctaccgtgaccgtgcgagcagcgagttacttagctacttcggccaactgggctacttcaacgccgggacctcgttgcgtttcatcacctttggcggcaaggaagatacctatcatgcctgggacggcatcagccgcgacgacctgaaggaacgccgcacctataaccccaatggcgagattaagcacgacggcaaagtgacgggcttctataaggaccagaaggacatctatcgccagacccactaccagctcatctggaaccagacgttcaatcccctgtggaaactcaatgtggcgctgcactataccaatggcttcggctactaccaggagtacaagaacgcccgtacgctcaaggagtacggcttgctgcccgtggtgactgccgagggaaccagcaagaaggcgagcctggtgaggaagaaatgtgtggatagcaacttcggcggcggtgtcttctcgctgcagtataccggcgaacgcctggctgccacgctgggcggcggcatcaaccgctacagcaacgaccactacggccaggtcatctgggtcgagaactacaccagcccgctggctcccgaccacgagtactaccgcaacaacggccgcaagaccgacatcaacatctatatcaagggtaactatgtgattaccgcaggcttgagcgcctatgccgacctgcagtatcgccacatcggctaccgcatcacgggcaacaatgacaagtgggactggaccgccgatcccgaacgcctgcaggcccttgacatcaacgagccgttcaacttcttcaaccccaaggctggtctcaactggcagattaacaagaagaaccgcgtgtatgcctcgtttgccgttgcccagaaggagccgacgcgcaacaactacaccgacggtctcttcctcgagcatcccacgagcgagaaactctatgactgggaagccggttacgagttccgcactgaccgttacctgttgagcgccaacctgtattacatgaactacaaggaccagcttgtgctcaacggcaagatcaacgagattggcgagctgatggccgagaacgtggacaagagttaccgcatgggtatcgagttgctggcaggcatgcagtttaccgactggctgcgctgggaggtgaacgccacgctgagccgcaaccgcatccaggactatgtgggctacgtgagcgactatgacgccgacacctgggacgacatgtggacgcagaccgccatcgagaagggcaacaccaccatcgccttctcgcccagcctgaccgtgggcagcatgctgatgtttgaatacaagggcatcaccgccaacctgcagtcgcagtatgtgtcgcgccagtacctcgacaactttgagcgcaaggaggactcgctggatccctacttcgtcaacaacctggacttgggctataccttcaagttgccgcacatccgcagcatcaccgtgggtgctaccgcctataacctgttcaacgtgaagtatgagaccaacggctactcccagacctgcgccctgtatcccggcggcagcaaggaggggaagtatgacctgtacagcgatccgcgcttctatcccatggcaggcatcaatgtgctggggcatgtgacgtttagattttagaccctagactttagatattagatattagggaaagtcgccgagaacggcgacttttttgttctagggggtgtgaaattgactttgatttttggactggctggaggatggtaaaattatggtttacagtagattgattagttttgagggttagattttttgcttgatggctgtgggggtatattaattatgtgtacctttgtgaaaaatcatcaaccaaaaataaccaaaatgaaacgaattctttcaatctccatcctgatgatggtatcgttgctggcgatgtcggcagtctatgagccgacgctgagcagtgacagcgaggtgtgtgtcttttttgaggccaacagcacggtgaccgatgcgcccaagatctgggtgtgggaaggcaacaccggcggcaatagttatgtgggcaccaactggcctggtgcgtcaatgacctacatgggcgatacccagagtggcaacaagatctacaagtggacctataccggctcgctggcaatgccttcgggcctgatttttacctggaacaaccagggcggacgtgttgacggttcgttcaccaaccacggctactacgtgatgggccagttgaccaaggtcatcggggcaggggagagcacctttgtccccaaccagcatgtcatctatgagcttgacctgtacaactttaccagcgcgggtacccttgccgcagcgcagcagcgtctggactacctcaaggacctgggcgttgacatcatctggctcatgcccatccatccgcgcggcatccagggccgtatcggctctctgggcagcccctatgccccgcgtgactatcatgccgtgaacagtgacttcggcaccatcgccgacctgaaggcctttgtcaccgccgctcatcagcgcggcatgcaggtgtggctcgactgggtggctaaccacacagccaaggacaacgtgtggattacccagcaccgcaactactataactcgacgctcaccagccccaacggctatggcgacgtttatcagctggattacagcaaggaagagacccagctggcgatgatcgaggcgatgcagtactggattgaccaggtggacatcgacggctatcgctgcgactacatcagcagcaacaccattcccaccgccttctggactcgcgccatcaaggccctgaaggagtataaacccggcaagaccatcaccatgctgggcgagggcgacatggccaacagcgtgtcgcgcctgctggtgtgcggctgggactatgactacgcctggggcttccagagtgcgctggtcaacaacaagaccaatcccagcggtgtgttgaaccagtgccgcaacctggtgggcgacctgcgctttatcgacatcagccgcatggtgtatctcaccaaccacgaccagaattacaacagcacgatgaacacgcagtatggtaataatgtgtatgctttcacggtgctgacgtttaccctgtacggtatgcccatgctctacaacggacaggagacgggctacctgatgaatcgcaaactggattacttcaaccgcacgcccatcaactggaacaccgtcgataacaagatgctgaacaccgtcaaggcgctgaccgcattgaagcacagttgtgacgcactgattgacaacggtgaccgcgccagtgaggtcaagttcctgaccacgggcaacagcaatatggtggcctatacccgccatcacaacgagcagaccgccctggtggtgctcaacttgggtaccagcgcgctgaacacgattgtcaccggtcttgagcccggcgagtggaaacgtgccatcgacgtgagcaacatctcggacggactgacggccattcccgtgacgttcagttcgacgcagagtttctcgattcccgctggcggttaccaggtgtatgtcaagggcgagcctgtcccgacttatctgcatggtgacgtgaacggcgacggcgaggtgaccatcggtgacgttagcgccctgattgacctgatcatgagcgacaatgttgaaagtaccctcttcaagagagccgacgtgaataatgatggggaactgtcgattggcgacttatcggcgttgatagatattattttgggggtttagacgttagactttagacgctagatattaggttttagtcagatgaggaggattgggattcttgtggcgatggtggtggccggtgtcgttgtggcactggctgcagagggtggcggacgttttcagcatctcgacagcttgattgctgcgcagccccagattgttgccgccaaggaggcccgactcgcacagctgaagtctgatttgggcaaggagacgacagctcctgggcgctatgccgccttgaaacggctctatgaggagtactcggcttaccagtacgattcggcttacgcctatgtgaaccagtgcatacgcctggcccagtcgatgggtgatgaatcgctgttgaacgagagccgcctgaacctggcccatatcctttccaccgcgtgcctgatggacaaggcgcaacagacgctgaatcagattgataccacgcgcctatctcccggccaactcgttgtgtatcaccgcacgctgaccgacctgctgatttatcaggcggagtatatgcagggcacgcaatatgccgaggagtatgtgcagcaactggtgggggtgcgccgagctgccatagccatcaatgtgccccatgacaacatcaactatcagattacgcaggccgagtgctattctgacgacaaccagccccagcgtgccatcgaactgctgtccaagctgatggacaactaccacagtggcgagcgcatgtattccatcatcacaagtacgatgtcgttctattattcgcaactgggcgacaaggagcaccagatggagtacctgatcaagagcgccgagagcgacctggaaggctgcatccgcgagaacacgtcgttgagggcgattgccgatcgcctgtttgacgagggcgacatcgaccgggcctatcgctacatgcgcgtggcggtggacgatgccaatttctacggtacacgcctgcgcaacatccaggcgtcacgcattgtacccaaaatcctgagtgcctaccagaccaagcaggaacagggccatcgcaagatgatgtggctgctgggcatcatttcggtcatcgcattgctgctggtggtcggcgtcatcgctatctatcagttgttgaagcgctaccgtcgcctgaatgagcagaagaaagccatcaacgagcagttgcggcacgtcaacgcccaacttggcgagaccgtcgaggaattgcatgaggctaacgggttgctgcaggagcgtgagcagttgaaggagcagtatatcgcgcgcttcatggcattgtcaagcaggtttatcgaccgtggcgaggagcagcgcaaggcgctgtaccgcctataccgcgaccgcaaaaccgaagacctcgcacgggaactgaagagtaccaacttcggcaacgagaacgcgcggctgttctatgaggactttgacaacgcgttcctgaacatctatcccacctttgtcgatgaggtgaacaagctcttgcaggaagacggcaagatagaggtcaagcagggcaagcgcctgactactgagtcacgcgtgctggcgctcatccgcatcggtatcaccgacaaccagagcatcgccgccatcctgcgtgccagcctgacgaccatttacacctaccgttctaaacttaaggcccgcgcgattgacaaggacaccttcgagaacgatgtcaaggcgattgactgctgaggaggggtagggtaatttgcgtttgtaaatagaaaaattaacaaatgaaacaagatattatgaaaaggcttttaagtgttgtgtttatgtgcttggtactgagtgttgtagcgagtgccaaggatgtgttggtgagttcgcctgacgggtcgttgacggtgaccgtcggtgtggacggtggcaaggcgtggtatcgtgtggtgcgtggcggtgagaccgtcatcggccgttcggcattgggcctggtgctcaaagatggcgacctgaaggacaacttcaagatgggcaaggtgacgcgtgcgagccttgacgagacgtggagccagccgtggggcgaggatgcccaggtgcgcaaccattacaacgagatgcgggtgatactgcaggaaaagaatggccagaagcgtcaactgggcgtggtattccgtgcctatgacgacggtgtggccttccgctacgagttcccgcgccagcgtggtctgcaagactttgtgatcatggacgaggcaaccgagtttgccctgcccagcgatgcccaggcatggtcaattcccgctttgacgccttactatgagggcatctacacccgtgagcccgtgagccaaaagaagaatatgtcgggtcccgttgcccttgaggtgaacgatgggctctacatggctatcatggacgccaacctgaccgactactcgaccatgaacttctcgcatcagggcacaacgctcaaggctgacctcgtgccctggaagaatggcgacaaggtgagggtggggaactcccgcgtgagcccctggcgagccatcatcatcggccgcacggctgccgacatcctgctctcgcgcatgcccctgaacctcaacgacccatgtaagattgaagatacctcatggctgaagccgacgaagtatgtgggcatctggtgggcgctgcagaaacagcgctggacctggtcgcagggtgatcgccacggtgctacgaccgagaacaccaagcgctacatcgactttgccgccaagcatggcctgggcggtgtgctggtcgagggctggaactacggttgggacaccgactggacgaagcatggcgacggtttctcgtttaccaaggcttatcccgactatgacctgcagggcctgtgccgctatgcaggcgagcgcggcgtgcgcatcatcgcccacaacgagaccggcggtgctgcccagaactatgagaaccagctcgaggatgcctacaggctctatgagtcactcggcatcaacacggtcaagacgggttatgtcaattcgcacttctataacggtgagctgcagcactcgcagtggggcgtgcagcacttccgcaaggtcattgagacggcggcccgctatcacctgatgattgtcaaccatgagggcgccattcccagcggtatccagcgcacttggcccaacctcatcgctactgagagcatgcgtggccaggagtacaacgcctttgaccgccgtggcggcaatcctccctatcacgagtgcatcctgccgttcacccgcggcttgggtggcccgatggatttcacgcccggtatctttgagtaccgcaacgactcggtgcccggcacgcgtccgcagaacacgctcgcccatcagttggccgaatatgttgttatctacagccccggccacatggcagccgaccagattgagaactacgagcaccagcccgccttcaagttcatcgaggaggttcccaccaattgggagcgcaccctcgtgccgcatgcttcgatgggcaagtatgtgacctacgtgcgccaggagcgtggcaccgacaactggtatgtgggcagcgtgaccgacagtgaggcgcgagaccttgacctgccgctcgacttcctgggtgacggcaagtatatggccatcatctatgaggacggtcctgatgccgactaccgcaacaatccttacccgatgagcatccgtcgtcttgacgtggacaagaataaggtgctgcacctgcatcttgcctctggtggcggctgtgccatccagattctacctgtcaaataggtagagggcggattaacattttataaccgttgcacttgcagcggaaggagtcaaatgacatagaaaagacttcttccgctgcaaatttgtaatcatatagatgctgatactttgtcatgaacaaccaaaatgggggaaaatagttaggatttatcattgaaaaagctgtttttccatgaaaaatcccgttttttttgagtttttttgcaataagttgttgcttgagtgaaaaaatgtttatctttgcgtgtttctctgctgctagcaagggaaaagtgaatgaaataaatctcttatgataccatagtagtaatggacacaaggaacctgaaaacatctacatcttgccttattgtattctcaatggaggatgcagtccatgcctatatgtcatttggtgcctttaacgagacaaaaatcagtaagcagagcgcacttgctgttcaacaactttatagagataatcaacatcaatccaccggcatgttcaggtatgcgct

SEQ ID NO: 4195 - DNA, 23606 bp, synthetic construct
  source 1..23606: mol_type = other DNA
  misc_feature 1..23606: note = Synthetic
atcgcagcgtgccgacggctatatccacactcccgtcatcatcgccgaactcaacaagcggttggccgctgaggagagcgacaaagacaacaccgtggtgggcactgccgtaggcaccaaaaacgatgacgccttcgtcaaccggctcaacttcgagacctacaacctcggccatctcatcaccgcaggcatcatccacaagcgtgccacgggcaagaccacacttttcggcgccgctgtcaaagccgccgacttcctctacaacttctgcaagacagcacccgaggaactcgccggcaatgccatctgtccctcacactatatggccatcgccgaactctaccgcgagaccggcgaccccaagtatctggaactctccaagcagttcatcgacatccgcggcatggtgaagaacggcaccgacgacaaccaggaccgcatccccttccgtgagcagtacaacgccatgggacatgccgtcagggccaactacctgtatgccggcgtgaccgacctgttcatcgaggcaggtgaggaacagctcatgcgcaacctcacctccatctgggacgacatcgtcacccgcaagatgtatatcaatggagcctgcggtgccctttacgacggcacctcgcccgacggcaccgactacaagcccgacaacatccaaaaggtacaccaaagctatggtcgtccctaccagttgccccagtcgaccgcccacaacgagacctgcgccaacatcggcaatatgctgttcaactggcgcatgctgctcgccaccggcgacggcaaatatgccgacatcatggagaactgctactacaacagcatcctcagcggcatctcactcgacggcgagaactatttctacaccaatcccctgcgcctgagcgacgaacttccctacaccctgcgctggccgaaggagcgtaagaaatacatcagctgtttctgttgtccccccaacaccctgcgcaccctctgtgaggtgcaggactacgcctactcggtgggcaagaatgagatttccgtcaacctctacggtgccaacacactcaccaccaccgtcgatggcgtgggagccatcaccctcgttcaggagaccgactatccctgggatggcaaggtgacattgcgcatcagtaagatgaaaggcaagaagaccatctgtttccgtctgcgccaccccggttggtgcaagaccatgcagggaacagccagcaacggagccaccataaaagaagaaaacggttacctgaccattggaggcacctggcgccaaggcgacttcatcaccctcgacatgccgatggagactcgtatcatagaagccaacccactcgtcgaggaagcccgtggccaggtggctgtccagcgcggtccgatagtctactgcgctgagagtcaggatctcggaggagccgacatcgacaacatcgccatccctatcgatgcccgtttcacacctgttgagacacgcatcgccaacagtcgcatgatggcgctcgaaggagaagtgttcattcgcaacgaggcctcatggaaaggttcgctctaccgtgatgccgccaccgccaagcaacgcaaaaccatccgcttgataccctactatgcgtggggcaaccgcggtaaaagtgagatgaccatatggatgcccgccgcctactaattgtcgccgccctgtcgctctcgctgacagccaccgccgccgactcccttgtcatcgaggtgcaacccggagagttcaccatcgagcaggctttgcagaaagcccgccttgcccgtctgcaccaagagggagacaatcccaccctacggttgcacgccggcacttatcgcctgtcgcaacccgtcgttctccgtcctgaggacagccacacccgcatcattgccgaggaaggcaccgtgctcaatggcggtgtgagcatcacgggatggcgccggcagggaaaattgtgggtggccgacgtaccccaatggaacggccgtccgttggagttccgccagatgtgggtcaacggccagaaagccatccgcgcccgcgatgtagaagacttcgaaaagatgtggcgcatccgtgcagtcgacaaggtcagcgagaccatctatgtgcccgccgctgccgtcaaaaaaatccttcatgagcgccatgccgagatggtgctccatgagatgtggtgcatcgcctacctccgcatcaaggacatccgggtggccggcgacagcgccgccatcactttccacaacccggagagtcatgtgcacttcatgcatccctggccctcgcccatggtgaccaccgacggacacaactccgcattttatctcaccaatgccaagacactgctcgaccaacccggagaatggtatcttgacaccaaggaggagcggctctactatatgccccgccaaggcgaggacatgcgcaccgccgaggtcgaggtgcccgctttggagaccctgctcagggtggaaggcacccccgaccgtcccgtcaccgacgtgacgctcagcggcatcaccttccgccatgccacctggctgcgccccagcgtgatgggccatgccccgttgcaagccggcatgtatatgaccgaagcctacaagatacgtccccaaatcagtcgtccgaatggagaccacaaactcgacaaccaaggatgggtaggccgtcctgctgccgctgttgccgtcagcggagccaccgacgtggtgtttgagcactgcacgtttgagcactgcgcctccaccgccctcgactgccacaccttcatcagcggaggagccgtccgtcgctgcaccttcagcgacatcggcggcaccgccatcctcgccggcaccttcggttcggaggcacaggaggcccatctcccctaccgcgtgtccgacatgcgcgaaatctgcaccggtctgaccatcgccgacaaccgcatcgatgacgccgccaatgaagactggggctgcatcggcatcgccgccggttttgtccgcgacatcctcatcgagcacaacgaaatctccaacgtgtcgtataccggcatcagcatgggatggggatggaaccagcagacctgcgtgatggccaacaacaccatccgcggcaactacatccaccactacgcccgccatatgtacgacacggccggcatctacaccctcggttcgcagcctcacaccttcatcgaggagaacgtggtgagcgacatctatactcccggctatgtgcacgaccccaaccactggttctacctctataccgacgaggggtcgtcatacatcacggtaaggaacaactggacaccatcggagaaatttctcaagaatgccaacggtcccggcaacacctgggagaacaatggtccgatggttgccgacagcatcaaaataaaggcaggaactagacaataaaataaaaaagcatcatgattacttcacatccactgagcggcatcattccaccgctggtcaccccactgaaagacaacgagaccctcgacacggagagtcttgagaacctcatagagcacctcatcgcaggcggtgtgcacggcctcttcatcctcggcaccaccggtgaggaacaaagcctgagttacaagatgcgggcagagatgatacgccagtcagcccgcatcaaccacggacggctccccctgttggtctgcgtcaccgacacctccatcatcgagagcatccgcctcgcccgcatcgccgccgactgcggtgccgacggcgtggtgtccgccccaccctattacttcgctcccggccaacccgaactggcacagttttatgaggaactcgttccgcagcttcccctgcccgtctttctctacaatatgccctcgcatgtaaaagtgagttttgcccccgacacggtgcgccgcatcgcccgcaatccccaggtggtgggattcaaagactcctctgccaacaccgtatacttccagtcggtgctttacaagatgcgtgagcgtcccgacttcgccatgcttgtgggtcctgaggagattaccggagagagcgtgctcttaggagcccatggcggcatcaacggcggtgccaacatgttccccgaactctatgtgtcgatgtatgaagcagccaaggcaggcaatcttgcccgcgtggtgcagttgcagcaactcatcatgcagatttccaccaccatctacacggtgggcaagcacgggtcaagttatctcaagggtttgaaatgcgccctctcgctgctcggcatcatcaaagacgacttcgtcgcctcacctttctacaagttcgacccacccgagcgtgagaaaatcagccaagccctcgccgccctacccattgagaacggaaagctgaagttatgaacaccatcgacctcatcatcttctttgtcttcactttgggtgtggtcgtctttggctgttcgttctacaagaaagacaacacctctgccgagttcacccaagcgggacgctcactgcccggatgggtggtgggcatgagcattttcgccacctatgtctcgagcatcagctacatcggctaccccggcaaggcattcgcctccaactggaatgcgtttgttttctccctctccatccccatcgccagctatttcgccgcccgctatttcgtgccattctacagaaagggaggcagtgtctctgcctacaccttcctggaagagaaatttggccgctgggcgcgcctctatgcctctgcctgttacctgctcacccagatagcccgcatgggcagcatcctctacctgctcgccgtgccgatgcacatcctcatgggctggaacctccacatggtcatcatcgccacatcggtcgccatcatcatctactcgatgctgggcggtctgaaggcagtcatctgggcagatgccatccagggcatcatcctcatcggcggagcagtgctgtgcctcgccatcctctgtttctccatgcccgagggacccggtcaggtgttcgacctcgccatccattcccccgagggcaacaaattctcattgggagcgttcacctccgacctcaccacgtcgacgttctgggtatgcctcatctacggcatcttcatcaaccttcagaactatggcatcgaccagaactacgtgcagcgctatcatgcagcgaagaccgaccgcgacgcacgcttctccgccttgtttggcggttacctgttcatccccgtctccgcgctgtttttcctcatcggttcggcactctacagctactacacggcgcatacgggtttgctgcctgatgacattgccgccaagcccgactacgtgttcccgttcttcatcgtcaacggtctcccggtgggtctgcgcggtctgctcatcgcctccatcttcgccgccggcatgagcacggtgtccaccagtgtcacctccgccgccaccatcatcctcaccgactactacaagccgttggtcaaacgctcctctgagcgccgcgacgtgatggtgctccgtctgtcgagttgcatcgtcggcgttatcggcattatcgtcgccattgccatgctcagtgtggagagcatcatcgatgcgtggtggaaactgtcgtccatcttctctggcggtatgctcggcctcttcctgttgggcattctcccccgtcgcatcggtcggtgggctgccctcatcggctgtgtggcaggcatcgccgtcatcgcatggatttccttggcgggactctacgacctccccggcatccacctgcatgagtatcttgccatcgtgctcggcaccaccaccatcttcatcgtgggcttcctgctctcgctgctggtacataaggattagtcgtttggggggttggtcgtttggtcgtttagtcgtttgggagtttaggagtttagacgatactcctacaacaatggcagtgcgacgtagtagagacgtccatatatggcgtctctccgccatgcccgccgtgagcatattattaaggagtttaggagttttggagtttagacaatactcctacaagaatggcggtgcgacctgtagggacgcgatgtatcgcgtccgcagttcatcgggatttgaaatcccgatgtcttaaatatcaggatttgtaatccgagatggtagatagaagagacaataaaaaaacgcttcgcttaagaaaaagtaataaaaatattgaaaaatcctgggcgtacaggaaagtctgaaaaagtgcctaggcactcacaaaaaggaagaaaaaacagctccaaaaggctgtcattcgtggagattcgtgaatttcgtggttgaaactgtttatagcagacataagagtcgcattgcaaatgcttatactctatgcggtcggattctttagacccttcgggtaaaagcggcaaatccgcccgaactgtttgatagcagaaatgaactgttcgagcagtgacatctttcaatctttcaatctttcaatcttaatctttaatttttaatttttaatctttaatcttttcacatgcctacttggatttggtatcccggcgactttgagatttggctgggcaatcgcttcaacaacaggcgcaccgaacgaggcgcgatgtttccaccattctggaaacaggactcacattggcccaccgtggagttcaccaagaccgtcgtacttgaggaggacgagcaaatcaccatctcggcagagggacagttcaatttctccgtcgacggcaagttgcgctacccccactcccagcagatgattctcaagggcgagcacaagctgagtgtcaaggtgtggaaccaggccactccgcccgcattgttcatcgagggaaggaccatagtgaccgactcctcctggctggtcacctacgaagacaagatttggattgacgagaatggtgtcgcccatggttccggcatctatgtccctgtcggtgaatggcatttcaacagtcccagcaccccaccctcatccttccacctgccccggaaggaactcctccctgtgagcaaggaacaaatctttgacgaggataagaatctgtgtggcacactctacgacttcggcagagagaccttcggatatctgaaggtcatccgtctcggggaaggcaccgtcagcatctattacggtgaaagccgcgaggaagccctcgacacggaacattgcgagacactcgacatgctgagttctgcagacgtgcagcggcggaccgacacctcgccagacaactggcactatctgctggacagcaaggcattccgatatgtcttcatcatgtccaacggcacgccatatgacgaggtggccatggactatgaatacgcatctttcaatgaggagcgcagcggtaccttccgctgttccgacgaggagttgaaccgcatctgggatgttgccgcctacaccatggacctcaccacccgtgagttttttgtcgacggcatcaagcgcgaccgctggacctggagcggcgatgccatccagagttacctgatgaactactacctgcgcttcgacaccgagtgcgtgaagcgcaccatccgtcagttgcgcggcaaggaccctgtcacggcgcatgtcaacaccatcatggactacacgttctattggttcaagtccatcctcgatttctacctctacaccggcgaccttgcctttgtccgtgagatgtggcccaagatggtgtcgctgatggactatgtgttgcgccgcaccaacaccgacggtatggcagagggacagcctgacgactggattttcgtcgactgggtcgacttccccatgcacaagcgcggcacgctgtgctttgagcagctgctcttctgcaaggctttggaaaccatgcacacctgcgccacgctgttgggcatcgacagtccttatggtgtgctcgccgccgacctgctggagaagataaaagccaccttctggagcgaggagcgccatgccttcctccacgccatcgaggagggtgagatgaacgagatggtgacgaaattccccaatatgttcgccatcatctacggctatgcgtcccttgaggagcaagcgtccattctccgccatgtgctgctcaacgaacaggtggaagccatcaccaccccctacatgcgtttctatgagttggaagccctctgcacgatgggcatgcagacgtcagtactccccgagatgaaagcctactggggcggtatgttgcgtgagggagccaccaccttttgggagaaatacatcccctcggagcatggcacgcagcatctcgccatgtatggccgtccctacggcaagagtctatgccacgcctggggagcgagtcccatctacatcctcggcaagtatttcctcggcgtgacgcccaccaaggcaggctacgaggagtatgaggtgcggccctgtctcggtggtctcgagtggatggaaggcagcgtccccactcccttcggcaagatagaggtttccgtccgtcccggttccattaccgtccacagtgatggtggccacggcaccctcgtcctcggcgaccgccgcattcccatcgagggagagttgaggctcttaggagttgaacttgataggagtttaggagtctaggaatttagacatatgctcttttctcaggagtctaggagtttaggagtctaggagtttagacgatacccctacaagaatggcggtgcaacgtggtagagacgtccatatatggcgtctcccagccatgcctgccataagacgaatgggaagtgagataataaaataacgctccgctccgaaaaaagaataaaaagatagaaaaaacttggcatacagcgaagcgagaaaaagtgccaaggcactcgcaaaaaggaagaaaaaattgatgataaaattcatgagtgattgatggtaattcatgttttttcaacatataattgccatgaattattcattaatcattcaagttcaacttattatcaccttcaacttgagaaagtcgtatcattagtgtgctttcgtgtcctttcgtgagtttcatggttgaaaaactttcgtgagtttcgtggttcatgagtgattgatggtaattcatgtttttttcaacatataattgccatcaattattcattaattcaacttctgcaagttgaaggtagttataaaagtttcgctcaatccgaagtgatagattgtccatcagaccgtaatctttaatataaagacctaactgtttgacggttggtcatatacgaaacttaaatacacaacccctaaattcgaatcattatgttggtgaaagtagctgtttgcaaagacgctttcgagggagaagtcgtaaagggtctgcttgctgccaatgacatagactgccatttgcagaacgagacgatgtcgcaaatctatggaggtatcccggcatttgccatcaacgtgttggtgaaagaggaagatgccgagaaagccaaacaactccttgatgcacgcaatgagacggggcaggacaaggatgagcctcagatgaagcaaaaaccgttgaagcggattattcttgagtctctgatgtttgccgtcatcgtattggtattgatgattgttgcccacttgttgggcaagaacctgcagcctgccatgttttatttcacctatggcattggagccttcttgggatggttcctcacacaactgttgttctggaagaccttctaatcatcaatgatggtgattcttccttgtggctctctataagtgttgcccagttgccccacctggcttttcgctgcatatatatgacttttttcgaacagctatacggcacaaggtctgaagacaggaatgaggtgatgacattgatagatttccttttctaaggaggtatttagtctatcattctaaataaaaaactcccaccgaggcgggagtataggttttacccttcggccatgaaggccttattgtgataagatgtaggaatcttatgatgcaaatttatcaaataattttgtaccaaacaaattaatttgtaactttacggaaatttttaacttatatttattattatggaaaaaatattgggtatcgatactggcactaatagtcttggatgggctattgttgagaaaaatggagaagaatgcagacttttagcaaaaggtacaaatatcttttctgaaggtgtgaagatagaaaaaggaatagagtcatcaaaagcatcagaaaggacgatacatcgttctgttcgcaaacattattggcgtcgaaaaataaggaaaatcagattgttgtctattttgtctgataataacttgtgtcctccattaagaaaaggagaactgagagaatggagattgaagaagatttaccctgtaaacgatgcttttttggcatggcaacgcacggaggataaagacaatatcaatccttatagatatagatatttgtgtctcactcaaaagttagatttgactgatatcactcaaagatatattctgggaagggctatttaccacttaaatcaacgacgtggttttttgagtaatcgaaaagaatctacaaaaagttcagagggacaggttcttgaaggaataaaagaccttagcgttgaaatggctgaagctggttgcatgtatttgggtgagtatttttatcatttatatcaagaagggaaaagaatacggaatcattatacagataggaaagaacattattttaaagaattccatgccatttgttccaaacaggaattgtctgctgaattggtttcaaaattggagaaagccatttttgatcaacgacctttgaaatcgcaaaaaggacaagtaggaacatgtacttttgagaaaggcaaaccaagatgttcttcttcacatccattatatgaagattttaggatgtatagcttcttgaacaatattaaaataaagacgccaaaggatgatgagatgcggtatttaactcgggatgaaaaagcaagcatcatacctttgtttaaacgcaaatcaaaacgaacattcaattttgaagatattgcaaagaagctggcaggaaagaaaaactattgctattataaagataaagaagatttgccctacaagtttaattatcagatggatacacaagtatctggtagtatagtgaatgcacaacttgaggatatttttggagagaattggatagatggagtttgcgaagtgtatgcactagccaacaacaaaacaaaatttcaaatcataaatgatgtgtggcatgcccttttcttttatgatgatgaagataaactcaaagagtttgcaaaaaacagattgcagttggacgaagaacaggcagagaaatttagtcagattgttttgccgaatgattatgcttctcttagtttgaaggcaattaggaaaattctcccttatttgcgtgattatggattcatctattctcaagcagtatttcttgcgaatatgaaagaagtgttgccagaacatatttgggggatcaaagaagttcgtgatggtgccattgaaaacgtcatagatttaatttgttcatatgataaatcttgtgatgacagaactttggaattttgtatcaaggatttcttgcgtgatagatatcaggtagaagttgacaagcttaataaactttaccatccatcgatgatggaattatatccacgagcaactccagataatgatggtatctatcaattgggctctccccggataagcagcgtaaaaaatcctatggcgatgcattctctttttcgtttgagaaaagtgattaatatgctattaagagaaggattggtcgatactgatacaattattaatatagaattttctcgtgatttaaatgatgcaaacaagcggtgggcaattcaaacttggcaacgtgaaaacaataaggccagagaggaatgtcgtaagaaaatgggtgaaataaaagaattgcatctaacgtccatttcggaaagagatatattaaagtatcaactttgggaggaacaaaaccacaaatgcatatatacaggcgaagaaataggtttgacagatttcttgggagaaaatcctaaatatgatattgaacatacaattcctcgtagtgcaggtggtgacagtacaaagatgaatctcacattgtgcaacagcagatacaatagagatgtgaagaaggtcaaactaccttcccaattgtcggaacatgaagaaatacttgagagaattaaatcatggaaggaaaagtatgaagaattgaatagtcgtatccgccgtatcagtactaaaggcgcatcttcaaaagaagagaaagatatgagaatacggagacgccatcttctttcccttgagcgtgattattggagaggaaaataccaaaggtttgaaatgacagaagttcctgaaggcttttctcgtcgtcaaggaactgatgctagcgtaatatctcgttatgcaaggttgtacttaaaatccgtttttaagcatgtttatatagtcaagggtattgccaccgctgatttccgtaagatgtggggcattcaggatgaatacactaaaaaggagcgtgttaatcatgtacatcattgtatagatgctattattatagcttgtattggaaaaaatgaatataacaagttggctcaatactaccatgatgctgatgcatataagtataataaaggccaaaaacctcatttcgatatgccttggccaacatttgtatctgatatgaaacagatgcaggaccagctaataataacacattattcaaaagacatcatgcccaaacaatcaagacgatatgtaagagattcgagagggcgcaaattgttgacacaaggtgatgcggctagagcatctttgcataatgatacttattatggtgcaataaatgtagatggtgagattaaatatgttgttcgtaagagtctcgattcattggaacctaaagatgttgcccttattgttgacgaggcggttagaaaaaaagttgaggaagcgattagggaacatgagtctttgaagaaagcattggaaaaagggatttggatgaacgaagagagaggaattccaataaagaaagtgcgtatcttcaccggaagtgttacacgtcctatcaatataagaaatcatcgtgacaaatctcgccatgattacaaacggcaattccatgttcagaatgatagaaattatatgatggctatctatagaggaaaagataaaaagggaaaagatagaagtgagtttgaactcatcaataatttggacgcagctctttattataggagaagtaataataacaaatattccttggttccagaaagaagtaaaagtggatatcctttattgttttgtttgaagataggaacaatggttctgctttatgaaagttcgtccgatgaaatatgggatcttgacccaaagaatttggcaaagagactgtataaggtaacaggattgtcttctatggtggtggattcgagaaattatggtaagatagctcttgtgcatcatcaagaagcaagaccaagttcagaagtgaaattaaaaaatggaaaatttgtatcaggcgaagactttagacctggaatattgatgttacatggccagataaaagcattagttcaaggagttgactttgaaatcaatgaattaggagaaattaaaaggttgatatgataaaacaaacattgacatttgtgtctccttcatatgaaagtatgaatgttcataaaagacgtgtgaaatcatttgttccagataaaggtatggtaagtattttgagtgtaacagataagcaatattcagatattatgaatttttggggaatagaaaagaagaaaaaaacaatcaccaaccctttgcaattagaatttttttagtagctttgtgagaacaatttaaatcatcaaccatttcttattggtaaatgtatgattatatgtctaaatgtcaattaattatatcccataggttgtggtttgatgtaggaagagaataagatacaacatggctgtgcaaatcgcctacgagcagatggttgtggtttgatgtaggaagagaataagatacaacttctattgttatccgtgaattggggcatacgttgtggtttgatgtaggaagagaataagatacaacgagtatttttgatgcataagacatatcagagttgtggtttgatgtaggaagagaataagatacaactatgcggaggatttgtcattcttcgtcgctgttgtggtttgatgtaggaagagaataagatacaacgaagtcagttaaaacatccaatgcggtagagttgtggtttgatgtaggaagagaataagatacaaccacatacattgcctgtaatatacgatgcaagttgtggtttgatgtaggaagagaataagatacaacatgatagcatttaccgtgacgagcgtcaaagttgtggtttgatgtaggaagagaataagatacaaccattgctattaacgtaactcgatacgtaaggttgtggtttgatgtaggaagagaataagatacaacgctgcacctcatagagactggagcccttagttgtggtttgatgtaggaagagaataagatacaacatatataacaagaatatatagttttgccagttgtggtttgatgtaggaagagaataagatacaactatgggcttaaagatttgtctgtgcaggtggttgtggtttgatgtaggaagagaataagatacaactgcccaatggcgtaattaaggcacaatcagttgtggtttgatgtaggaagagaataagatacaaccggttgcgttctcagtggctaccgtatctggttgtggtttgatgtaggaagagaataagatacaacaaggtggttcaggaggccatcaaggcggctgttgtggtttgatgtaggaagagaataagatacaacgaggcggaacatcggtgtgcggagaagaaggttgtggtttgatgtaggaagagaataagatacaacagggaggacggcatctatgaacttgacaaggttgtggtttgatgtaggaagagaataagatacaaccactgaaagactggcaagcaagggatagaaaaatccttggcgtacagcgaagcaagaaaaagtgccaaggcactcgcaaaaaggaagaaaaaattcatgataaaattcatgagtgattgatggtaattcatgttttttcaacatataattgccacaaattattcattaatcattcaagttcaacttacaactaccttcaacttgagaaagtcgtatcattagtgtgctttcatgccctttcgtgcctttcgtggttttatctatccgtgcccatccgtgctatccgtggtttgtgccttttcgtgattttcgtggttgatattggtcaacgccccctaccccctctaatcttagagggggagatagttacatccgccaattaggggattcgtgtcctttcgtgtatttcgtggttgaaaaattttcgtgagtttcgtggttgaaaaacttcgtgtatttcgtggttaaggcaaaaaatgctgcccggctgttggagccaggcagcatttttattgatgactgtttaagaattgcatcacttaatcacgacctttctaccaccacggatgtaaaggccacgttggggatggaggacgcgttgaccgctgaggttatagtagggttgcgagtcgtcgctggcctcgtggcgtgggacgtcaatgtcagtataggtggtggtgtcgatggtgagactctcgaaaccggtgggcatgccaatggcctggaagcaggcgcggaagggtgagcaagaggtggcctttggaacgacactgccaccctgaccatcagcaaaggcaaaggtctcggcactgggatgttgcagctttgtgaaggagccggccatgttgtaacggcctgccgtctggaagtagatgctgtcgcagacataggcatcggcagccgagaaggtgacgggattggtcagtgccttgtcggccttcagacggacgatgtagggtatgccgaaggagggcatgtcgggggtgttggtgaagtagaccttgcctgcctggtcgccaacgagcagcatcttctcgagggtgaacggctcgcctcctgcttcgcatttctgtgccgtgaaaggcaggaggagggtggtgaatgcgttgcgctcggactcggtaaaggtgcgcttgtactcaatctgcttggctgtaaaccagcggggcgtcatgaagtcgtagccgtcagtcagtttgatggtctcggccttgaattcggcattggcatacaccaccacgttgcgaccctccaaggaagcgggcttggggtcggtgtcgtccaggaaatacaggcagttgggattgctgttgggcgtcagcgtcttgacaccggcgccgttcagctctacggcaagggcatcctcagggatggtgaaatcatcttggggtgcgaaggatgctaccttgccgtcctttttgaacacattgatgccaggcactgcaaggatgtacgaataaacggatttcgtgtcgttgccgatattgtttttatattcgcttcgcagccaaaaggcgtaagtgttggataactcgagcttatcgtaatagaacttgacatcggtgcttgctcccggggcgatggtcacatcctcttcggtcagttcgttgatgacattgtaagcgtagccttcttcaacaggctcctccctgtagatgaccattgagaccttgcctctgtatgacttgctggcatcaggattgcgcaaggtaagcgtgacgtccagttcatttcccatgatatcgtattgcttgttgccctcatcattgttggcttctttcttcacattcttcagcttcaccgtcttttccaggacgatgtcgtcgtaatagaaaaagccgtcgtaggggccgatgaccagcggtacgaggtcgcccaagacaaaggcctcaaaaagaaggcctgtctggtaggttctttcttcgccagccgtgaatttgaaaacggcatcgacagtctttcctgccgggatgctgccaaaaatctccttgagtggctctgcactgatcatggtgccatccttggtttcgcagaggatgagtacaccgtcgtagtcgaaggcactgccgttggtgatgttcatcacggcagtcacctcaccgccctctttcaggtcacccgagtatttgatgctgttgaccttcaggcgcaaatcgcgaggatggggagtcatcgtcagctgattgccactgatgtcgacatcgatgaagttgtcgctcacatcttcgttcttctcccacttctccgagccttgcacacggctgacgggatagagttcgtaatgcccatcggcaagtcctttcccgaaagtgatggaagcctgtacgttttccatgtaggctttatatttcaacggctttcccatggctgcctctacgaccttcacctgttttttgtcctgatagagtgccaggcctatgtcgtaggtgtagtccttcgactgcttgctcagattttggagtaccatgagtgtcttcacggcagggaaatcggtgtcgccggtgcgttgcagctgtaacggcgtgtccatcgacaacatgaatcccatagtacgcagtgcctcgccccaggaatagttattgtcagtgggtacgatgcccgttgtgacctcgtaggggaagtggggcaaggcattcttggcgttggcactggcagacagttggaagaatccgtctctgctgccgtcccatccccagttgatgtggaagaagtcgccaaacttatagccgtcgatgatgaactgatgtccgtcgccaccacagatgatggggcgtttcttctccagttcgttgtaaatcatgttctgccactcccattccgtcacaaaggagcgccgcgtcacttcaatgctgtcgctgttgtagccgaaaaaacggacaaaaccaagagccatcctgtaggagttcgactgcgatgcatcgctgtaatattccatttggctggctgcaccacagtattgcatcaacgtagccacggcatcgcacgactccttcgacgactggtcggtgtaagtatcggtcattgccgcccagttgaaggtgacggggggcagttcggaggtgtactgagtggctgggagggtcggcgtctgagccttaggccactggtggtatttcatgaccatggccatcgccgtagccacacagcctgtagcaccatgtatatccttgtcttccgggcccttgacaatcggcgtctggttgttgtagggcttgtcttgtccccacttctgactgataagcggtgctatctcattcttcaccggataatcattgacggcatcatcttgctcggcatcatcaccgctctgctctgcctcttcaatctgcgaggcatagcttttcagcagttccatcatcgcgggaggcatctggtcgtcgagcgacccctggggtgcataggctaatatttcctttgtacgattgctggctgagacgatgacgtagccgcctccttccaaattgaaggcatgcagttggcggagacccgtagctaccgtttgcaacttcttgtcagcagcaacacgtcgtgcacctggctgttgtgacagaaaggccttggctttcgccatggcttgttgtcggttgatatcaacagcctgaatggtcatgcttgcggctaaaacgagaagagataagatgattttcttcattgttgtagtttagtttgttatttggtgtttccttggctgcaaaggtacacatttctcgcaaattaccaccaattatatgttaaagaaaaacatgaattaccaggaatcactcatgaattatttcatcaattttttcttcctttttgcgagtgccttggcactttttcagactttcctgtacgcccaggatttttcaaatttttattactttttcttaagcgaagcgtttttttattttcttactccccattcggctcacggcaggcatggctgagagacgccatatatggtcgtctctaccacgttgcaccgccattcttgtaggggtatcgtctaaactcctaatttgcatataactatgaactatgaattatgaactatgaactattcttgcccctcctaaactccaaaactccccccaaacgaccaaacgactaacccccaaaacaaccaaactgcgacaaaagaaaagggtctttttcgcgtctgtcgcagatgaggtggcctgtcgcacacagtgagggaaaaataaaggaaaaaacattgcgggcgctcaaaaccgccctatctttgcatcagaaacaacgaagacagggaaaataaaattaaaaattaaaaattaaaaattaaaaattgaaaacctgtcggaggaaagaaaaagaaaataataataacaaaaaaaagatacgattatgaagacaatggaattaaccccgacaacagttgccaactacaacagcatggcaatgacaacacgagtgagcaacttcaaaaaggctgcaaagaaattcttcaaggccacgtacagattctttatggtaatcagcccggtctacccgcagtatgttgagagccagaaaagaatggcatagaattcttttaagaacctgtaggaaacaagaaaacaataataacaattaaaaaagcaacaattatgaaatcaatgaaatattttttggcagcactcctgtgcttgatggtgtccaccgcatgttttgcaggcgaccgtatcatttctcccaatcagctccccaaggcagctaaactctacatccaaaagaattacaagggccaggatatcgtctatgccgaggttgactacgactatggccacaaaaagtatgaggtgaaactcatgaatggagtagaactgaagttcgatgctcgcggcaactgctatgaaatcgaccacgacggcgattactaccgtgccaggaccccgtacaccagagggaaagcccatgtgagaatccattacgatgacgatgatgattacgatgattgataacgacgattgattacgacattctctcactaattaattgaacaggggtgtgtcaaaaaaaaatgacacgcccctattcatgcataattacatggcaatgatatgttgaaagaaaaacatgaattaccatcaatcactcatgaattttgtcatcaattttttcttcctttttttgagtgccttggcactttttcttgcttcgctgtatgccaagtttttttctatctttttattctttttctgaagcggagcgtttttttattttctcactcatctctctaatcagactactccaatcaacgccccctgaccccttctaatcagactcctccggcctacggccacctccccttggacaggggaggagtggggagtgccattcggctcacggcaggcatggcggggagacgccatatatggacgtctctaccacgttgcaccgccattcttgtaggggtatcgtctaaactcctagactcctaaactcctcaaaagattcatatgcccaaacaacccaaacgactaaacgactaaaccaccaaacgactaaactattttttgcccatatgcaatcaaaattgatatttttttattaagtttgcaaacagaagaataattttcacacctaaacacctatacaacaatgaagataatcagaattttaatgatgctcttgtcactgtttggattgcaacaggctgatgcacaaggtaaccgcagcagggcaaggcaaagcaggaaaaacatcaagacaaacctccaaaataataaagaaatgacttttaattacggacaacacacctataccatgcgtgggacgctgagtatagaaagctacgaccaacaggccaccggtgaggttaccttcacccatgtgccagccgatttcgcagagtttgaggcagtctacaaacagtttctcggcaagacaccgcatggcacggcagccatgatgcccatggccatggaactgtacgggcgcgaccgcgcgctgggcctgcaatgtctggaactgatttgctacccatcgaacgttcactctgtcacctccatcctcgacacgaaatacaaggcatcgtcgcagtcgcccgacaacgacccgtacatacagcgctacctgcctgctgccgtgctgaagggcgccacacccgacaacgcctacagtccgcaggagccttacaccgtggagatgagggccagtgttaactcgcataagcagatgcagtttatgggcagcggcacggtgatgtacatatatgtcatgggcaagggatgggacaccgaaaagcgtcaggtggagattgttcaagagcctggcagcgaactgcatcagatgttcaattgcccctcgctctatacgcagtgcaagaacatcaaagggaagtggcaaggactgaaatagaatgcaccacagaagggccgcgaaaggtaccctgacccctcctaatcggactactcctgtcaacgccccctggccccctctaatcagactcctccggcctacggccacctcccctcggacaggggaggagtggggagtgccattcggaccacggcaggtatggctgagagacgccatatatggacgtctctactacgctgcacacgacatctcaagcggacgcgatacatcgcgtccctacaggttacaccgccatccttgaaggggtatgtctaaactcctaatttgcatataactatgaactatgaattatgaactatgaactattcttgcccctcctaatctcctaaactccttaaaacctaaacccccaaacaaccaaaccaccaaacctaaaatgatcaaaagaagcaaatctaatcaccacctgacgacgacactgatgaggacactgctgttggtccttctgatgatgacggcagtggcggtggagggaaaggtgaaagtgaagaatgtcaccccccagaccacctatgccgcatcacggctgagcacagtggacccacggttgagcatcaccatcaccgtcagcggcaagggagaagcggaaggattcaccctcatccgaaaaggcaagaaaatcagcatcaccggcaacgacggcaacggagccatctacggagccaaccgattgttggaactctatcaggccgaccccaccctcagcacgctatccatcgtcagggaggtgcccgagatgaaactccgcggcgcctgcgtggggttgcagaagacggaatacctgcccggtcaccgcgtgtatgagtatccctacacccccgagaacttcccctggttttacgacaaggagctgtggacccgttacctcgacatgctggcggagaacaacatgaacgccgtctatctgtggaacggccatccctttgcctcactcgtcaagctcgacgactatcccttcgcccctgaggtggacgataccacgatgcagaaaaaccaggatatgtttgccttcctcaccaccgagggcaaccgccgcggcatccgcatcatccagatgttctacaacatcatcgtctccaaacccttcgccgaccactacggcatcaagacacaggaccgcaaccggcccatcacgccgctcatcgccgactacaccaggaagtccatcgctgccttcgtgcagaaatacccagacgtgggtttcctcgtatgtctgggcgaggcgatgtcgggcatcgacaacgacatcaaatggatgacggagaccatcatccccggcatcaaggacggactggctgcctcggggcgcaccgacacaccacccatcatcctgaggtcgcacgacaccgacggaccgacagtgcttgggaagtcgctgcccctctaccccaacatctacacgatgagcaaatacacgggagagagcctgaccacctacgagcctggcggaccgtggggcgagacacacagaaaactggctgccgccgctcccatacacatcgacaacgtgcatatcctcgccaacctggaaccctggcggtggtcttcgcccgctttcgtgcagaagacggtgaccgccatgcaccgcgtacaccactcaaaaggtctgcacctctatccgcaggcctcctactgggactggccctacaccgccgaccgactgcccgacggacagcgactgctgcagattgaccgcgactggatgtggtacaaggcatggggccgctacgcatggaactgccatcaggacaaagacatcagcttctggcaacgacagttggccgaccatttcggcatcgacatggatgctgccgcccacttgctcaaggcatacgacgaggtgggcgagatagcacccaaactcatccgaaggttcggcatcaccgagggcaaccgccagaccctgctcctgggcatgaggatgagccagttggtcaacccctacaaatacaccatctatccaggcttctatgagagctgcggtccgcagggagagaaactcatcgaatatgtggagaaggaatggaagcaccaggcacaccagggtgagatgcccctcgacatcgtggcagagtgcgtagcacatgggaaagccgcctcggaggcgtttgagaaggtggccaacgcacaccccacccgcaatgccgatgaactgcgccgcatcggacaggacatcgccaactatgcgctcttcgccatgtcgttccagcagaaagtgctggcagcacagcaggtgctcaactacaaatggacaaaa

SEQ ID NO: 4196 - DNA, 23600 bp, synthetic construct
  misc_feature 1..23600: note = Synthetic
  source 1..23600: mol_type = other DNA
aaatcttccttattaatagaagtaacctgattactctttggatcatcctggcgatatgccttatataagtacaccttagctaagaacgctgcagcagaagcctgagtaggtctacccttatcaacctgagttttaggcagactattgtaggcttcagtcaagtcatcgataataagctgccatccctgatcattagaatattctgtattcgaaagaagattatattcatcatacgtcatattctcattcataataaaaggaatattcttataaagacgtttcaagaggaagtgagcataagcacgaaggaatttcatttcgcccaaacgctcctgcttgagactatagctattgtctgtagaatgaagcagtgcgatagcagagttgacacgagagatacagttataaagacgtacccacatatcattaatattccagttggtagtaagaactccttgctgtacttcaagctggtggaaaacatcaccatcactagtaccgctaccacctttatacgcatcgtcactgcgtacatcaaagttccacatagagaaagaagagttgatatcctctgcagacgtaaagatggcatacgcagaagtaaccatagcatcagcgttttcaggctttttcacctgatcttcgctgagagaaccctgtggagtgtgttcatctaagaagctgtcgcatgatgaaaaaccggttacggcacatgcggctaagatgaatgaatatattttggttttcatattgttaatcgttttaagttagaaggaaacattgagaccgaaggttacgttcaatgggataggatagccaaagtttggattctcaggatctacaccactgaatttattagacttgattgtaagcaagttctgagctgagagatatatgcggagacgttccatatagagcttctcggctagcttcttagggaagttgtaacccaactggatagtacgaagttttacgtatgaaccattttctacgaaatagctgcttacacgtttttcgttattattatccatggtgctcactgctgggatattactacccatattggtaggagtccaagcgttaagaagtcgttcacccttattcaagttagagatattcaaaccactccaaaggtcagtttgtttcttgaggtcagatatgacatctactccctgaacaccttgccagaacatcgtaaggtctagattcttgtactgcaggtaaatattaagaccccaagtgaaatctggagtagggtcgtagatccaagtttggtctttctcgttgatgacattattgccgtctaaatctttccagcgcatacgacctaaaccagcaccattctgagtagcgtggttatcaatctcttcttggctcttgaagataccatcgaaaacataacctacctgtgcacccataggatgacctacaacgctctctacgccgttaccaccaaaggtaccgttagcagcgatcgtttcaggaagtttggtaatcttgttgcgataggtaccgaggttagcagagaggtcatattggaaatcgtgaatctgaccacggtagcccaaattaagctcaatacccttattttccatttcaccagcgttgatccactgtgaactaccttcacccattacagcaatacctggcatatataccaagatatccttggttttcttatagtaccattcgaaggaaccatagatcgagtttttgaggaatgcgaaatcgagacccaagttggtttgtgtcgttgtttcccacttcaaatcatcgttaccaagctgattacgtttgtaaccactaggaagtgtagaaccaccgttactaccggtgatatcatagcttgtaccatagctttgtccaccaaagccagcctcaccatagttactctcatagagtgtataacgagcgatgttagagatttcctggttaccagtttgaccccaactgaaacgtaatttcaagttgtctatccaggtagccttcttcatgaagttttcctgattaatacgccagccggcgctgacagccgggaaggtaccataacgattatgcttaccgaagcggctactaccatcacgacggatagtaaagctggcaagataacgatcgtcgtaagaataattagccttaccaaagaatgaaactaatgtataaccttcacccgtaccatatgcttcagcctctcctacaccagcattaggccacatataatcaggattcaagatagagaagtcatattttttaccgctaaaagaaacatcatcttcacggtttaactctgtaccaatcatgaagtcagcacgatgtttaccagtttccaagttataggtagcgatagcgttccacatccacttcgtccagtgctcctgtttggcctctgaagcatttgttggattagctacgttaccctcagtaacaggataggtaaggatacgctgctgtttctgtgcataatcgagaccgaaagtagtcttgatattcaagttcttaataggattgatatttacgtaagcatcaccaaacatacgccaatacgaatagcgattgtcgctgttgcgttcgagacgagctacagggttttcacgatcagggtagccaccgataggacctgcatattcaccgttacgagtataaacagggagagaagggttaaactgaagtacattttctaggaaaccacctggagcctgaacttcagaagtgcggtttaaggtaaagttctcacctactgtcaccacattacgattacctactttaataagtttataactggtattcatacgagcagagaaccgctcgaaatcagaagacttgataatacccttattcttgtagtagcctagagagaagaaagagctaccacgatcaccaccattgctgagtgatacattataattctgaatcaaccctgtacgagtagtctctttgaaccagtcagtatcagcagcaggagtagtaccagcattatcgatgtatttctgcatcgtgatattgttgagtacaggatatccttgagcatcgtaagcccagtcatagtgatagcccaaaccatttgtgttaggatcaagtccatcgtttacatagccctgccacatgacttggccgaattccttggcattgagcaccttcatcttgtgggcataagtctgtacggcgatactcgcatcaaagtttaccttaactttgccctctttaccactctttgtagtaataatgataacaccattagcagcgcgactaccatagatagaagcagaagcagcatccttgagtacttgaatactctcgatgtcgtttccgttaagttcgtgcataccagctttggtaggcacaccatcaataatgtagagtgggtcgttgttattcaaggttcctataccacggatacgtacagtagcattaccagcaggagaaccatcggcagtaatattcataccaggaactcgtccttgcatagccttgatagggttgttttcgttttgctttgcaatatcactggcacttactacagagatggctccagttaaatcagctttacgctgtgtggtgtaacccgtaactactacttcgttcaaatcatttgcttcttcatgaattgtgattttcatgttaggagtagcaggtagttcctgagtcttgaagcctacataagagataacaactatggcacctttgttaacttttaaggagaagttgccgtctaagtctgtaacgacaccatttgtggtacctttttccataatcgtagcaccaataacagattcacctaggggatctagtacggtaccactgacatcaatcttctgtgcattagcgatagtacataccatcatgaacaaaatgctcagaatagtctttgacagatctttcattcgatacgatttttagttactaattagatttacttttgcatagttacaacaaaaatctaaggattagcaattgatatcgttcgttagatagcaaaaatgttacatgcaacatattttgcaattatagtcaaaaatgttacaatgttgtagtgtaatctcttgtagttgtgttcgataacaggtgttatttgttatttttcttaagatcagctgggtaaatgtcgaattcctttttaaagcaagaggcaaagtaactaggggttccaaagcccacttcgtaacatatttctgatacacttttatcactattaagcaataaggcgtaggcttgttggagacgcatctttcggagcagttctactggagtaagacctgtgagtgcttttactttcctgtatagttgtacacggcttagtccgagttcatctcctaagtcttccattttaagatgtgagtctgccattttttcaagaattgctgttttcagattatcgatgaaacgacggtcggcagtgctcatttgtacggctggaatctcttgtttatgttcattggcttcctttttctgcgcatcatctttatgatgaggagtagtactgaggtttacatttgcagatttcgcaaactgttggcgtaatttctcgcgattataaagtaaactttctatatgactgatgagtagttgtgcattaaacggtttggtgatatatgcttcggcaccgttcttgaaaccttcgataagttgatgatctgtactttgggctgataggagtaaaacagggatatggcttgtgataggatcctctttgattcgtttgcaaaactccagaccattcatgacaggcatgatgatatcactgacaatcaagtctggcactccctcgcgtgccaatttcagtccactttgtccatctgcagcttcaataacataatagttatcagcaaatagtgtgtgtagaaattttcgcatatcactattttcgtctaccaccaggatggtaggcaattcatctgtatctaatttcagcaacatcttctgatggcccttctgaatatcgttggtgacagacttatcttcatgctgttcatccgcaagcaactgactattcgggatagcatcatcacttacagacagaagtgtatcctcagccattgcttttttcacctgttccttaaaatttaagacatgataaacgacttgctccaaaagactgacatttcgattcaaaatttcgagcagttctttatcacgatcttttttctgtgaacaattagcaagcaattccttagccggaccggctattaatgttagtggcgttttgagctgatgactggcattcgtatagaataaagtttgttcctcatttagttttttcattttgttgttagcttttttcatctgatggtttgcgcgccgtgtagattggatagcacggccaatcaaaagaattgctacgagcgaaatgagaaaagcgaaagcaagaaagtagagcaccatttgttgtgtgtgatactgtcctaaataattttcaagtttattttggatggttatcagatagtcattctgttgcatcatgacttgtgtactaatcatgatatcatctacattggtaggagtaaccacaaaactctggattgtattattttgtttatattttttgccttccagaatattcagtgctaaaagaataatctcctcgccatgagtagggtagatataagtaccagctaatttcccactttttacaccttccaggccctgtccctttccaggtaatccgtcgatgccgagaaaactgatacttttttccagtccacactcttttgcggcctgataagctcctaaggcatcgatatcgctatgacaaaatacaatatccggtcgcttaccagctttcagataagctttcatccttttgtaattatcttcaggtgtccaattggttatcaagaactgataatctatcagcgtattttgggtgatggtttgcgcaaaacctttatgtcgttctcgtgctggtgacatttccatcggaccagttaattcgagcacgcttgtttttctgcctttattttgtgattgtagacgatcggccagttgcagcgcatatcggccgatacaagcgccagcttccacattatcaccaccaatataagcagtatagtttttgggagatatttttcgatcgaacaagacgacaggaatatttttttgtcgtgctcgttctatgcttttggtaatgtgtgaatattcataaggagcgataaccaacaaatcgacatttgcatcgatgaggctgtcaatttgttgaacttgtttttgagcattatcataacagttggcaatcgagatttttacttccttatcatagagatgttgtgctgataacatttcatgatttaccttttcacgccatttgccacttgaacactgacttacacctatcgtataataagaggtagacttgttgcaacatgtcagcaaaagtggtatcagcaaaaggagcatgtattttttcatctttataattcagtttgatgtatttattttgtttcaaaattataaaaaagatgtgaaactcacaaataaccactcttatttgtattagaattattatggttggagaaagtggggggacattgaataggagtagaacgcagcttttccattttatatcaatcgacattttcgctatagtttagtatctctatttactgtattttttgcaatatcacaacttttaggtattgtgtatattgtatcgtctacgtacctttgcaaactatatatgagaaaaaagattctacagattcacttgtggctaggattcctgtcaggaatcgtgattgtcatcatggctgtcacaggagcattatatgcattcgctgaggagattaagactgtgggtattgaggccgttaatcctcaaggtgagatactttataccccagggcaactcaaagaaattcttgtaccggaactgcgtaaattagaggggggcgatgtcgtggcttatggtgtaacttatcagcctgcaccaaaaccgagtatgttaacctattcttctcagaatacgagttatggtaatgtatatatcaatccgtatacggctgaaattttgggtaaaccaacgggtgaagatttcttcaactgggtcatggctggtcatcgttcattatggcttccaccaaccattggtcggctgattataggatggagtatggttatttttgttatcgaattgcttacggggttgatactttggtttccgcgccggtggaatagaaaagccattcgtcagcgattaaccgtgaaaacgaatggtggtcatcgccgattcttttatgatttacataattctttgggcggactgattttgttgcctatattggccataacctttaccggactaacctggagttttcctttgctagccaaaggctactataccttactttctagtaaaacttatcatgaatggagcatgcctgtatccgacacgacacatgtcgatacagcgaaaatcaatgatgaggctatgtgggataaagtgttaatgcgaaagcctgatatgaaaacgagttctgtacgtttcgatttcccgatgggaaacacgggcatctatacagtggtctttaatccgaaacctggtaagaattactctaatgactatcatttttacgaccgttattctcttcgggaattagctggcggaggagtctatggtttgtcccagtcccaggtgaatggaggtgacatcctgtttcgtatgtcttatgatatccattctggagctattgcaggcatacctggcaagttgatcgctttcttgttgagtatcattgcagcttctttaccgataaccggatgtgtgatttggcttatgaaacgtaaaaagtaaccctgaggcgacgtagcagggttacttataacgatattctatcggtgtacatcctaaatggtctttaacgtattttccgaagaaactggtattcggaaaacctactttatcggctatttccttaatcgtcatatttgtgttctgtagataatggataatatcagccacagtatactcggtaatccattcattagccgtctttttggaattcttcttgcaaattacggtaagatatttaggtgacatacagagttgtgaagcatagtattccactgtacgatgttttttctcagaattttgtagtaaatcaagaaactggttaaagcgtgtaaggttctggtttactttcggctttttgatttctgttgctccgttttggcgtagtatacaacaaatagcaattaaagcagcttgcaataaactcttaaagatgtctattcttttattttacaaaaagtgttgtgagaatcgcattaaacaaaaaagggaaggcattaatgctttccctttttgttcgtcagatattctgcaaagattctggcagcactttcaactttagcaacacacggtcgcttcttgtagtattcagcagtacgttcagaggcaacataactgttggctgctttatcatgcccgttgagtcctaatatctccgcacagataatagaaccattctgcagtttggattcttccagtaactgttgaacgatcatatagcaatgtgatttgccttcacggtcggcaccatcagtctgtccctcttccaagccaacgagcatcacgattcccgacacagccccacacatcatacgcattctgcctacgccaccaccaaagcctgcagcaatctttaaagctaattgatgatctaaaccatacaaatcggcaaaagcagctaccacactctggcagcaaccgtaaccttgcatgaaataatcgacagcatgttctacacgtgtttcaaattctgggcttatggtattattcctcatgatgatgacaatgatgatgacaactactgtcgccatacacgatagtaccgtttagatactgtgtaagtacttcttcgatagcgatggtaggagctccgccatgaatcttaatgcccaactgttggagcatatttactgcaccctggccaagaccgccacaaagaacatcggtagccccttgagcagcaataaacttaggcatggcaccatgttcgtgctccggagcctgcatcacgacagaatcttttacctttccgttttcaatggttacaaatgttacttgtggtgctttaccgaaatgttgccacaattttccttcacatgttggaatagctattttctgattcattacttgtattttttgtttttatctacacgttataataacgtatctcctttttcattgcaaagatactaaacctttttgaaaatatgcccttccgtatcatttaaaaaaatgggcatgtcacatcttatggttttagccatcgtcagtgtcatgccctttcattaattctttaaatcttaaatttttaattctcttatcttcttttttccttctttcattagagctaacctattgtatatttggagcttttaagcttgagtactgattaaggctactaaacctacaccaaggacaatcatcgccatatataaaatagtcattaccatataatactcctttcctgttggtaatttattacacattatctcgtttgcgatgcaaagataggaataatatttagtatcgcaaacgattcagataacttattaactggttttaataaattatcgcatacgagtattgtaaattatcagttgttaacatatatcgtataagattattaatgaaaatcaaagatgagaaaatagtacgaaacagaaaaagaagaagtgagttaaatatgtatagtaataacattgttagttgttttatatcaataaattcttcatctgccgataatgatctacatgctcatgccgatggagtatcgataaagccaagaatggtaaagtctatagaggtgatgacggcacctggtagaggtatttattaaaaacaaaaactcccaccgaagcgggagtataggataacatccttcggcattgctgccttattgcgataagatgtaggatatcttattctgtctacaaatatacataaattatttggcttttatgaattttattattaattttacgaaaaattaataatagtctaaatatggaaaaaattttaggtatagatacaggtactaatagcttgggttgggcaattgtggaaaaacaagatgatgagtataaacttatagatcgaggggtgaatatatttcaggagggtgtaaaaattgaaaaaggtaaagaactttctaaagcggcagagaaaacgagttataaatctactcgtgtaagatattatcgtataaaattaaggaagattaagttgatgaagatactcagtgcatatcacttgtgtcctcctgtatcacaagaagaattttcagtttggcgtcatcgcagtatatatcctaaaaatgaattacttctaaaatgggagtctacagacgaagatagtaataagaatccttattattaccgttttaaatgtctaactaaaaaacttgatttggatgatgtagagcagcgatatttgcttggtagagctttataccatatcaaccaacgtagaggttttttgagtaatcgtaagaatataggtgatgattctggtgtagtgaaaactggtatctctgatttgacgaaagagatgcatgaagcaggttgccaatatcttggtgagtatttttataaactttatcagcagaaagctaaaatccgtaatcattatacggatcgtaatgagcattacttaaaagagtttaaagcgatatgtgctaaacaagagcttgattacgatttggtatctaaattagagcatgctatatttgatcagcgaccactaaaatctcagaaaggactcgtcgggcattgtccatttgagcgtaagaagacaaaatgtccttcatcgcatccactatttgaggagtttagaatgcttgaatttatcaataatatcaaaattcagacacctcatgatgatacacttcgaccattaaatgaagaagaacgtaaagctattcttcctaagttttatagaaagtctaagccatcttttaactttgaagatattgccaaagaattagcaggacataataaatatgctttctataaaaaacctcagggtaagccatacttgtttaattatagtatggatacatccgtatcagggtgtcctattactgctggattgaaagagatttttggcgaagattggcttatttctgtaagtgaagtctatgataaggctgatggcaagtctgctttacagattatgaatgatatttggcatgtcctatttgatttttcagataaggagcatattgttaagtttggtaaagaacatttgcaacttgacgaagaaaatgcgaagaaactaagcaatatcaaagtttattctgactatgcgtcattgagccttaaagcaatttgcaaaatattaccctatttgcgtagaggcttaatttatcctatagctactttcttagcaaaattagaagatattatacctgctgaaatttggaaaggcggcagtgcatcagatcagattgtcagtgatattctagctgctatagatgccaaagataataatcctgctgatgacagaaccacagaaagatgtatcaaagactatctcatgaagacttatcatcttgcagaaaatgaggttaatagcctttatcatccatctatgatagaggtttatccccatgtgcctgaagataaaaataaacttggttctcctcgtatcagcagcgtgcgtaatccgatggcaatgcgctcattgttcagattacgtcatgttattaatgctcttcttcgagaaggtaagatagatagaaatacaactatacatatagaatttgctcgtgagttaaatgatgccaataagcgtaaggcaatatcacgtatggttaaagataatgaaaaggaaagatctaaagctaaaaacgaaattattaggctttataaagaagaaaccgataataccatagagcctacggacaatgatattttaaaatatttgttgtgggaagagcagaatcatcggtgtatttatacggacaagcaaattggtatagtagattttcttggtaaaaatcctaaattcgatatcgagcatactgtacctcgaagtgttggtggagatacgacgaagatgaatttgacattgtgtgatagttcttttaatcgtaacataaagcagacatgcttgccttcagaattatctaatcatgaagaaatattgaaccgaattgcgccttggaaggaaaaatatgaaaacttggataaacagataagaaagaagagaacatctgcaactatggataaagagcagaaggataagataatccaagatagaaacttgcttaaactaaagcgtgactattggtatggtaaatatcaacgctttgtaatgactactgttcctgaaggctttagccggcgacaaggtacagatatcagtttaatttctaagtatgctcgattatatcttaaatcattctttaaccgtgtatttacagtgaagggtattgctacttctgatttcagaaaaatatggggtatacaggatgtttataccaagaaagctcgtgttaaccatgtacaccattgtattgatgctatcgttatcgcttgtttaggtcctagtgaatacagcaaattggctcaatattatcgtgatgaagaaaatcacgaatggtatggctcatccaaacctcacattgcggcaccatggccttcttttgttgctgatatgaatacaatacaaaaagaattaatagtagctcatcatacttcagacaacttagttaaacaaggaaaacgtagaattttgttgaaaggaaagaatgttttggcaatgggcgatgctgcaagggcctctctacataacgagacttattatggtgccatagagcgcaacggtaaaatagaatatgtagttcgcaaggctttgaatgaagagttcaaggattcggatgttaagaatatagttgatgatactgttcgaaataaagtagaagatgctattaagcaatacaagacgcttaaagaagctatagcaaatacaatctggatgaataaggaaaaaggtatagctataaaaaaagtaagatgttatgcaccaaaagtaactcgacctgtagatatacgatatcagcgtgatttatctcctaaaaaatataagcaacgatatcatgtaacaaacgatagtaattatgcaatggctatctatatcggtcatgacaagaagggtaaaccgaaaaatgcttttgaaatgataaacaatttggatgcgtgtagttatttcaaacaaagtaatgacaaggaaattgttggcaaaagtatggtacctcttacaaagaaagattaccctttggcttatatcttaaagaaaggtaccatggttatggtgtatgaaatatcaccagaagaattagattgtcaagagactatggttaaaaggctctataagattgtaggaataagttcatgtgaaaaatccggaattgagtatggtattattaatatggttcatttacaagaagcaagatcaagtggagaaataataggaagatatggagcatttaaaaaatcagatgaatttagaaataggataataatgtatcatactcaatttaaagcacttgtagagggttatgattttgatatcaatgatttaggagaaattaaaatgagatagtatgcttaaacaaacattgttctttagtacgccggttcggttatcgttaaaggatttacaattagtgatatcttggaaggatagtcaggatattgttacccgacccatagaggatataggttttatgataatagaaaaccaaatgatttatcttaccattccattgatgaacgaattggtaaagaacaatgtttgtgtaattttttgtgattctaaaggtatgccttgttctattttacagggattagacacaaactcaacgcagggagaaacactaaagtatcaaatctctgcgccagagccggctaagaagcaagcatggaaacaaattattgagcataagataaagaatcaatcattagttctggataagatacatggtgtaggggataaactaaaaccatattatttgagagtaaaaagtggtgatacttcgaatatggaaggcattgctgcacgccaatattggcaattattatttggcaaagattttaaaagagaacgtgaaggaattccacctaacaattttttgaattatggatatgctattcttagagcagcgacagttagagctatacttggatctggattaatgccaggtttgggattgtttcacagaaataggtataatgcttttccattagctgacgatttaatggaagcttatcgcccttttgttgataatattgtttatgaaattacagaagaatgtaatatagatctcactaaagatgtaaagcgacgcctgttaagcatattaactatagatgtaaaaatgggaaaagttactcgtccgctggaagttgcattaacaagtacaacagcttcattggtaaaatattataaaggcgaaagtaaaaatttaaatctacctatatttatatgacagaaaatcgtttaaatacttatcatatcatgtggttattcgtattttttgatttgccagttatgacgaaaaaagagcgtcatgatgcaaccttatttaagaagaatttagaaaaggatggcttttcaatgatgcaattttcggtttatgtacgtcattgtggatcgtatgagagtttacttgttcatattaaacgggtaaaatcctttatacctactgcaggtatggtaagcgttttatctgtaacagataagcaatatagtaatatttataattttcgtggtaccccctcaataaagagagaaaaaaaactaaataaagtgagaaaagaacccattcaacttgaatttttttagtacttttgcatgtgagaatattcctatgctattgttttttcattcggaaagaatgtgttatgcctgataaataggggcttaagccgaatgaggttgcgatttgatgtaggaaatttaagatatacaactcagacatgatggagcttactactctcctagttgcgatttgatgtaggaaatttaagatatacaacactacttgcatcatatacacaagcaaatggttgcgatttgatgtaggaaatttaagatatacaactaaatcaggttagacaagacgctttagatggttgcgatttgatgtaggaaatttaagatatacaacttaaaatggttagtactgatgattcaactgttgcgatttgatgtaggaaatttaagatatacaaccccactaggatccacaagatagagtcactgttgcgatttgatgtaggaaatttaagatatacaacttgtatcctcatatcgtttattgtttatttgttgcgatttgatgtaggaaatttaagatatacaactataagaaagctattcaagaacgcattaagttgcgatttgatgtaggaaatttaagatatacaacaatgtcgcagccattatgcctgacgattgggttgcgatttgatgtaggaaatttaagatatacaacgtaaaagcattaatctgaccacgatagaggttgcgatttgatgtaggaaatttaagatatacaacagccacaatggcggctttaagaggtgaaagttgcgatttgatgtaggaaatttaagatatacaacgtcctgtaagaattgaccgtgattaaggtgttgtgatttgatgtaggaaatttaagatatacaacaaccattgcggctcgctgtagtggttacagttgcgatttgatgtaggaaatttaagatatacaacttaaatcgttactatcatgaaaaagttaagttgcgatttgatgtaggaaatttaagatatacaacattgaagatgcacaagggtgcaagactaagttgcgatttgatgtaggaaatttaagatatacaacgaacagcttcatttgcacatgctaggaagggttgcgatttgatgtaggaaatttaagatatacaacataactatacaaaccaacgatataattttgttgcgatttgatgtaggaaatttaagatatacaacaattaagccagcacgataaccgtgcgcgagttgcgatttgatgtaggaaatttaagatatacaactgcagcagtttgggcagcgttaaatttaggttgcgatttgatgtaggaaatttaagatatacaacgcacactatctatcaaatctaagaacacaggttgcgatttgatgtaggaaatttaagatatacaacagtattcgtgtcagggttataagtatcgggttgcgatttgatgtaggaaatttaagatatacaacatacatgagaaatgccattattaggtctagttgcgatttgatgtaggaaatttaagatatacaactgctccaagcggcgcaaagattcgcatcagttgcgatttgatgtaggaaatttaagatatacaactgaagctgaaaaaggttatagcctgtggtgttgcgatttgatgtaggaaatttaagatatacaacgagtacatggaagtagcacctgactctaagttgcgatttgatgtaggaaatttaagatatacaactttcttagttttcggttcttcaggtgtatgttgcgatttgatgtaggaaatttaagatatacaacccacccagataggagcgaaaacattctcagttgcgatttgatgtaggaaatttaagatatacaacatcatcagcaaaatttgtgtggtctcctagttgcgatttgatgtaggaaatttaagatatacaactgatgttgaggtggagactatcaagaacagttgcgatttgatgtaggaaatttaagatatacaacctgcagcctggtctaatgctgtcgcaaatggttgcgatttgatgtaggaaatttaagatatacaacagaaggaaaagaacgccaatatgccaacagttgcgatttgatgtaggaaatttaagatatacaacctttgtaaagggcacttaatgttttaatagttgcgatttgatgtaggaaatttaagatatacaactgattgcttttattgcgttaaagatagtaagttgcgatttgatgtaggaaatttaagatatacaactaacttctgcttttttttctagatcccgtcgttgcgatttgatgtaggaaatttaagatatacaactgctgcaccttcatcgccacaattcttcagttgcgatttgatgtaggaaatttaagatatacaacgcacatggaatgcacttgcattgcaagatagttgcgatttgatgtgaccaatacagattggctaccaattcttcatctgccgataatgatctgcatgctcatgccgatcagaaataattatttgtatcatacacataaggcgccagttcaaattgaaccggcgcctttatgaaccctctaagtgacagcgtctactgcagggggctatgtttatttccattatgccataccgtatggagttgatttcaaaagggcttcaccccaaatcaccaaacatttggcatacaagttaacgattctcttcattgtttttctcattgctctcaacatgttcataatttgttatcctaaatttaatcaataatatcctgaatacttattttttcttcggcaaaggtaagcacaaaacagtaagagaccatgtaaaatgagatatttaatgagaaaacaatctttttcttgattagtatcaagttcttgatttagaataagttacaaagatattacatgatgtagagggcatgacactgacgatggggtttatagcccatagaatgtgacatgcccttttttatttactcaaataaagatgtaaacttaaacaaattaacatcaaacagtccctgatcgctgagtttcaacgaaggaatcacaggaagcgccatgaaagaaagtctacttatctttctatatttattgccagtctcttgaatgatttaacataaggacttcctatatataatttttgtgatgatggatacaaatttgtagactagatatctatgcttagaaaagctgagcatgtaaaataatttgtggtacttgtctcgcttgcccatgaatatataatagtcctctattacacgaggaggaataatatcttgtatggcatgcaggagaagttcttgatctttttggcattttgtagttgtactgattcctgtttgatcaaacagactgagagtccctttaatgcgttgataactaacattatattgcactaatgcatgaaggaagaaatcacggtctgccatgattttgtatctttcatcatatggatagatttcaagtacttttttgcggatgaatgtacttgggtgtggtagagatcccttgataaaatattctaaagtcacctcttcaggtacatgtagtgtggtatgatcagaaaaatctaagtctgatgaaacgatatctgcagtagggttttgttggaaagctttctgtagagcttcattattcactaggatgtcacctgaatttagaaataggcagtattctccttgggcggcttgtgtacctttattcatggcattatagatacctttatctttttcggtcacccaataggcaaaatgatcttcgtattggtgtatgacctcaatgctaccatcattgctaccaccgtcaataatgatgtgctcaaaatccttaaaggtttgatgtattatgctttcaatagtcttttttaggccatctcggttattatagtttatagtgatgattgataatttcataattctttaatccaatttgctttgattataatattgagtaatttaagaacttttatgtcgatttggtaaatgagtttttttaatttaggtaccgattctacttggttcatcatctttcgatacggagaagtgccgaagcaataatcctcataatcttgccggattcgttctggaagcatgtgctgtaattcttgaatcacttcattttggccaacttcactttctttttcactgaatcctcctccttcaaagcgagctatggtgatggggagatggttataggtcttgttttcaaagattaatgtatggagaaaccatttccagtctgatgcacttctaagagtttcatcgtatggcttattttttagcaaagtagtcttgataaaacttgcctggtgatagatggtctttttataaagacttcttagggttacttggtctggatttggacagataatatctttacccatacagaggtctccacagataacatcttctaccatatgatgttgcgttacctgttcgattacttgatggttatagaaagtgtcgccagcattcataaaaatacagtattcgccttgtgccttttggatacctttattcattgcatggtatatgcctttgtctttttcggatacccaaaagttaataatgtctgtattttgtttgatgatgtccacacttccatcgttgcttccaccatcaatgataatatattcatagtctgaacaggtttgattacgaacacttagaattgttcgttgtaaaccttctgtattgttaaaattgatagtaataatacttattttcatatgagcgtgtggtagataatggatagaagttcgtatgtattgatccctttttgatagagtacgtggtaacattttattttctgctgaagtgaccccgttttaatggtactaaccaatgtgatcttattatataaatcaagatacgatctgatgtttttttgatagaaatctgtccattcagatttgggattgatttgaggaatgttatctttcagccattgattgtatagtattctggcttttaccttttccgtcaggtcagatgtattgctcgatatattgatatcgctccatctaaatcttaccaaatgttcctgactgtttacgcacccatgttctgccatcatgattgcagtggcatcatcggaggcccaagctttgggaaaatttacaaatccaccgtgagcttgcaatgttttacgcttgaatatgtattgtgggatacctcccttcatgtcgtggagcatgtgatatgtaaattcttcttgggaaaggtattctttataacacgaatcaatattcaaaatctgattgtcggcatttacttgtaaaaggcgtgaacgaaacagatccgcttgcgggtacttataggtgagttggttaaaggttgacaaaaaaaggggctcataaaaatcatcatctgttgctagaatgatgtattctccttgagcatattccaaacagtgattccactgtgctatcaggtcatgaccgcctatattttccgaattgcggtaatacctgcaatggatgttttttgtagacatactctctacaatagattgaattggctctggtgaacagtcatccacgatgactagttcaaagtcatgataagtttgattcagaatactctgaatcgcctctcgtagatatttgcctttccagacgggcatgataaatgagaatttcatttttagcttactgtttagaggatgaatactttagtggagtccgggtatttttgattttatcttattgagaacgagggtccttgttgtagaatcaagtcctttataaaatatgagcggacaggagatgagtaaacttatcatcgtaacagtgctaagtcgccagaatccagctgtcatatagttgtgaatcatcattgggataatacttgctgtaacaacgaataaagttgttttcaaaggaacatgcgttatgtagtgggctatgttgaaacctatatacttatggagtatccaaatgtcaaacaagaacgctcccgggtagcaaatgatagaaatcaggtaggctacagtaggattggcaccaagtttcatggctatataggatattggtaggataagcaggtatatgagagatgatgtgatattgggcagtttcatctttcctacggcattgatgccataacctaccggaaagtcaatggcctgtatcataatttggataatcgacaacttgacaaatgtggaagcatacggaggtatgtttcccaaccagattctcaagatggtatctgactcgataaatatggggatgccgaacagcatgcacatatatgaagagtatttggcaccatatacgataagtttttccatttccttgatattgccttgcgcatactgtttgacaatttgggggcgcatggctgtctgaaaattgaaaacgaactggctgacgatattgctcaatgatcctgcaactcctcttgcagcattcactacagtgccaaaaaacatattcagtaatacagtgataccctgcccatttaatgtgaacgcaatagttccaatcgcattccatccgatatagttgaacatctcgtagtagagttttaagtcgggctttaatctaaactggcactcactatatttacgaaggcaatagagtacatagaaacaagatgtcatgaggctcacgatgaaggtaaacagggcaaacatctttagcttatcggtatagattaccatgagtaggtaaacgatgacgagtttcatcaccacatcaaagatactgatgtatgcatagattcccatgtcttcatgcgaagttatactggctctgaatggagtttgtaaaatgcttagaactgctgtaatcagggataattgatacacaaacatcgcagcattttctcgaccggactggatattcagtttgttttctacataccaaatgccgatggtttcgccagctaacagaatgagcaaggctaatgctaaatgtatggcaaatgcagcagaaaaaacagttttcagacgatctatatcttcttgtccaagggcaaaagttagaaagcgggtagtaccttgggttatatagctgtttaaaaaggccagtaatgagataaaaccgcctactacattatacagaccaaagtcattaaagcctaatgcttgtaatatgatacgggaagtatataaagagatgaataacgttaaggtgaatcttgtatatagcaaaagtgtgttttttgcaatacgtttataattttgacttgtgtcttctgtattctcttccattattcagtgtgtatctttacttgatgcaaaggtacattattttttttgaatatttatatttacaaaatatctatttggtattataataacatataatccgatatttctacgcaaagcagaaatatcggattattaattttgatgtatctatttttagatctttatttggtcttcagcgagagtgttgcgataggcagtttactcttgatgcttacattgacagtgcctttcttttgcgaactgcgaaccacgagcattgcacgtcctttccaggtcttgctgtgtactgatggatatggctcttcatctttcaggttagcagaagcaaatgccagaagttttccggctcccttcacggtagcttcgcatggtatctctgcttcaggtacaaggttgccgtcttggtcaactacttcgacaatgatgtaggtgagtgattgaccatcagctctcatgacggttcgatcaggagtaagtttcaaacgagctggttcgccagctgtcttcagcgtaacgctttcttcgccagcttctgcacgaagtgttcctttttggtaaggcacagtgaatactgctttatactcagtattgcgatttacctccttggtaccaatgagttgatcgtttagatagagtttcacttttggttgatgggtgtaaacttccacctctacaggctttccttcccaacccttccaagtccaagattcataggtaggccatacgctccacatggtttgtttaatttcgccatgatatccctctggttctttcactgccatataaagaggagtgttttcgttccatagcatttcacgatagtggctgattggtttgcgccaacctgtgatatcgacatcgccgcatggtgcgccatgccattctggttgtccacctttgatccatgattcaccttcgcgttcacctttataataggtacggccgataccactttcgcctaaataatctaagcccgtccatacaatatcacctactacataagggaaatcgtgtactgtagcccagtttctgaaggcatcacgaggatagctctcggtctgccatattacgcgtttaggatcgcgcttgtggtcatcggcgtgcttgaagagcatatagttatagcccacaacatcgagcacctctgcatgaggatcatatatttcccagtcgctatcccaagcacagagggcctctgtgacaggacgtgtggtatctttctcgtgaatagcagctttcatctgtcgagctgtatataccactcggatatccttacgttcaatcacttcattaccaatgctccaggagataatgcttggatgattgcggtcgcgcaacaccattgactgtatgtcgctccggaaacaggagtcgattacggtagagtagtcgtatggattcttctgtgtgcgccaaccgtcgaaagcttcgtcgataacgagcattccgatagagtcgcatgcatcgagaaatgcacgtgtagtaggattatggctcgtgcggatgaggttgaaacctgcattcttcatctgacgtacctttcgtatttcagcatcgtcgaaagcgcttgctcccagtactccatcgtcg

SEQ ID NO: 4197 - DNA, 23597 bp, synthetic construct
  misc_feature 1..23597: note = Synthetic
  source 1..23597: mol_type = other DNA
caaccatcttctttgccttctcgaactcgctgtctttctttacttctgatgagtaaacacctacgttcatacggatctttgctgtgtatcttccaactacctcttcgcaagcgtcagaaatctctccaagggaagcccttgcctttgcagcctcaactgccagtgcaagaaggttgcccttcttggtccttacgcactctgtgatagcggccagacactgtttaactttttcgttgtctcttgtcttgtagagtttctccagacgagcaacctgctgctggcgaaccttggtgttgtcgatgtcaaggatcttgatagggtcctcgtgctcgagacggtagcggttcagaccgatgatggtctcctcgccggagtcaattcttgcctgctttcttgcagcggcttcctcgattctcagtttaggaataccggtctcgatggcctttgccatacctccgagtttctcgacttcctggatatgctcccaagccttgtgagccagctcgttggtcaggctctcgatgtagtatgaacctgcccaagggtcgatagagcggcaaatctgagtctcctgctggatgtagatctgggtgttacgcgcgatacgtgcggagaagtctgtcggcagagcgatagcctcgtccagagcgttggtgtgaaggctctgggtatgtcccagggctgcacccatagcctcgatgcaggttcttgcaacgttgttgaaaggatcctgctcggtaaggctccatccggaagtctggcagtgggttctcagactcaagctcttagggttctcaggattgaactgcttgacgatcttagcccaaagcattctggctgccctcatctttgcaatctccatgaagtggttggttccgattgcccagaagaatgaaagtcttggagcgaacttgtcaacagggatgccagccttgataccggtacggagatattccagaccgtctgcaagggtgtaagccatctcgatgtcgttggttgcacctgcttcctgcatgtggtaaccggaaattgagatggagttgaacttaggcatatactgtgaagtgtaggcgaagatgtcgccgatgattctcattgagaactcaggagggtagatgtaggtgttacgtaccatgaactccttgaggatatcgttctggatggtaccggccatttcctcgagcttcactccctgctccagacctgccacgatgtagaaggccatgatagggagaacggctccgttcatagtcatggaaacggacatctttccgagagggatctggtcgaagaggatcttcatgtcctcaacggagcagatgctcacgccagcctttcccacatcgccgacaactcttggattgtctgcattgtatcctctgtgggtaggaaggtcaaacgctacggaaagacctttctggccggcagccaggttccttctgtagaaagcgttggactcttctgctgtggagaaacctgcgtactggcgtactgtccaaggcttctgaacgtacattgtgctgtacgggcctctcaagaaaggagctacaccggctgcatagttcaggtgctccattccttccaggtcttttgcagtgtagttggtcttcactgctatcttctcaggggtattccaaagaacttccttctttgctgcacccttctttgctgcaggttttgcagctgacttatatactaaatcgttgaattttggacgcataactttttcctccccttatttgataagtttttcctggtaagccttgagtgtctccagcacgttgctgcgtacactgatgaaattctcgattcccttgccgatgagctcgtccttgcaagcagggtcacctgccactacaacgatacccttcttgccaactatcttggcaatctcaggaacctcgtttgcatattcgtcgtctgaagagcaggcaacgatgatgtctgccttagccttgagagctgcctttgcaccttcctcaggagagttgaaacggttgttgtcaactacctggaaaccagctactgcaaagaagttgcaagcgaactgggctcttgcgcggcacattgccaggttaccgtaagtaaccatgaatgccatagggcgttttgccgccttgtctgtcttgaacctgagttcctcgaaagccatggcgcctctgtaaacctcgagaggacggccaagcattccggccttcttcttaggagcggccttacgtgttacggtcttcttggtaacttccttctccacaacctctgtgaagttagggaactggttggtaccaaggagagtgtctcttctggttgcaatgttggaatctctcttcagcgatgtctccttgatgctgtcctggatcttttcagccttgaaagcctcaacataaccgccttctttctctatggagttgaacagatcccaagaagtctttgcaactgcatctgtgagttcctcgatgtaataagaacctgcacccggatccacaaccttgttaaagtggctttcgtccagaaggaggctctgcacgttacgcgcgatcctgttggagaattcgcccggcttcttgtatgcgtggtcgaaaggaagtacttccatggagtcaactcctccgatagcgccgctcattgcctcggtggtatcgcggagcatatttacataaggatcgtaaaccgtctggttccaagcgcttgtgactgcgtgaaccttgatcttgcagctgtcttccttctttgctccgtaagccttcacgatgttggcccagagaagtctggctgcacggaacttggcaatctccatgaagtagttgccgctgatggatacggtgaacttgattctctttgcagcctcgtcaacctttactccggcatcctgcaggaggttgaggtattcgctgcccatattcattccgtatgcaagctcctgtgtgatggtgctgcctgcatcgttgaacgcgtatgaataaacgcccacaactgttatgtgagggaattcctccacaagctcaatagccttgacaagaagttttgcagcatctgccttgctgtaaaatcccgtggcgttgagttccttcagagggtcatagtcaaatgaagcccttactgcagaagctcttacaccgctttctttggctatcgcgatgaaattcttcaagatagaaaggtctttgcaacccttgaagttgacttcaactgccttgaggtcaatgcccttcaggagaaccttcatgtctgccttcaggactttttcagtctggctgaggtcgaaaccaggagctgtgactcccttcatcatgccatccagagccagagcgttggctgccttgaaatctttgccgaccatgtagtcctgacggatgagccagttgttgtcgtctttggtgcctcttacaaaaggaaactctccagcctttccgccaacttccttcagacccttcaggtcttctgcgcggtaataaggctgtacggagaaaccttccatagttctccacacgagctttttctgatagtcggcacctttcaaatccttgattatagcatcttcccagacctgtttaggaacgggaggaaactcagtaaataatttctctgccatattattactgttgtttgataggtgtgtattaattataaataatgtccattcagcatcaagccaccggatgtcacctaaagaacaggcatgttggcaccggtgcttaatgataggcggcaaagataacgaataatattgtactttgtaagcgcagagcatagaaaagcgcaaatatttttaaccattaagctcagcgatgccgtttgctgccgccagcctgaccgttgaaggcaaaggctatccagaaatcccgtcatccgttcccaagtagcaggggccgtccagaaatccccgggttctatatgtactcttcgcccctaagcttgaccgttgaaggcaaaggctatccaggaatcccgtcatccgttcccaagtagcatgggtcgtccagaaatccccgggatccgttcccaagtgaggaaggtattcaggaaatttgtttcgggaaagaaaatttttatatctttgcaccccgcaaaagaaaaaggaggtggtataaagcatgattatagttcctatcaaggacggcgagaacatagagagagcattaaagaagtttaagagaaaattcgagaagacaggcatcatccgcgagctcagagatcgtaagacctttgagaagccttctgtaaagaagcgtgcgcagctgatgaaggctatctatgtaaagcaccttcagattaacgaggaataataactgctcaggcagtattgtttaagtgttaaagagggaatcacagcaatgcggttccctctttttgcatatagcagtgaaagtgtaccaggtggggtctgaaacgggacatcttgcacgtttttagggcagaagagtggctatcggcactggaaatgtgacgttgggcacgctttctgagcaaaagtttgagtttttgaaggagttctgtaaatttgccgtgtatgggaagcttcaacgattttctggactacttacaggtgaaaaggaggtactccgagcgtacagtaaggctatatggcgacgctgtgcgggacttccttaagcacgtgtatccggaaaagctgatggtgaactcaggtgccggagtcagggcagagaggctgatggtgaactcaggtgccggagtcagggcagagaggctggcggtgaattcaggtgccggagtcagggcagagaggccggcagtgaaccccggaacttttgaggaaggggctttgggggatggtgcttttgaaggaagccgggacgctgaatttccgggcttttccgacgaggaggtccttgaggctctgaggttccctttgatccgcggctatgtggcttcactgttggaccggaatcttgatgcccgcaccgtgaaccttcacttgagcgctctgagcactttctgcaactacctggtaaagcaggggaaactgcattccaatccggtcaaggaaatcgtgaggcccaaagaaaagaagcgcttgccgtctttctacacgcccgatatacttgaaaagtattttgaatctccaccggacattgaatctgctggaactgcggataactccgggaagccggcttcagccaagacagtgtactgcgcggtccggaacaggctcatcgtggctctgctattcggcacggggctgaggcgggcggaagctgcatcgctgaggacaggagacatagacctctccagaaaaaccatcaacataataggaaaaggcaacaagcagaggatgataccgctgcctgattctctttgccaggagatagaggattacctgctgctccgcgatgagtttatttctgaggtctgttcttccggagcgcttgcccgttctggtggccaatccggagaggaaaaagtttttttgccagatgccggaggaagaccaggaactgacgcgttcttccttacagatagcggtaagccggtgtatcttgagttcctgaaccgtgtggttaagagcgaactgtctggcattgagggtatatcaggcagaaaaactcctcataccctgcgtcacagctatgctacggcacttttgaacaacggggcggacctgaacagcatcaaggaagttttgggacactccagcctggctgccactgaggtctatacccacaactcctttgaaaagctcaaggaaatctacaagaccgcgcacccgagagccaaagaatgagagggttcagcttctggcggttcttaaatccaatgtatcttgcaataaaactttcagcatccctggatgttctgcaattaaactcgtatatttgggcataaaacatttgaatcatgaaaaagttctttttcctcactttggctatggcattcgttgccctgtctctgaatgcccagagctccaaggctcagaccggcctcaagaaagtctatgacgaaaacattaaccagctggaacagatagacaaagctgttgcaaaggccaagaaagaaggcaagttcgtgatatgccagcttggcggcaactggtgcccgtggtgcctgaagtttgcggacttcataaccaaagatgctgaaatcagcaagttcatcagcgacaactatgtctatatccacgtgaactacaatccgcggatggccaagagcaaggatgcttcaactgtaaaaatgtccgaagccctgatgaagcgtctggacaatgccggaaggttcggctatccggtgctggttgttctggacggcaacggcaaggtgatccatatccaggattcaggatatctggaagaaggagagggctacaacaagaagaaagtccagagcttcctcaagaactggacaccgaaggccgttggcaaataatgaaagacaacactcaagcagataagtataaagaccgtgcgctgggttgtatggttggcggggccgtgggagacgccctgggctatgccattgagtttgacagctggcaggaaatagaacgcaagtacggcccaagtggcattacccgttatcaacttgacagatggggggttgcccgtatctcagacgacactcagatgtctcttttcaccgccgccggcattcttctgggaatgaccagaggctatatgagaggcattatggctcgcatagatacctattgccactggacatatctggactggctccacacgcagcagtggactgccagaaaagaagacgagagagttgattcctggctgatggatatcccccagctctactcctgccgggctcccggccatacctgtcttaccgccctgatggctttggagaaggaccagactccggtcaacgacagctgcggctgcggcggagtaatgcgcacagcgccgtttgccattcttgatttcctccacagctatgcttccggagatatacttttttgcgatatgtgtgctgctgaggctgccaggatgactcacaagcatccgcttggcttcatttcttccgctcttctcaatcacattctgaccaggattctgggtggatatgcggatggtgaaaaccgccaagaccgtcttgtctccctgatacaaaaggccgcggaagagattggttcaatacagtctgcaccagatgataacaaaacttacaaagaactctggcctaagcatatagccacccaacaagacatcatcaagaaggccatagaccttgccggaggagacactccggaccacacagccattgagtccatcggcggcggctggaccggccacgaagcccttgctgttgctgtttacagcgcagtcaagcactgcacttcttttgaagacgcaatcattagcagcgtaaaccactctggagacagtgattctacaggtgccgtctgcggcaacatcataggctgtcttcttggccgcagtgcaattccggcccactttacccagaacctggagcttttagacatcatagaagaaattgccacagacctttacaccggctgcataatcagcgatcacgatcctgtagacactcccgaaaaacaacgctgggagcagaagtactgccaccaccgctatcctcataagcgctgaacttcatttgttaattcaggcgaatgagcctgtaaaaacttttcatttgacagaacttgtcaaagcggccttttatttttgccgttgaaaatgggaaagagttctttttcctgtcttttacacttcagagaacattaaccaataaattacgcgtatgaacattattgaaatcgttgaaaagacatttggcgagtattgcggagagttttccaaaatacttgaagaagacactgaaaatggtggttttggttttaagccgtggcttcaggcctggaatgacaaaaaaaggcggagcatacacgaatccaatcaggtatataaattcatggaagcatataaagaaacggctccaaatccttccaaagtgcttacttggatggaacttccggttattattggagagttatatccttgcactcatcatattgacggttttatcgtagataacgaacggaaaattcttttctttcttgaagccaagcgtttgtcaaggaagagcaactatgagagtttgaattgtgatgttgggcttctatatgactttagacgctatgagtattcaaattttaaaggcaaaatttgcgatagttataaaggattgaacctgcttgaatatgacgcctttgcaatttgccttgttgacatatggaaagacaaaagttcgtggacaaaagaaatggttgagaattggggtacttatgatgatttttcaagaaaccctggatatacgttgaaaaatggattgaaggaagtttatcctggctacttccagggttattatcttatgccattttttaacagcaaaaaatattttcacgatatatcaggacgaaagctccgtaaaaggacagacgaaacactattgatttatgatgacgagtttgcttttgaggagtgtttggctgatacttactattgcgagtccgctcctgcggatgaagaatctctaatagtagataatattgaaaaaagagattatgacatttgcgaagattataaaaatgcacaggactacaagaaggctgtcaagaattatatgatgatccggttaggtgtttctgaagaagttgctgagaattccataagggaaaacgatgcgactcttgatgactgctggaaagacaaactatcagttcccgctgcagctacagggctgttgcacaatttcttgtaataaaagagcaccaccttgctacccctttacccatctccccatctgttttccaatgcattcagtattttcaaaataaacagacccaaccaaacttcctggaaagatcctttatgagatttctgtcttggaccggaaggtggattgttgctgtaagttgttttgtctgcctcttgaggatattagcagaatcaatgttgtactgagtttgcaaattcatccataaatccgctggaatgtcaagagctttttcaagtttgacagccatattcagagatattgagcgcttgccgtttattgtctgacttaggatagatgttttaatgccagtaatatcggcaagctgtttctgtgtcatttttctttccgccaactcgtcttttatcaattctccagggtgtgttgcaataaaaggagtcgtgctctcatcaataacgttatttggtgttattctattcataatgctttgatatttctttaattaaaatgatgttgatgatcccggcttctccagctctgctttttaatagcaatcggtattgatcatttatccatacggtttctatgttactcaaattccccttctttttctcatagtgcagactcttgattctaaacaaggattcaattcttgttgctaatttcagatagttcacaacttttacgtagcgagttatgatatctttcggcaatttgttataagttttgtcttgagtagttccgttgctgtataactcccacaggctttcactttcaaattctattgtcattttatttctgcaaatataatatttgtcaattaattatcaaaaatgataactatttttgagtctatggcatttatatcgagacaaacttatatccattccttttttcaatccaaatcttatccggatataatcgattataatcgtttgatgatttataaaacggattagaggtctgaactatagtaagttaaaattactatttctattcagctcgttcttgaaaaggaggctatcgtttcttttactaattgaattcaggggtaattatattattctttgacagaaattgtcaaaaggctccaatatctttgcgcgcgaaggtccttgccaataaaaaaactcccaccgaagcgggagtttaggtaaaaaccttcggcatatagccttattgtgataagatgtagaatcttataacacaaaggtagcaaactttgttgataaagcaaattaatgttaattttatagacaaatatttattgattatgtctagaatacttggccttgatttaggaaccaacagtataggttgggctattgttgatacacaacagaatggatcctacaaactatatgacaaaggtgtatctatcttccaggagggagttaaaattgagaaaggaaatgaatcttcaaaagcagcagaacgtactggatacaggtctgccagaagaagaatatttcgtagaagattaagaaaaattgagacgttgaaggtgttggtagatttaggttggtgtccttatttatctgtagaacagttgtcagactggcgttatcgtaacatttatccaaagattgacgagtttatgctttggcagcgtacgaacgataatgagcaaaaaaatccatattattatcgtcatcttgcgttaacccaaaagcttgatttgtccaaaaaagaggataaatacatcttaggccgtgttatgtatcatctttctcagcgaaggggcttccttagcaatagaaaagagaatacaaaagaatctaatggcaaggttaaagatgacatatccgctttgaataaagctcttgaagaaagtggctgcaagtatatcggtgagtatttctatactatctacggaaaagaaaggattcgtgctcactatacttctagacaacactacaaagatgaatttgatgccatttgcaaaattcaaggaatttctgactcaatcaagaaacaactcgaaagggcaatcttcttccaaagacctctgaaatcgcagaagggctctgtcggccattgcaagtttgagactaagaaaaccagatgccctgtttctcatcctcgatttgaggaattccgtatgtggtctttcctcaacaacatcaaagtcaagactccatatgaggaggatatgcgtccgttgaatggggaggaaataattaagatccttcctcttttcttccgcaagagcaagaaacaattcccgtttgaggatatagccaaagccttgtctgctagagggcagtatgctttttacaaagaccctgatgaaaagccgtaccgtttcaactacaagatgtttacttctgtttcaggttgtcctgtgattgccggtttaaaagaaatctttggagacaattgggaagagggcattatttctagatacacagataaaaagcaaaagaccaaagagcaaattgttaatgatgtatggcattctttgtttttcttcagcgatgatgaaaaacttagagcctgggcaaaggaaaaactacagttatctgaagaagaggctctaaaattcagcaagatctctatcgggaatgattactcttcacttagcctaaatgccatcaataagatattagtgttcttgcgtaggggattcaaatattctcatgcagtctttttggccaatatctcgagcattgttcctaaagaaattatttccaaccccgaaaatcgtaaaatcatagaacgagagataggtgttatcgttgataatccttcgcctacaaaagaaacaatagagcagaggatcaaagaattcctgatggacaactttgatttgggcgctgctcattatgagaggctctatcatccttctatgattgatgtttatgctaaatctaacacaggtttcctaggctctccgagaacgaactctttcaagaatcctatggctatgagggctctgtttaggttaagggctcttgtgaacgatttgataaagaatggcgagatagacaaagacactaaaatccacattgaatatagccgctctcttaatgatgccaataggcgcaaagctcttgaaagatatcagcgagatagggagaagaagaacaacgagttcagagaagagattattaaacatttccgtgaacatggcattgatgcgcaaccgacactgacggatattgaaaagtatcgtttatgggaagagcaagggcatatatgtatttacacaggagagagaatagctctttctcagttccttggctctaatccgcaatacgacattgagcatactattccaagaagcttgggcggagaagacgctttggaaaacaaaactctttgtaacaacaagtttaacagagatgtaaagaaaaacaagattccttctcaattgtcaaattatcaggaaattcttatccggcttgaaccagtaaaagaaaggattgaggagcttaggaaacagatagaaaaactgaagggtggcagtgctgcaaccaaagaggtgcgagacgctattattcaaaagcgcaggcttctggaatatgaaaggaattatctttctgacaagtacggcaaattccttatgaaggaggttccttccgactatagaaagaatcaggatgttgacaacagcattatatctaagtatgcacgtccttatttgagaaccatctttactcacatatacacagtcaagggtttgaccacatcacagttccgcaagatgtggggcctccaggaggacgaaaagaaagaccgtagcactttcctcaatcatacggtagatgcaatcgtaatagcctgcatcggtcctaaggaatactccgagatggctcactattacaaagccgacgaagagttcagatggttcggaaagaatcgtccgacaatgcctaaaccttgggcaacctttactgaagatgttcaaaacatcagcaaagaggtccttgtctctcactatacaccagataacctgaagaagcgtacatataaattgttgagaaagcgaggtgaaatccagaaaggtccggatggtaagccattgatgacaaagggagatactgctcgtggcgctcttcaccttgaaaccttctacggagccatacaaagagacgatgaaatcaaatatgttgtcagaaagcctctttcatccctggagaaaaccgatataacaaagattgttgatgatgttgtccgtcaaaaggttgagcaggctatagaagagaaaggcttcaaagaagcgatggctggcactatttggatgaacgagcagaagggaatacaaatcaagaaggtcagaatatttaccccttccgttaccaatcctatccatctgaaagatttgcgagacaaatctcgttttgagtacaagcagcaactcaatgttgcaaatgacagaaactattgcatgggtatttacgaaggaactgacaagaaaggtaaggttaaacgctctttcaagctggtaaataatcttaatgctgtcggcgctgtcaatgagggtgtttcttccaatatggttcctgttgaagacagcaatggtttcaaactcaggtatgttctgaagattggcacaatggttcttctctatgaaaacactcctgatgaaatctatgaggccaaccaggaagagttgaccagaagattgtataaggttgttggactgtctgttttaagtctgtctaaccgtgattatggaagggtgaatctttggtacaatcaagaatcccgaccagcgaaggaggtaaaaacaattaatggtgcgtttattagaggagaagatatacgagcggctatcatgaattatcacacacagttaaatgcattggttgaaggcttcgattttactctttctccttctggaaagattcgtttcataagaagatagtatgatgttgaagaaagcggtttacttctctaatcctgcgaaactgtcgctgaagaacaaccagctgattgttgagtatagggatactgatgcacccaatcggtccgttccaattgaggatcttggttatgtgataattgtcaacaatcaaatatctctgaccattccattgatgaatgcattggttgataacaatacatctttgattatatgtggcaataaccagatgcctcattgtatgcttcaaccgcttgaggccaatactgttcaggctgaggtttaccgtgcgcagatagaagcaagccttcctcttaagaagaatctttggaaacagataatagaagcaaagattaagaatcagtcgaaattgcttaataagttggggaaagatggtaatctgctagccccttactatagaaatgtgaagagcggagattcagataataaggaaggtgcagcggcccggatttactggaaacaattgtttggggaggatttcatccgaaatagggagggtggtgatcctaatgctgtcttgaattatggttatgcgatcttgcgtgcagctgtagcaagggctttgatgggttctggactttctccggcattcggcatatttcacaggaatcgttataatgcgtttcctttggcagatgacataatggagccctaccgtccttttgttgatgaatgtgtctataacattatgacattaggggaatgtgaactgaacactaaagtaaagagtgaattggtgaaagttttgttttgcgacacatatttccctaaaatgaaacgtccgttggatgttgctttgtctatgactacagcttctcttgtcaagtgtttttctggagaggtaaagtcaatagtatatccgtcaatatgagcgagattcgcttgaacgaatatagaataatgtggttgtttgtcttctttgatttgccgacaaacacgaaaaccgaacgccgtaatgcagcaaagttccgcacattgcttatgcgtgacggtttctcgatgatgcagttttccgtgtatgtccgcaattgcgcttcctatgaaagcttgcaggtccatacaaaaagagtaaaaggtattttacctcctagtgggagtatcagtttactgagcgtgactgacaaacaatatggtgatatgcataattattggggtaagatagaggggctgaagaatgcagagtctcaacagttagagttattttagctatatttggatggaaattctgacatcaaattttacttcgtagggcttgagatggtgtttttttttgctttggcagcgcctctaaatggctgttttttagaccaaaaatcaacctacgttgtggtttgatgtagaatcctgataatagacaacggatggattgaggaaaccatcagcggaacggttgtggtttgatgtagaatcctgataatagacaactgaggtgcgtatgaggtatgctgacgagcagttgtggtttgatgtagaatcctgataatagacaacgaggtgcggatgaggtacgcagacgagcagttgtggtttgatgtagaatcctgataatagacaactggatgcttcacaagttccatgctcagatagttgtggtttgatgtagaatcctgataatagacaacagggggcctcttcctctggtggcgttcagagttgtggtttgatgtagaatcctgataatagacaacccatcacctggaataatataggcctcccaagttgtggtttgatgtagaatcctgataatagacaaccaggatcttcttaccattgccggtggaggagttgtggtttgatgtagaatcctgataatagacaacatgacaaagtaccatttacaagagagccaggttgtggtttgatgtagaatcctgataatagacaacagtagaccctaaagttgatattatggcctagttgtggtttgatgtagaatcctgataatagacaacagggaggagagggagaccttgctgtgaggagttgtggtttgatgtagaatcctgataatagacaacttcaattttagtttgccgaactgatggttggttgtggtttgatgtagaatcctgataatagacaactgaatcgatttcggacgatagccagtaacagttgtggtttgatgtagaatcctgataatagacaacaaccgaagacaaagaacaatatgccgtaccgttgtggtttgatgtagaatcctgataatagacaacgataacgttggatggtctgcaatggacgagttgtggtttgatgtagaatcctgataatagacaacttcaaattgtgaaatgtaagatggattggagttgtggtttgatgtagaatcctgataatagacaactttaacgggcgatgtcggtttggaacatctgttgtggttgtggtttgatgtagaatcctgataatagacaacaatgtcggtaacgctttgaatttcggccgggttgtggtttgatgtagaatcctgataatagacaacaatgaacgttgtgggatgggaacaaggttagttgtggtttgatgtagaatcctgataatagacaactttgggttgaattgtacgacttctataacggttgtggtttgatgtagaatcctgataatagacaactatatcctgcagaggataggcagtgatctggttgtggtttgatgtagaatcctgataatagacaacatagtcccgtttgcctgctataatctgcgggttgtggtttgatgtagaatcctgataatagacaacaaaaaaatcagaacatcagactggagcgcagttgtggtttgatgtagaatcctgataatagacaacgtcacatttactataaatccgacattattggttgtggtttgatgtagaatcctgataatagacaacggcacttgatacggtaacgcaagcgtcgtgttgtggtttgatgtagaatcctgataatagacaacgcttctttcaatatctggtaatctgccatgttgtggtttgatgtagaatcctgataatagacaacaaattgatatggcaattgaagaatgtgccggttgtggtttgatgtagaatcctgataatagacaacgatgtgtaaagatattcgcgatataagttgttgtggtttgatgtagaatcctgataatagacaacccgcgtttgtcctttcccttttgactaaatgttgtggtttgatgtagaatcctgataatagacaacattttcagagtaaaaacggctggaaaatagttgtggtttgatgtagaatcctgataatagacaactcaccttattgccagatgcagacactgtgagttgtggtttgatgtagaatcctgataatagacaaccgccggggcaatcattgttttttctttagcgttgtggtttgatgtagaatcctgataatagacaacttcttctggaagaaatcatattcagggccgttgtggtttgatgtagaatcctgataatagacaacttttgtatcggaggccgatatgccggaggcgttgtggtttgatgtagaatcctgataatagacaactatagctatcgaacttactcttacgatcatgttgtggtttgatgtagaatcctgataatagacaacaaatatactggagcatggccagaagcatagttgtggtttgatgtagaatcctgataatagacaacacatatcctgatagatgatgaggcaggagagttgtggtttgatgtagaatcctgataatagacaactataattggttaatcaattcttgcaatttagttgtggtttgatgtagaatcctgataatagacaactttctttggcagaatgttcaattgagccgagttgtggtttgatggtaagcctgtaaagtacgtattgctattttgaaacaagtttgtgcaagttgtgatcaacttgcagcaagtagttgcgagtctatacgagttgtttacaagttgtgttttttgtttcacttgacaagcataatttctcacatatccggcctgtcctgtaaacaggacggtgggagcgtttgggtatgggaagtgtggctatcgtcccaaaaacagggacggtgggagcatttaggtatggaaagtgcgccttccgtcccaaaaacagggacggtgggagcgtttaggtatggaaagtgtggctatcgtcccaaaatcagggacgttgggagcatttaggtggggaaagtgtggctatcgtcccgaaattagggacgttgggaacactttgggaatgttgggggcgttttaattggatgctgggagcatttctgggaagttgggagctcttctggaatgctgggagcgtttaggtatggaaagtgcgccttccgtcccaaaaacagggacggtggaagcgtttgggtatggaaagtgtggctatcgtcccaaaataagggacgttgggaacactttgggaatgttgggggtactttgggtggatgtcgggagttattttgaagtggagtgaacatagtgggagctgtggaagattgaaaactgtgcacattccaggaattttgtagggtggctttgtttttcaggcttgttttttgtatatttggtatgtggtatccgggttcggatgaacttttggaacttttgacgagacagtttaaccaattaaataggaggttgattatggaaattagaatccaatcagttaagtttgatgcagatgagaagcttcttgcatttgtagagaagaaggttgagaaactggaaaagttcttcgatggctttatggaggcagacgtaactctgagtttgcttccggatcagttgaacaaggaatgcaaggtgaaactgcaggttcctaccgatgacatcatcgttacaaggaatgcaaaaagctttgaggatgctgttgtagattgtgtagatgtgcttaaaggtcagctggttaagctaaaggaaaagaagttcggcagataagagtaaacctgtcagaagaacaggtttacgacatcttctgaagaaatacccgcaaaataggcgcccacttccagggtgcctgttttttttctcagcgattctctggtatgaagcgtgccttctatctggcgtatgaactcttcggtagggcgggtgaagaagtagtcgccttgtatgttgaggtctgtgatctttccgctgcggacattgaaatacagttctatgattcctgacgggaatttccggatgttgctgaaggcgtattccggactttttccgaagttccagctgtctgacctgtagcgggtttgctcgagttctccgatttcttgaagctgttcttctgagaatgtgtatggtgtgatgcctggtgtatgggaacagatgtaatcgccgaggaactgtttgagccacaatgtgtctgtcgcctgctccggggcttttttgccggtggattgcttttctctttcttgcaggagccttgtcgcaagagggttgctgagtatgccttcttcagtgaggtgctcttttatgttggtcactcttttgacgttgcttttgacggctttgccgatgaatttctcaggccttggcttcagggcttttgaaaggtctgtcttgcttacatcaaacataagtgttccgtgcatcaggagcctctgcttgtggatgcagatggcattgccggagaatttgagcccgtctattgaaaggtcgtttctcccttgcagacaggcgtttatgccaatgctccttagggcttctatgataggggctgtgaatgtgcggaacatttcagacgtatctgcaaaagaagatccgtgcagtgccttcttgtccgctccgtgagcatcggtgttgtctgttccagaagcgtttttcggggagtccatattctggatgaaggtgaagttcaggtttcccagatcgtggaagaccgccccgcctcctgtaagccttctgacaaccggaatgtggtgtgtctgtgtgtattcagtatctatctcggcgattgtgttctggtatcttcccacaattatggacggggagttcctccagaggcggaagatgtcttcctgcatattcttgagcaggaattcctcttcggccaagttgaagtaggggttggtggaagtgtctgatatatagagcatcgcgataagctaacgacattctctgacgctgcctttccttcccattgcccggataatccaggcaccgatcatatagaagatggcacctgtgatgaaacctgcagctgcaccgcagacaacatcgccgaggaaatggcgggcaaggtaaactctgctgtagcagaccataaacgccaccagaaagacaagcaggctgaaccagccgcgctttgcaaagagggtgatgacagtggcaaaactcactatgttgaaggcgtggttggatacgaagctccaggccccgcctttgccgtctggtgtgcggacaagatcccaggtatagaaatcatagcctggtctaaggcggtggaaataaggctttatcacttcatgcccgaagttgtcggcaaatgcaaagcatgccaggcaggtcagtactatgacaagaatgatcttccaggaattgtagtactccttccttcttatggagaatctccttctggaaacgatatacaggaataccatcacgtaaagaggtatcagaaagtacttgtcggagaagaacatcatcaccgaatccagaaaaggagagtgccagctgttgattgcaaccgtcaggtttctgtccagattgataagattttctgtcatgggggatgttttttagggagggttgtttggactgttgcaggtttatttgtggagcgtttcccagatgaggtccttgagttcttttatcccttctccagttacggaagagatgaagacataagggatcttcttgggcacttttctcttcagcgatgagataaggtccttgtctgctccaaggaggtcgcatttggtgactgccagtatcctctgcttgtccaacagttccgggttgtacatcttgagctcgttgaggagtattttatattcctttgcaatttccagattttcagctgaaaccagaaacagaagtatggagtttctctctatgtggcggaggaacctgtgccccagtccacggccttcgtgggcgccttctatgatgccaggtatatctgccatgacgaaagactggtcatcgtaatagcggactattccaatgcttggttcaagagtggtgaaggcatagtctgcaatctttgggtgggctgcagacaccgtggaaaggagggtggattttccggcattggggaacccgaccagacctacatcggcgagcactttcatctccagtatgaaccagccttcgcttccactctctccttcctgggcgaacttcggagtctggcgggttgctgtcttgaagaaggcgttacccttgccgcctcttccgcctttgagcaggatgcatctctgcccgtgttcagttacttctcccaggatttctccggtttcggcgtttttggcaactgttcccagaggaactttcaggatgacatctttggcgtctgctcccgtgcagaggttgccgctgccgttttctccgttttctgcggagatgtgtttgcggtatttgagactgatgagagtccacatctggctgtcgccctgcattatgacacttcctccctttccgccgtccccgccgtcaggtccgcctttgtctatgaacttttccctatgcaggtgcatggagccgttccctccgttgccggaagtgaggtggagtttcacataatctacaaaatctgtgttgggcatattccaaatgtgttgtcaatagttattcaagttctttgcaaatgcagctgaaaacttcttcaatggtctgttctcccgggatttcgcaatagtttcccttttccttgtaatatccgatcaggggttctgttttctggtggtaggtgtctatcctgttctgtattgtcgcagggtcggcgtcatccttcctgccttctatgagagcgcggtttgcaatccttttgaagatggtctcgtccttgatggcaagtgagatgactttgtccaccttttctccctgctccccgagcatctggtccagcttttcagcctgggctatggtgcgtggaaatccgtccagcaggaagccgttcacatctttgtttgaggcaaatgtactttttatcatacctacgacgacttcatcaggaacgaggttgccgccctcaataagctgcttggcctggagtcccagaggggttccggctgccatttccttgcggagaaggtctccggtggatatgtgcatcaggttgaatttctcaactatgaatttggcctgagtgcctttgccggcacccggaggcccgaaaagaatgtagtatttcatttcagagtttcccttttgtcaaatctttctggattttgttccggtaattattttatattaatgcctttgcggcgttctgtctcttcctcgtcaagaacatagatgtctttgaggttgcgtccgagctggtcataatccaggccgtaacctacaatgaaatcattaggaatgctgaaagcagggtaatctatctttatggagcctttgtagtttcctggcttgaggaggagcgccgagtactttatgcttcttgcacccccgtctttgagtatctggtccagttccataatggtagtgcctgtatctacaatgtcttcaacaacaatgacattgcggccgcgtacgctcttggtcagccccaacatctgcttcacggctccggttgtggaagttccctcgtaggatgcaaggcgtatgaaacacatctcgcaaggaaaatctatgcgcttcataagatctgcatagaacatgaaggaccctgtcagcactccaaggaacagaggagtgtcttcctggtcataatctctgttgattttctcagcgacatcatctaccgctttctgaatctcatcgtatgtgaggtagagtttgaaactcttgtcgtacagttgaacgtttttcatggcagtgtgttgtttgaggaccaaatttaggtatttttgcactataaacctaacaaaattcagatatgaaacccttggtaagcatcataatgggcagcacctcagacctgaaggttatggaggctgcggcaaagttccttgaagagatggaagttccgtttgaaatcaacgcgctttccgctcaccgcactccggaaatggtggcggaatttgcaaaaggtgctgcagaacggggaataaaggtcattatagctggtgccggcggcgctgcacatcttccgggagtcatagccgcatcaaccaacctgcctgtgataggagtcccgatcaggtcttccaactccattgagggtctggattccatattgtccatacttcagatgccgtccgggatacctgttgccacaatggcgctggacggggccaagaacgccgcgatattcgctctccagatactgagcctttcagaccctcagataaaggagcgttcagaaaaattcaagagcgagctttcagacaagattaccaaggccaataaagagcttaagtctctggaattcaagtatagggtaaacggataatacaattccggagttttttgtccgcccttgtccgctttaaggactgggtacattttaccttttggcatcctgctttgtcagcagggtgctatttttgtttccatcaggagcggagtatgaagaatttgatgttggtccttgcagtttgctgctgcggggtttgtcactcccaggtgctggaagcggatgtggaggaagaaataatggacaatatggttgaggagttttcttctttggaggaatctggtgaagatgtgatagctcaccttcagaagttgaggagcaggcccttgaatcttaattctgcctcaagaaaagaacttgcctcaacgatgctccttacggatttccagatagaatctattcttgaccacttgaatcgcagcggggccatcctgtcttttgcggagctctccctgctttatgga

SEQ ID NO: 4198 - DNA, 23594 bp, synthetic construct
  source 1..23594: mol_type = other DNA
  misc_feature 1..23594: note = Synthetic
acacctgtcctccactccatcgcatagagaaggctgatgaaggcggcaacgtcatcgcagatgaaaacggcgtggtcagcatcgaggctccatatttcttcagcaagaccgatgcagaagcgaagtggacgaagattccattcatgggcaagagccttgccggcatgactttgatgccatacacccaaagcgtgaagggagccagcatcacatataagtttaagctgcacaccaagaaggttcgcctccacatcatcacgaaatcgaccctcgattatctcaacaagggcggtctcacgtatagtgtcagcctagatggcgcttcgcctatccaagtaaacctcaacaaagacttgaacgagaagcctgagaacatctacgatctctactatcctaccatcgccactcgtatcatcgacaaggtgattgagctggagttgcctgcattgtcagacggcatccacacactcacactcacacctcacgacccagcgattatattcgaaaagattgtggtggatggaagaaaaggaaagaaaagggtgaaagtgatttaaattgtttggtgacttgacgcaaatttcataactttgcagccaaatcattaatagagaataatatgtttagtggaatcgtagaagagatggccaccgtcgtggctatcaagcatgataaagagaacattgacttcaccctgtcttgttctttcgtagatgaactcagcatcgaccagagcgttgcccacaatggcgtgtgcctcaccgtggtggaaatcaaggacggcacctacaccgtaacggcgatgaaggaaacactcgaccgcagcaacctaggcttgctccaggtgggcgacaaggtgaacgtggagcgctcgatggtgatgaacggcagactggatgggcacatcgtgcagggccacgtggatgagaccgccaagtgcatcgccatgaaggacgccgatggctccacttatttcaccttcgaatatgagttgaacaaggagatggcacgcaagggttacttcaccgtcgataagggcagcgtcaccgtgaatggcgtatcactcaccgtttgcgaacctaccgacaacaccttcaccgtcgccatcatcccttacacccgtcagaacaccaacttctgcaacatcgaggtaggcaccatggtgaacatcgagttcgacatcctaggcaagtacatcgctcgcctgaagagttttgaataagacacacgataaagcctgcttagctgattttatctcagcagcttgcaagcaaacaaggcgatgacgatgaagcagacgagcgggatgatgaagccgatggccatgttggtctcgcctatcacacccatcaacactggggcgatggctcctcccacgatactcatgatgaggaaggatgagcctcgctttgtctcgttgatgcccaagccattgagcgacaaggcaaagatcgtagggaacatggtcgcctcacaaagataggtgagcaccaatgccaccaacgccgagatgcctgaacccaaaatcacgtatgccatgcagaggatgccaccgatggcacatgccaagagcaccttactcgcctggatgcgattcatcagccaactgcccaatagtctgcccacgaaaaacaagcccatgccgccaaaggagagcaacaaggctgctgttctggaagataccgttggcaccttctccgtcacatagttgatgaagaaactattgatgcccgtctgtgctgccacatagaagaagagagcgaccaaaccgaagacaaagacggaggaatgccacaaggatggctccaccttattatatataggagtttgttgttgttccactatctcaggcaactggatgcgagagaagacaaaggcgacaatcagcacgatgacaccaatgacggcgtatggcaaagagaccgaaccgctattgccatcctcgccactgaagaccacgagtcctcccacgagtggaccgacaatccatcccaagccattgagcgactgggcgagattcaatcgtgatggggctgtcgcctcatcgccgagcacagccacataaggattagccgccgtctccagacaagtcaatccgcaacctatcacgaagaggcaagccaagaagaactcaaacgacatcaggctctcgcccggaatgaagagcaaggctccgatgccatagagcatcaagcccgtgatgactcccaccttgtagccccacttgcggatgatggctccagcaggcaacgccatgatgaaataaccaccatacaccatcgcctgcaccaatgccgaacgccacttggagataaccaaggcgtcctggaaatgcttgttcaagatgtcgaggatgctatgggcgaatccccaaaagaagaacaaggaggctaccaaggcgaaagaaaagagatatttcttatctactatcttactcatatcatttataccatgaaaatccaagaggctcatcaagacaaagactcctagattctatcttcattattttcttctaatcgtcaattcgatggcctccggatgcttctcacggaacgccttcacgtcatccactaccagcacgagatagccaccgccaccggctcctggcatcttccaagcatgcacctcaggcaacatggaatactcgtcgatgaagccttgcacgcaaccttgaatcatggctgggaacatcgctacctgggcatcgaacgaagccttgaaggcggaagcgaacgcctcgaaatccttggcgaggatggcattccaacagtcgtcggctgcctttgccaatgccttcacctttggctcggtgatgtccttgccatccaccacagaacaacctgggcggcgaggctccatcggaatcatgcagagatggctctccaaccagtcgagcacctcgtcatcgttgcaagtctcaaacatctctggccagaaacgattgttgtaataatgacggcagagtcccggcatacagataccgatgctatcttgcgcaccgctcacgatgccatcgctgcgctcagggtcgttctcaaaacagaacacgagcttggcgagaatctccggattcatgtcaggtaacttcacgggccatatcttcttgatcatattgcgagtggaagtggaaagtccgcaacgctcacgcacctcgaaggtaggcacgagcgacatggtgatcgcccagccaggtgcaaaacagctcacgtatggttggtcgatccaagtacccgccaagtcgagacgagtaggcagttggcaagtagagtccttgatgtcggtgctagagcgagccgtcaatccctcggcaggagtgcgctccaacaccacatactcgatgccacgctcctcgcagaacttgcgcttggtctcgctgctgccatcggcattgaccacaaagatgtctggtttcacaatatctatcgttggcacgaagtccatgatgccgcttccttggttgatgaaggcatccttgacataacggatagatttcaccatgaaaagacgttcctgctcagggtagaaagtcttatggtgcttatagccaaggatggtctcatcggagccgataccgacgtaaaggtctccatactgggatgcttggcggaaaaattccacatgaccactatgcagaaggtcgtagcagccacttacaaatacttttttcatcgtttgtttttaagcttcttattgatttggcaaattctcttcatgagaatttgtttctttcgcctacaaaactacaatttttattctaatctcacaagaaaatcttgcacaaatattcacttttgcgcacaaacattcctaaaatgtgctattttatgccgaaatatttgggtaaaagacaaaaaaatggtacttttgcggctgtgtttgtcccaaattggacaatgaaagtccgaattacacgaacttgcagaggacaacttgagcaccgagcactaacaaacttagaatattataacaataaccaataattaatatgagtttaaaaatcgtagtacttgccaagcaagtacctgacacaagaaatgtgggtaaggacgcgatgactgccgaaggcactgtcaatcgtgcagctcttcctgctatcttcaatcctgaagatttgaacgcattggagcaggctcttcgtctgaaggagcagaatccaggttctacagttggtattttgacgatgggtcctccacgtgctggcgaggtgattcgccagggtctttatcgtggtgccgataccggatggttgctcaccgaccgcctctttgctggtgctgataccttggctacttcttacgccctcgctacgggtatcaagaagattggtgacgtggatatcgtaatcggtggtcgccaggctatcgatggtgacaccgcacaggtaggtccacaggtggctcagaagttgggattgaaccaggtaacctacgccgaggaaatcctcaaggtggagaatggcaaggctactatccgtcgccacatcgacggtggtgtagagactgtagaggctccattgccagtggtcatcactgtcaacggaagtgcagccccatgccgtccttgcaacgtgaaactcgtgatgaagtacaaatacgctacttgccctatggagcgcaagggtgacgagccttgggctaagctctatgaggagcgcccatacttgacactgaaccagtggagcgtggctgatgttgacggtgaccctgcacaatgtggtttgagcggctcaccaaccaaggtgaaagctgtgaagaacatcgtgttccaggctaaggagagcaagaccttgacaggcagcgatgaggacatcgacagcttggtaaaggaattgttggacgaaagtattattggataatcccaatctgaatttttgaaagaaattatgaacaacgtatttgtatattgcgaggtagaaggcacaaccgttgccgaggtatctcaagaattgctcaccaagggtcgtaagctcgccaaccagcagggcgtggagcttcatgccatcgttgccggtactggcatcaagggtaaggtggaagaccaaatcctcccttatggtgtagataagttatttgttttcgatgctgagggtttgttcccatacacttcagctcctcatactgacattctcgtcaacctcttcaaggaggagaatccacagattgccctgatgggcgccaccgtgatcggtcgtgacctcggtcctcgtgtttcttcttcattgaccagtggtttgacagccgactgtacagagcttgagattggtgattacgacgacaagaagagtggcaagcactatgatggtttgctctaccagattcgtcctgccttcggtggtaacatcgtggctaccatcgtcaatccagagcaccgtccacagatggctaccgttcgttctggtgtgatgcagaagcacatctacgagggtgagtgcaagaaggaagtggtttatcctgaggtgagcaagtatgttcctgccgaggacttcgtagtgaaggtgctcgaccaccacgtagaggctgccaagcacaacttgaagggttctcctatcgttgttgccggtggttacggtgtaggtagcaaggaaggctttgaccagctcttcgagttggctcacttgctccatggtgaggtaggtgcttctcgtgctgccgttgacgctggttgggtggatcacgaccgtcagattggtcagacaggtgtcaccgttcatcctaaggtatatatcgcttgcggtatctctggtcagatccagcacatcgccggtatgcaggattcaggtatcatcatctctatcaacagcgatccagatgctccaatcaacaagattgccgactacgtgatcaatggtaccgtagaggaagttgtacctaagctcatcaagtactacaagcagaactcgaagtaagcacttgtagtacccatcacattatttatatataaagaaaagcaaaatggctaattactatagtgatcatcctgagattgaatttcatctcaatcacccattgatgaagcgtgttgttgacttgaaggagcgcaactacgcagaaaaagaccagtttgaagatgcacctgtcaactacgaggatgccatcgagaactacaagcgattgcttgatattactggcgacgtggctggtaacatcatcgagccaaactctgagagcgttgaccaggaaggtcctcacttggagaacggtcgcatgatttatgctagcaagactttcgagaacttggaggctacccgcaaggcaggtctctggggcttgtcaatgcctcgccgttatggtggtttgaacttgcctaacgcagtgttctccatggcttcagagattatctctgccgccgatgctggtttccagaacatctggtcactccagagctgtatcgatactctctatgagtttggttcagaggagcaacgccagaagtacatccctcgcatttgcgctggcgagaccatgagtatggacttgacagagcctgatgcaggttctgacttgcagcgtgtgatgctcaaggctacacaggatgccgatggcacatggcatttgaatggcgtgaagcgtttcatcaccaatggtgactcagacatccacttggttttggctcgttctgaggaaggcaccaaggacggtcgtggtctctctatgttcatctacgacaagcgtgatggcggcgtaaccgttcgtcacattgagaataagcttggtatccatggttctcctacttgcgagttggtttacaagaatgccaaggcagagctttgcggtagcactcgtctcggtttgatcaagtacgtgatggcattgatgaacggtgctcgtctcggtatcgccgctcagagtgtcggtgtagagcaggaagcttacaatgagggtttggcatacgctaaggagcgtgctcagtttggtgagaagatcatcaacttcccagcagtttatgacatgctttcaagaatgaaggcgaagttggatgcaggtcgttccctcctctactgctgcgctcgctacgtggatatctacaaggctttggaagacatcgcccgtgataccaagttgactccagaggagcgtcaggagatgaagaaatacactcgtcttgccgatgctttcactccattggctaagggtatgaactccgagtatgccaaccagaacgcttacgatgccatcagcatccacggtggttcaggtttcatcatggagtacaagagccagcgtttgttccgtgacgctcgtatcttctctatctacgagggtacgacccagttgcaggtagttgcagccatccgttacatcaccaacggtacctatctcaacatcatcaaggagatgatggagagcgaggtaagcgacgacttgaaggcattgaaggagcgtgtaggcaagctcgttgagctttacgaggctgccatcaacaaggtgaaggaggctaacgaccaggcagttcacgacttcttggctcgccgtctctacaacatgacaggcgacatcgtaatgtctcttctcatcctcgatgatgctaccaaggcaccagagatgttccagaagagtgccaacgtatatgttcgcatggcagaggaggaagtcctcggtcattctgcctatatccagaacttcaaggcagaggacttggagagctttaaggcataaatggttttctctcgcagatttcgccgacaacgcagattcttattcgagtcaatcggatttcatgaatcagatttctgcgagataaagagataaaataataataggagataagaagcaagaggttgctgcttatctcctattttttgtttcttcaactggcagaatgccttccattgcttatccaatgacagctcttcatcaggtggaagaaggaagtcttgaaatttacttgatatattccaccttgctgtcatcccttggcttcgccgctggagtctcatcaggatagcccacggcgaggatgtagctgatttcatagccttcaggaagacggagctgagcgatgaatggcttgtatgcctcgctgcgctgaaggaacatggcggcactgcccaggcaacaagtgccaagccctagtgactgggcggcaagcatcatgttctctcccatcaatccgacattcagcgtggcataatgatcatccttcggacaagccacgacgatgatgttgggggcattgcgatacatattcttgaagttggcatcacgcttcacctgctcaggattttccttcttgaatatctccgtggtacccttgatgaagtcaggattttccaccaccctcacagcccaagtctgctggttcatcgcactaggcgcatagatgccacacttggctatcaccgccagtttctcgtgctccacaggcttgtcgagatacttgcgaacggaacggcgagccatgatcgtttggattaccttattggtcaactcccctttcgttaattccaacgcaaaaggaaaaccgccttgggtaaacacgccattcaacttgccatcatccttcaactttcctgcatacaccgccttcaaagcatccatcttgatatttacagaatcggctgaaagataattcacagcagttggaataccgtatgctccctggtcgggactatccattgtgacagccttttccccactgacatgaaacactaagtttaatgaagtcattcccaccttcaactgtccttgccagtttcctaccaagccagattgtgccttgccgagcgatggcagcaacatcaagccacaaaccatccaagttttcaaattccccatatctttatctccttattttaatattatattagattcccgtgcgaaattacaaagaaaaacgcaaacacacaaataaatctcccaaaaataaatgagcaatctttatttctatagcctttatcgcaattaactacaatacaaggcttttttgtactaaaataagctaaaaatatatttcaaaagttgacacatacaaaactttacactatatttgtcaataaattaaagaaagtcatgcaaagtgaaagtcagaacatatataatgccatctcgcacaaggattataccggtcctgccattcagatgcgcatctatgacaaaagcatcgaattgtggaactatggcctattaccaaaagagctgacaccagccaagctgttgcaaaagcactcttccttccctagaaaccataacatcgccaacgcattctacaaagctggctttgtggaatcatggggacgtggattcaagaagattgccgaagagttcgaaaaagccaagctcccattgccaacgatagaagaagaatgtggtggcgtgatggcggtaatacaacgtaagacggtggatgaaatcatacaagaacgagaaagtggcggtaatgtcggagaaaatatcggaagaaatgtcggagacgtgtcggagttcaaactatctgaacgccaaactattataaaaaatataattagttcaaaccctacagttaccgccaaacaaatgtcggagactttgtcggtgacttctagaactatcgaacgagacttatcggcaatgcaaaaagctggcattatcagacatgaaggaaaagacaatgctggtacttgggttgtcctcgaacaaaagaaacagaagagatatgaaagataaaaataatgagcaaatcgtcttcgaaatgctcgaagaggttgcaacagaaagtatcattgaagcaagaaatgcctacacatacgaagagatagatgattgctatgtggaggctaagaagattgcggaagtggcaaagatggaattaaacaactacacgaacacaaaatataaaacataaaaaaactcccaccgaagcgggagtataggttttacaccttcggcaattactgccttattgtgataagatgtaggaaatcttattttctgttgcaaatatataactaaaaatttggttatccaaataatttgttgtacttttacaaaaaattaataattctactaacaaaaaattccagaatatgaaaaaaatactgggaatagacacaggaacaaatagccttggatgggctattgtcaaaaaagagacaaatgaataccatttgttagacaagggtgtgaatatctttcaagaaggcgtaaagatagaaaagggaatagaatcttctaaggccgcagagcgcaccatgcataaagccacaagggttagatactatcgcatcaaattacgcaagattcgcttactacgcatattgagcgacaaccaactctgccctccattaacaagtgcagaactttctgcatggagactcaaaaagatatatcctaagaatgaattattcatgcattggcaaagcacagacgacaatgtagataaaaatccgtatgcatgccgccataaatgcttacatgagaagttagacttaactaacctaaccgataaatatacattaggtcgtgcattctatcacatgatacagcgtcgtggtttcctgagcaatcgaaaagaccaaactagcgatgatacaggaaaagtaaaagaaggaatcagttctctcacagaagagatgaacaaagctggttacgagtatcttggcgattacttctatcacctatataataatggtaaaaagatacgcaatcattatacagcacgtaaagaacactatctttcagagttcaaagccatctgtaaaaagcagagtctctcccaagacttggtaagcaaaatagagaaagccatctttgaccaaagaccattaaaatcacaaaaaagtcaagtgggcaaatgcgtatttgagaagaacaagactaagtgtccttcttcacatccaatgtacgaagagttcagaatgttgtcattcatcaacaacatcaagatacagacaccaaaagatgatgagttacgccccctaaataaagaggagcgcagtaccatcatgccattattcttccgtaaatctaagaagcaattcgactttgaagatattgccaagaaattagcccctaagaagcaatacggcttctctaaaaaggcaacagactctgagatgccttatctcttcaattatcctatggatacttctgtatctggctgtcctgtcacagctgcactcaaagacatctttggagacaactggattgatggcatcagtgaggtgtacactcttagcaaaggaaaagctagtcaagagatagtcaatgacatttggcatgttctatttttctattctgacactagtaagcttgtccaatttgccaaagttcgtctccaactcaacgataatgaagccaaggcatttagtgaaataaccataccatcagcctatgcagcattaagcatgaaagccatctgcaagattctaccatatctcagaagagggttgatttattcacatgcagttttcttggggaatctgtgtgaggttatgccatcttacgaatggagtatcaaggaaatgcgtgaggctgccatagacaatatcattcgagaaatgacaaaatacgactgccacgatgaacgtacttttgaaacttgcatcaaagattatattcgagagcaatacaatgtgccagaagagaatctaaaaaagctgtatcatccatccatgatggaaacctatccaaaagttcgccctaacacacaaggagagtacagactgggctcacctcgaatcgacagtgtgcgcaatccaatggcaatgcgttctatgttcagattgcgtaagttgatcaatcgtcttttggaagaaagaaaaattgactcagacacagagattcatatcgaatttgcccgtgagttgaatgatgccaacaaacgcaaagctattgctgattttgtaaaagagaatcagagcgccaacgacaaagctaaaaaagaaatagcaatgctctataagaaagaaatgggcaaagacattgagccaactgattcagacatcattaaatataccctttgggaggaacaaaatcacatctgtatatatacaggtaagcaaataagaatatcagacttcatcggtacaagcccaaagtttgatatagagcatactatcccgagaagtgttggtggtgacagcacaaaaatgaacttgactctttgcgaaagccactataatcgtgacatcaaaaagaccaagctaccaacagaacttcctaatcatgacgagattatgtctcgcattgcagattggaaagaaaaatatgagagcctagaaggtcaaattcgtacccagaaaaagaaatccaaaggtgccacaacaaaagaagcaaaagataagataatagctaaacgacacctactagaactgcaacgtgactattggaagggaaaatacgagcgttttactatggagagtgtcccagaaggattcagtcgccgtcaaggaacagacatcagcgtcatctctaagtatgcacgtctctatttgaaatctctctttaagcatgtttatacagtaaagggaattgctacttccgatttcagaaaaatctggggaatacaagatatttacagcaagaaagaacgggtcaaccatgtccaccattgtatagacgctattgtcattgcatgcattggtccagacgaatacaataagttgggagcctattatcatgacgaagaaaatcatgaatggtatggtatgtcaaaagcgacattcgtcaagccttggaatacttttgtcgaggacattaagaagattcaagacgaaatactcgtctatcactatactcctgacaacatgccaaagcaaggtcgccatagaattaagattaatggcaagaaaattcttacccaaggtgatgcagcaagatattccctacacaacgatacatattatggagccatagagaatgattgcaacataaaatatgtcaagcgtattgacttagcgtcattaaaagaaagtgacgtgaagaacatcgtggatgatacggtaagaagccttgtcgaaaatgccattaaaacaaaaggcttcaaaaaagcaatggaagagcctatttggatgaatgaagagaagcatatacctattaaaaaggtaagatgctatactccatccgtcactaagcctttgcatattcgccaacaaagagatgcttccaccaaagaatacaaacagcaataccatgttgctaatgatagcaactatatgcttgctctctatatcggcaaagacaaaaaaggcaaagaaaaaagagagtttgaaattgttaatatgctacaggctgcccaatacttcaagacaagcaatgacaaggaagttgcaggtcacaatcttgttcctataaaaagtgagcatgattatccttttgcatattaccttaaaatcggcacgatggttttgctttacgagaagacaccagcagaggtttgggaagacacaacaaccggattaaataaaagactatacaaggttacaggcttttggtttgatggcagattagtcattaccaaacatacggaagctcgtccatcatcagaagttcctaccgaatccaagaatttcattattggtgatgcaaaaggtcgctattcatacagcaaatttacagccttagtacaaggatatgactttgagataaatgagttaggtgaaatcaaaagattaagataatatgattaagcaaacattattcttctcaactccagtatgcctttctctcaagaattgccaattggttattacttggaaagacaacaaggacaaagtaacacgccctatcgaagatataggttgcgtcgttctagagaatcaaatgataagcattaccttaccacttctcaatgagttggtgaagaataatgttgctgtcatattgtgcgacaacaaacagatgccaacagctatgcttcaaagtttggatgcaaactgcacccaagctgagagtctgaaatatcaattaggcgtaagtgagcctatgaaaaaacaagcgtggaaacaaatcatcgaagctaaaatcagaaatcaagcttctgttctcaaaaatacgcaaaacaaaggcgaagtcctcaaaccattctatactaatgtaaaaagtggagatagtgacaacagagaaggattagccgcaaaaacttattggagcaacttattcggtaaaaattttaagcgagaaagagaaggatgcccaccaaattctttactcaattatggttactccattttacgtgccgcaacagcacgagctttgttagggtcaggattacttcccaaccttggcattttccataaaagcagatacaatgcttttccacttgcagacgatgttatggagccatacagaccttacgttgacaatctagtttttcaactttacaaagatggaaaatttgaactaaacaaagattccaaaacgaccattcttcacatattaagttgtgacgtgaatataggacaagtcatgcgtcctctacaaatagccttaacgatcacaaccgcctccttggtaaaatactatgctggagaaatcaagaaaatatctttaccatatattacatgacagaaatcagacttaacgcttaccatatcatgtggctcttcgtattctttgacttgcctgtttctacaaaaaaggaaataaaagctgcaagccttttccgcaaaaacttagaaaaggacggatttgccatgatgcagttttctgtttatattcggcattgtgcttccagagaaagtttggaagtacatattaagcgtgtaaaatcccttttgccagaatcaggaaaagtaagtatccttagcgttacagaccgacaatacggagacatttataacttttggggtaaacctaaaagcattaacaagagtaaaataaacaaaactgttgttagtgaacctattcaattagagattttttagtacttttgcataagaagtaagacctacacttccattttttatattggatttggagcaatcaacactgatactcagaagtttacccaatataggttgtggtttgatgtaggaatcaaaagatatacaactttttcgattaccaatagtattttgatatgttgtggtttgatgtaggaatcaaaagatatacaactatataataaacataacacagcataaacagttgtggtttgatgtaggaatcaaaagatatacaacaaagagtaataattaaatgaaagttatacgttgtggtttgatgtaggaatcaaaagatatacaacaatatagattaatataaatgtgaattagtagttgtggtttgatgtaggaatcaaaagatatacaactttcagacataaattatttgttattatttagttgtggtttgatgtaggaatcaaaagatatacaacttgaataattaatataaaattcatgatagcgttgtggtttgatgtaggaatcaaaagatatacaacatgtagccggaagtacaattccgctcagagttgtggtttgatgtaggaatcaaaagatatacaactaattaaaataataatattactaatatgttgttgtggtttgatgtaggaatcaaaagatatacaacaataaatctatttaatgtagcgctatctaggttgtggtttgatgtaggaatcaaaagatatacaaccacaagggataaaatgacgcatattgacggttgtggtttgatgtaggaatcaaaagatatacaacattatgatgtgcgtacaaaatcactttacagttgtggtttgatgtaggaatcaaaagatatacaacaagtgtcaaaatcggtattaatgtaaccgagttgtggtttgatgtaggaatcaaaagatatacaacaaaaattatataagatgtcccaccttttagttgtggtttgatgtaggaatcaaaagatatacaacaaagctgcattgatggtggccaacgatattgttgtggtttgatgtaggaatcaaaagatatacaacatatgagagaactggtagaatataaataatgttgtggtttgatgtaggaatcaaaagatatacaacagcattaaaatccatctgctcacgagcaagttgtggtttgatgtaggaatcaaaagatatacaacaatagttacaatgcgtgacacaccacaggagttgtggtttgatgtaggaatcaaaagatatacaacaataaaaatattaataaacatgcattttagttgtggtttgatgtaggaatcaaaagatatacaacatctctaaattgttcaagggtgatagagagttgtggtttgatgtaggaatcaaaagatatacaactgtcaagaaaataataataatatctatttgttgtggtttgatgtaggaatcaaaagatatacaaccgctttatgaggtgttggacaactacgcagttgtggtttgatgtaggaatcaaaagatatacaactctgttaataattataagtaattaactcggttgtggtttgatgtaggaatcaaaagatatacaacccattaccttatcggtcatagtggtgaggagttgtggtttgatgtaggaatcaaaagatatacaacaatcacctttagaagtgtgcacgactgtaggttgtggtttgatgtaggaatcaaaagatatacaacatttaattggtcgtgtgtgacagtctgctgttgtggtttgatgtaggaatcaaaagatatacaacatctgcactgagcgagattggtgatgaaaagttgtggtttgatgtaggaatcaaaagatatacaacctgacttgaaaacttgcgtattggcgataggttgtggtttgatgtaggaatcaaaagatatacaacatatgtcaaacaatcaacaagaaaacgtccgttgtggtttgatgtaggaatcaaaagatatacaacaccactttcagaaagggtgtcagaagtagagttgtggtttgatgtaggaatcaaaagatatacaacagttttcgcatttatgaatgacgtaaagtgttgtggtttgatgtaggaatcaaaagatatacaactttggaaacaacatcccaagaagtaccaacgttgtggtttgatgtaggaatcaaaagatatacaaccgaccttcaggaggatattaagagactccagttgtggtttgatgtaggaatcaaaagatatacaacgaagtgcaccatatttagcatcttgttgagttgtggtttgatgtaggaatcaaaagatatacaactatgtcgttgttttgcacccagcgtttatagttgtggtttgatgtaggaatcaaaagatatacaacccgctggaactcatccccaccgccaccagggttgtggtttgatgtaggaatcaaaagatatacaacttacagaagaatctcacaaagaagtttcaagttgtggtttgatgtaggaatcaaaagatatacacaaagtccttgtttttgtattggattgtagtttaatttcactgccaaaaacaatttgcttcagtgcaaatgtcgaaaaaaaactgtgacaactgtgacgtgtgacaaaacaaagaaacatcctctccaaatctgcgaactccacatcatctgcgagagattttaaaatcatttctcggcgagcgtcttcatccctacaagcaattcgttacgacaaaagaaatgggaaggttgcaaaggtattgcatttttcacaaaatgcaaaaaaatagcttgcacttttccgcaaaaaaacgttaagaaagcagactgtgacaacagggcttttgtctcctatctcctcatttcctcttcttccccctaaagctcttgttgaccaatgccgactcacagctctggcagagcggctcggtggctgcgtgatgtcggaatccctccaccaaggcttgggcacgaggcgaggcgagaatctcctccaacgactgatgaaagagattgccgaggatgacatcgccatcatggtcgagacaacaagggacgagactgccatccgacaacacaccgatttgcttaatcagcgccttgcagaaatactcctgcttcgacttgcttggcgaagcctctagcttgccatccgattcctcctgcttcccatccgaatcatcagaagctgcttttcctcccccaccaggccattcaaacttccggtcgaactccaagtacagattgtcgcatagccggaagccatcggggcgttccttccaaggcttgggcacgtacttttcgatgaggcgcatcacctcctcgttctctcggtccatcccaccttggttccacaaccgcagcaccatgcaggttcccttcccggcagcctgtgtcgagaagcgcatcacctggtccatatactccgacagttcgcccctggcattgctctcatgcgaatggagcgacaactgaattttgtacggaagtgtgtcgagcagcgccatcgcccgatgcaagagcgtgccattcgaagtcagcacagtcttgaatcccttctccctcgccatcgtaacaaactgaggcagaaggggatgcagcagcggctcgcccatcagatggaaatacaagaagcataccttgccacgcacgcggtcggtgagaaggtcgaactcctcctcactcaactgccgtctcttccgatgatgcttcggacagaaatggcagtccagattacaagtatttgtgatttctatgtaacagcgatctatcatcatactgcaaaaatagcgattttcggcacatcggcaaagaaaagcggttttatttaaatatctttagctatcctacgattatctcaactttttgtcgtatatttgcacacgattctaataagcatacaccctaaatggagaaatcaatatgaagatacaacacattttggtagccatgatgctggcatgcagttcgcaagcactggcacaagagagagcgatggagatgcgagccgaccgcaccttgatttatcctcaacgcctcgaactcaagggcgatgagacgctgggcgacatcctggcgatatatcccgacttgatgcaaaacggattcgacgacatgttatcgggctacaacgtgagaatcgacaacgtagccatcaatggcgacatgcgcatcgtgtgcagacaactgaaagccagacaaatcagcaagatccaaatctgtgacaacaccgccgtcgccaagggtaccgtgggcttgggacgtgtcatcgacatcacccttgccaaggacaagaagggactcgacggactggctggcgtggaggctggaaccgaccatctcgccgatgctcatgccgtggtgagagacaacgccgccaagaccgatgtcatcgccatcacctcgtattcctatcaagacttcgatgatgccatcacgcagaagcagcatctcttcgcccacatgaccaactatttctctcccaaggaccgcctcctgacctacgtctcccaacaatatcagaacacgagatcgtatgatgcctgcggcaaggagaaagtgcaaaacgagaaacttatggcacgtgccctatatttccatactttcaatgaccaaggcacggagctcctgctcgtagccaactatcaatatggcaacaccccttacaccacctatatgaatggtgacgagccactgacccaaactcgaagcgatgccaccatcttcatcgtggaactcaacaccccactcaccaagaggctcgacatgatggcgggatgggaaggcgacttctcctacaatcatttcaagagaaacatcggacaaggcaacacgagcgactatttacgcactcgatacaccagttccaacaacgacctttacctccagttcaactacgtagtgggcagttggcgattcaccgtgggcgaccgtgtggtgttctatcactatagcactccaggagccaagagcactgatagaaccagcactgacgagaaatgggtgcgcaatgacacacgcaacaatatcgaggtgagcgccatctccacccttggcaagcattcgcaagcccaggcagcctatcaccgcaagttcatcaacccatccttcgtcatcgaccaagacctgtcgtatgaagactggctcgacatcaagcagggtttggtagcacgatacatcgacgagaccaagttgggctacaactacagcctgcgcaatctcaacttctcgctcgccgcctactatcagatgatagagaacgagcagaatcgctgccgactgaatgccgccatgttctatcgcacaggcatcctcgccctctcggcaggtgccaacctctatctctgcgagggcgatggcaacgacttcgccaccttccacctcaaccctcgcctcaccttgccatggcagatgaaactcaatgtgcagagcatcttcgccaccggtcgcgccaaactgagccaaggcgagaacatctatctctccggtcagctcaccaagcagtggggtgcccattggaatgtcgctttggaatggcacgacatctgctccagtcactattcagcaggtatggcaaccatgctatacttgttctaaacaaaaaattctccctttctgaaatgattcagagagagaggatttttcatttatagcctcattgccttttactctatcgtcgaaatcgtgacatccgagaactcgttcatgtagtcgagaatcttcagcgtatagttgccacgtttcgccttgatttcgatgctagcctccaggaactcctccttggaggtgcgtcgatctttcaactcgtaggaatgcacctccatgccgtcttgcttgatgcgcttgatgagttccttcacgctatcacgtgaggaagccgagaaactcaactcgatggtcgtggtaccgagttgaggaatgaaggcgttgagcacttccaagcccatcagtaccatcaacgtggtgacagccgccgccacatacatgcccgtaccacatgccaagcctatcgccgccgtcacccaaagaccagcggcagtggtgagtcctctcaccacgttcttctgaaagatgatggtacctgctcccaggaatccgatgcccgacaccacttgggctgccacacgtgaggagtccttgaggtcgatgccgaatccatattgcgataccaagcagaagagggcactgcccagggctacgaggaagtgggtacggaatcccgcctccttggcacgatattctcgttcgatgcctatcgaaccacccaggatgagggcgagcgagaggcgaatggtgagttctgtataagttgcatccataatgatttcctttcttttagatgaaatatgatgtgtgcaaaaatacgacttttccacgaaatccgccatctacttccatattattttcatcttttgactttttttctaaaaaataatgtagcattctctgagaattcatgtatctttgcagaaattataaatgattaattgtaaattataaatatattatatggcaacagttgacgacaagaagattatcttctcaatggtgggcgtatctaagattatcccacaaaatcagaaacagattctgaagaacatctacctatcgttcttctacggagcaaaaatcggtatcatcggtctcaatggcgctggtaaatcgaccttgatgaaaatcatcgccggactggagcagcctacccagggcgaggtggtatggagcccaggctactctgtgggctacttgcctcaggaccctccactcgatgagtcgaagaccgtgaaagagaacgtgatggagggtgtacagaaagtatatgacgcactcgccgagtacgaggaaatcaaccagaagtttggcttggaggaatactatggcgatcccgacaagatggacaagttgatgcagcgccaagctgaggtgcaagacatcatcgatgctaccgatgcctggaacatcgactccaagttggagcgtgcgatgggtgccttgcgctgtcctccgggcgactggcctgtcaccaatctctctggtggtgagcgccgccgtgtagctctctgccgtttgcttttgcagaagccagacgtgctcttgctcgatgagcctaccaaccacttggatgccgagagcatcgactggttggagcagcacttgcagcaatatgagggtacggtgatcgccgtcacccacgaccgctacttcctcgatgatgtgagcgagtggattctcgaattggaccgtggcgagggcatcccttggaagggcaactactcttcttggctcgaccagaagaccaagcgcatggaacaggaggagaagagtgcctctaagcgtcgcaagactttggagcgagagttggaatgggtgcgcatggcaccgaaggctcgccaggcaaagggcaaggctcgtctgaactcttacgagcagatgctcaaccaggagcagaaggagcgtgaggacaagttggagattttcatcccaaacggtcctcgtctgggcaacaaggtaatcgaggcacagcacgtgaagaaggcgtttggcgagaaggtgctcttcaatgacctcaacttcatgttgcctcctaatggcatcgtgggtgtcatcggtccaaacggagctggcaagaccaccctcttccgcctcatcatgggcttggaacaggcagacgctggtacattcgaggtgggtgagaccgtgaagctcgcttatgtcgatcagcagcacaaggacatcgacccgaagaaaacggtatatgaggtgatttcccagggcaacgagacgattcgcatgggcggtcgtgacgtgaatgcccgtgcttacatatctcgcttcaatttctctggtaccgaccaaagcaagctctgtagcgtactctccggtggtgagcgcaaccgcctgcagttggctttagccttaaagcaggaaggcaacgtattgttgctcgatgagcctaccaacgacatcgacgtcaacaccttgcgtgccttggaggaaggtttggaggcatttgccggttgtgcagtagtaatcagccacgaccgttggtttctcgaccgtatctgtacccacatcctagccttcgagggcaatggcgaggtattcttcttcgagggaagctattcggagtatgaaatcaacaaggcaagaagactgggcgacaccgagatcaagaagggtcgctatcgcaagttgatggaagaataatttgattctttaagcacagaaataggcacggattacagagcgtaacccgtgcctatttttgtttgcacataccttttttattatatagttagtattttgctattttacaatttcctccaactccgcgaaatcatcaatgatgtattccgcattcttcagttcctccctagtggcattgccataggtgacggcgcaagccttggcaccagcattgtgagccatatccacatcatacgtcatgtcgcccaccaccaaggtatcggcgagcatctgctccatggatgactcgatggaatgacccgcctcagcactttgacaacggatgttctccaaagccttcagcaccatgtcgggagctggcttcacgttcgccacactgtcgcctgccacaatcgaggagatgcaattctctatctgcatctgcttgacataaccgaaaagggagtcgctgccacgactgctggcgatggctagcacataactctcctgatgcaagcgatggatggtcgccaagacgtgagggaaaggttgcacgatgaggtgacgcttgttctcctcgaaaatatcacgataggtctccg

SEQ ID NO: 4199 - DNA, 23591 bp, synthetic construct
  source 1..23591: mol_type = other DNA
  misc_feature 1..23591: note = Synthetic
acatcgttcagggatatgtggtcgattcgcttcctgtggacgaccctcagggcgtcttcggctcaaacatcgaaggggaatacctcaacatcattgcacgcaatcagctcaggggcaatatccgtacctgcctcaatcaggtgggggtggagattgccggcactcgactctctgcgctcgagctcgccaagaatgtgctcaccgagcaggagaagagggcgggatgcgccatgatcgacctcggagcgggaacaaccactgtggtggtttataggcagaacatcgtcagatacctcgtcaccattccgctcggattcaacaacatcgttgatgacctcaaggccaacctgcaaatcgaggagaaggaggcgcaggaggtgctgctcaactacggaaacgcatatatcgattcagaggaggataactccgaactcatcaactcttcatacaccacatccaacgacaaaaagcataaactcatcaccatccatgagattatcgaggcacgactcactgaaatagtggcgaacgccgtggcgcagattgtcaacagcggatattcggagtctatgctcgcaggaatcgtcatcacgggtggcggtgccaatatgaagaacatcgacaaagcgttcaagaacaaccctcgaaaacttaagttcgaaatcatcagggtggcgaagtccatcatacagccggtcatcaaggccacaagcgcggcatcgctcaacctcgagaatgccatgagcggctcgctcgtctcactcctcctctcaggcgatgagaactgcgtgggagaagactcctaccagggcgacaccatcttcggaaaggcggagaaggacaaccaggtgaaggagaacatcagccacacggaggaggagcgcaagaaactcgacgagatgattcagcgcctcaacgcttactgcgagcgcatgagagagcatatcaaccgactcaaccgacagaaggcagctgtgctcgaaaacccgaaaaacaaagtggagcgcagcaatgcactggagtatgtaaacgtggcggagcgcgtgtgcgacgaaaacttcgaacagctcatcgcatcgcttgagatgaagctcaagaacgaccagcgtatcgcaagtgcaaaggcgttggaggagcagctcaccaacagcatcgacgcactccaggaggctgttgcagaagcgaagaagaacggtggatttatgaaccgcctgcgcggaatgctcgacaaaatcgtcaacggagaggatgaatagtatttagaaaccccataaacatatcattatggcagacaaggatataatggatctcgacctcgacctcgggcagtttgcagatcaagacaatacagacaatgctgacaccaacaccggacttccactcgctttccagagcaatgtggagagcatcatcaaggtggtcggcgtaggtggaggtggcggcaacgcggtcaaccacatgtacaacacgggcatccacgatgtcacattcgcagtgtgcaacaccgataagaaagcgctcaacgactctcctgtgccttacaagctccagctcggcgaaggacttggagccggcaaccgaccggagaaggcgcgaaaggcggctgaggagagcataccgcaaatcaggacgatgttcgacgacggaaccaagatggtgttcatcaccgctggtatgggcggtggaacgggcacgggtgccgctccaatcattgccagggtggcgcgcgagatgaacatcctcaccgtgggaatcgtgactataccgttcaaatgggagggcaaggctaaaatcgaccaggcactcgacggtgtggacgaaatcaacaagcacgtcgatgcgctcctcgtggtcaacaaccagcgtctctacgagatctatcagggaaagaccatgagcgaggcgtttgccatctccgacaacacgctctgcaatgcagccaagagcatctctgaaatcatcaccatgcacggcaaggtgggacttgactatcaggatgtcaagaccgtcctcaccgatggtggggtggcgatcatgagtaccggactcggacaaggcgagggacgtgtggcacaggccatcgagcaggcactcaactcgccgcttctcaacaataacgacgtatataagtccaagaagatcctcctccacatcgtggagccggggcctgacggcgaccagccgctcatggtcgatgagattgcggacatcaacgagttcatgggaaagatggaggacggaaacctcgaaaccaagtggggtatgtcctacgacccttcactcaaggatcaggtgaaaatcaccatcctcgcctctggattcggactctccgacatcaacagcgaggagatgaaccagcgcatcgcagagaaaaacgaggcggaactccgcatcgaggaggagaagcgcgcacgacgcgaaggcatctacggctccgacaccaaaggcggatacatccacaagcaaatcaactactacatcttcaaggaccaggacctcgacaacgacaacctcatctccagtgttgtctctgtccctacctacaagcgcaagaaatcacaactcgagcagcttgagaacatctccaacggcatcaccacaaacaccgtggaggcctaagccaaaaaccactcggatgggaatgccgaaagcatccagatagaaatgccgaaagcaatcggatagaaatgccgaaagcactcggatggaaaaacgattttcattcagtccttacatatttttgtggaagggcggtggggaacctcctcaccgcccttcctgcatctcagcttgaattatcgttctgcatctcagtgaaaataatctttcgtctattgccccgtctgttagccgggaatctccgtcagtgtttctcccataattcccatcaactcccatcactcccatcctctcccatcaactcccataactccccccaaatacaaaaatagggggcgccaaaatctttggcgcccccttgtttttctcttatggaatagagaaaaagatgccggcacggtcagaaatcacttctagttgatccggctgaatatatgtaagaattgaatgaaataaatgcaatacaaattgctttgccttatgcgtcgatagtggcgtaggtggcgttgcgttcgatgaactcgcgacgtggagccacgtcatcgcccatcagcatcgagaacgtcatgtcagcttccgcagcgtcctctatcgtcacctgagtcagcagacgggtctttggatccattgtggtttcccagagctggctcgggttcatctcacccaaacctttgtagcgctggatgcggatgttgccgccagtctctgtgccgtcgccgtatttgtcgagaaagcgctgcttggccacgtcgtcgtagcaatattcgctcaccttgcctttcgtgcacttgtaaagcggtgggttggcgatgaacaggcgtccatccttgatcagctgaggcatgtagcggaagaaaagcgtcatgatcagcgttgcgatgtgagcgccatcgacatcggcatccgccatgatgatggtcttgtagtagcgcagcttctcgtagttcgcctctttcgtgtcctcaggattcaatccgaagcgcacacccagagcctggatgatgttgttcacctcctcatgctcgaacgccttgtgccacatcacacgctccacgttgaaaatcttaccgcggattgggaggatggcctgaaaatggcggtcacggccttgtttcgcactgccgccggcggaatctccctccacgatgaacatctcgcatttggctgggtcgcggtctgagcagtcggcaagcttgcctggcaaaccaccaccggtcatcgggctcttgcgctgaacgttctcacgggctttgcgggctgccacacgggcggtggcggcaagcaccaccttgtcgatgatcatcttcgcctctttcggatgctcctccagatagttcgacaatgcctcaccaacggcggagttcacagcacccgacacctcgctgttgcccagcttcgtcttcgtctgaccctcaaactgaggttctgccactttcacgctgatcactgcggtcagaccctcgcggaagtcctcaccgctgatctcgatcttctgcttctccagcttctccgtgatcttgttgtcgtcggcatagcgtttcaacacacgtgtcagagcctgacggaaaccagtcaggtgggttccaccctcaatcgtgttgatgttgttcacgtaagagtgcaggttctctgtgtaagaggtattatacatgatggcggcctcaatcggagtgccctgtttctctgtgttcaggtagatcacgtcatcgaacaggtggacgcggctgctgtcgagatagcgcacgaagtccctcaggccaccctcggagtagaacttctccgtgcggatgccttcaatgcccatcgcagcgttcacgtctgtgcgcttgtcggtcagcgtgatggtgatgccggcgttcaggaatgccagctcgcgcatgcggttggccaatatgtcgaacttataggttgtcgtgatgaatatggagccgtctggccagaactgttggcgggtgccgtgtttttcggtcgtacccacttccttcacgtcgtactgaggcttgccacagcggtattcctgctggtaaatcttgccgtcgcggaacacctgagtcaccatcttcgtgctcaaaccgttcacacagctcacacccacaccgtgcagaccgcccgacaccttgtaggaacctttgtcgaacttaccgccggcatgaagcacggtcatcaccacctccaaggcggagcggtgctctttctcatgcatgtcaacaggaataccacggccgttatcctgaaccgtgatggagttatcctcgtttattgtcacttctatgtgggtacagaagcctgccaacgcttcgtctatcgagttgtcaaccacctcatagaccaaatggtggagtcctttctcactgatgtcgccgatgtacatcgcaggacgcttgcgcacggcctcaagaccttccaatacttgtatgctgctggcggtatagttggaaccgccaaccatattctcttcttccattatctattatttttacgatacaaaggtacaaaaaaaatcccatatatgaaagcttttcaacccttaaaagcccccctgtcaacataaagttatcaacattcccagccctccccgtcatccccttgttcataactcccaaaatcccccttccttccatctcctcccatcaatcccataattcccatagctcccataattcccatcccctcccatcatttttcaaaaaaaatccttatttttgcatttagaataaaaaactactgatatgaggagaatgacaatcgcactctgctgcctctgcatggcggcagcaatgccttccctggcgcagaagcgcaattgggtgctcgaggcggaagacccccacaccgttgtgacatggaacgccgatcaggcggaaatcatctcgcccaaaggctccacgctctggtataaagagaagatgcgtggagacgtcaccattgaatacgaggcgatggcggtgcttgagcccagcaactatgagacatggaaccgcgtcagcgacctcaactgcttctggatggcttccgaccctgcggcaccggatgtcttcaccaacctcaaggcaaggggagggcgtttcgtcaattcctatgccctccgcctctattatgtgggtttcggaggcaacggcaacaccacgacccgattccgtcgctacaaaggcgatacccgcggcatcgacagcgtggcttaccggccgctcattctccgcgaatacaccgattccgcgcacctcatcaaacccaaccactggcaccgcttccggctggaatccaaagagggtagggtgcgctattatgtggacgggcaactgctcgtcgattggctcgaccccaatcccctcaacgagggatggttcggattccggaccacactctcccacacacgcttccgccgtttctccttcacccaacaacccacggacaaccaaccggtcaatctacgatggatttcagaaggcgaacgtcctctgaacctgattccaaccacctttggcgtgcctttcgacaagggggaggtcatgcccgaccagtcgttcatgctctgcgatgccagcggcggccagctcgaccatgacgcttggaacctcgcctactggcaggacggtagcgtgaaatggaaagcctttgccgtcgtggcgccaccacaggggctttcgctccgcaaggcggacgctatcgagacccaaagtgcaaacccatctacaacaacaaagaaaaacactacgcctgcaataaaacaccctgacaccgtcacctcatgggtgacccagactcccacgcaaatagtggttgatgcggggtatgcccgcttctatgtgcctaagcagggaacggcattcctcgacagcatcctcatcctgggtcggcgggtagggggagctgcgcgcctgcgttgctcctacgacctctcggaatcccaaggcgatgtgctcaccacccgccgcgtcatgggcgaaagccacatcgacagcgtcagggtggagcgcgcgggcaaagtcagctgcgtgctcaaagtcatgggacatcacctcaccgcaggcgagcctgtccttccgttcgtcatccgcctttatgcctaccgcggttccgacgacatcaagctcgtccacaccgtcgtcatcgactcgctctcggccgagcgcaggatctccagtctcggcatcgctttcgatgtgccgatgcgggagcaggcatacaaccgccatatctggctcgaccgatggacggagccggtgcagccgctggcttcccggcgtatggtgcgccaaggaaggaccgatgcggaggcacttcaggtgaggcagcagcgcgtcaccgagccggagcagatggatccacaaagccggcaactgaccgaccaactggcgcagtgggaccgcttccgactttcgcagctctcgcccaaggcattctccatccggaaagctgccaccgaccgctctccgtggataggcactgtggagggaacccgtgccgacggatccatgtttgtgggtgatgtgtcgggaggacttgcgctttccctgcgcgatttctggcaggcgttcccatcctcccttgaggtgcgcaacgcaaggtccgacaacgctgaagccatactctggctctggagcccggaggcggagccgatgaacatcgagcactacgacaccatcgctcacggactcgatgcctcctacgaggatgtgcagccgggcatgagcaccgccaggggagtggcacgcacctcggtggcgtatatccggccgctcgccgctgctcccgacagcgctgccttcgccagcatctcagcatcgtttgccgacttccgccagctggcctgctcgcctgaatatctccaccgcaagcgggcgttcggcatctggagcctaccgcacaccgactcggagcggggacgcctcgtggagcagcgtctctccttcctcatggatttctataagcaggcaatcgaacgctatggatggtacggattttggaactacggtgacgtcatgcaccgtttcgaccctcatcgccgcgagtggatgtacgacgtaggtggatttgcatgggacaatacggaactggcgtccaacatgatgctgtggtacaacttcctccgcactgccgacccggccgtctggaggatggcggaggccatgacgcgccacactgctgaggtcgatgcctaccacgacggaccgtttcgcatgctcgggtcgcgacacaacgtctcccattggggatgcggagccaaggaggcgcgcatcagccaggcggcatggaaccgcttctactactacctcactgccgacgaacggacgggcgatgtcatgaccgaagtgcgcgacgccgattccacgctctaccacctcgatcccatgcgtctcgcacagccgcgttccctctatccatgcactgctccggcacgactgcggatcggacccgactggctcgcatacgcagccaactggatgacggagtgggaacgcacccagaacacaacctaccgtaacaaaatcctcacaggcatgaactgcatcgccgctttccgccacggcatcttctcaggacctaaagcactcggcttctatcccgacacgggagccatcaccaacgaatgtgatactgctctccaaaacaccaaccacctccttcccatcatgggtgggttcgaagtcatgaacgagatgattccgatgatggattgtgagccgtggaaccagacgtggctcaacttctgccgcgactacaaagagaaagcgcacaccttctccaacaaccgcttcctcatcccgcgcctccatgcctacgcaggatggctcctcggcgacaaaaccctcaccgacgatgcatggaacgacctccttcgattcaaatctccttccgaccccatcctctacaccaacgacgcagccacatggaccctcgacgccatcttcctccaggaagtcggccgataaaccatgctccatcccctcccatagttcccatcattcccatccctcccatctgtccccatcattcccattaactcccatccctcccatgccaacaaacaacagcaactttctcatcccgaaaggtgattataaaaacctcatcgcctttcagaagtcggagtgcatctacgacatcacctattatttcttggagcattatatgccccaaataggtgaccgcacagttgaccaaatgaagcaagctgcccgatcgggcaagcaaaatatcgctgagggaaatgagacaggctccacttcaatggaagcttgcattaaactcgtcaatgtagcgaaagcaagtctcaaagaattacaagaggactatgaagactacttgaggaaccacggcaatcagatttgggatgtgaacagcgaaatatgcatcaatgcccgccagtggtgccgccagcactcaaagacagaagactatcaacgtgtctgccgtctgcgcgatgacatcacgctcgcaaatatagcactcatactcattcatcagacggactacctgttgaaatagcttttggagaagttcaaggccgattttcttgccaacggcggtataaaggagcagatgtcgcaagcccgccgaaactggcgacaggaacatggaatgggttacctaaatgggaactatgggaaaaatgggaactatgggaaaaatgaaaatgaccacgaaatcaatggcaatgatgatccaaccaaagaacctcaatcatccccaaatcaaccaaataattagcttaaagctccatctgctccatcactcccatagttcccttccgcccgcatggcctccgtcgcccgcatggccctccgcccgcatggcaaaaaagctgttatccaccgagcggaataggagctcggtttgcgacggctgaacctttaggttcaccaaggagttatcccgcagggattcccagagctcccatccatttgcaaaaattcatcgtcttgaattgctttcaaattagtatctttgtggaaccaccagtcctgtatcttgcgatgccatcgcaagcattaaattgctttcaaatatacttgatctcaaaaaaaatgaagaattatattgaaagttttattttttttctaaatttgcattgcaaatagatgagaggggaaagaagggtaatttatgttagtgatattctgatatcataccataggaaaagagcgtttattagaaaatgtatcttttttatctttggtggtttaatcgtgatttgtgaattgaaaaaaaaactcccacctgaagcgggagtataggttttacccttcggccatgatggccttattgtgataagatgtaggaaaatatcttatgatacaaaattagtaattatttctaacagaaaaaaataattgtaactttaaaccctaatattaacaatagttaacataaaagaaatatgaaggagaaaattttaggcattgatactggaacaaacagccttggatgggccatcgtggaaaaagaggatggtgttactaggctattggagaagggaacaaatatttttacagagggagtgaaaatcgaaaaagggatagaatcctctaaagctgcagagaggactgaacaccgtgcttctcgtaaacattatagacgaagaaaagttagaaaaattcgcctattgacaatactagtggaaaaccatatgtgtcctcctgtttccaagttggaacttaaaaactggcgtacaaagaaaatatatcctgccaacgagcaatttatggcatggcaaagaacagaagacaaagaaggaataaacccttatcattaccgttatatatgcttgactgaaaaactaaatttggataatctaagtcagcgttatattttaggtcgtgctttgtatcatcttaatcagaggcgaggtttcttaagcaaccgtaaggatacttcgaaagaatctgaaggagtggtaaatgaaggcatttcagaccttagcgttaaaatagaggaggctggatgtcaatatctgggagagtatttttataaactatatgagaagggtgaaaaaatccgtaaccattatacggcaagaaaagagcattatctgaaggagtttcatgcgatttgtgaaaaacaaggaatagatgtagagctggttggtaaattagaaaaagccatttttacacagctgcctttaaaatcacagaaaggtttggtcggaacgtgtaagttcgagaaaggaaaatcaaggtgtccttcttcgcatcccttatatgaagagttcagaatgtacagctttttgaacaacattaaaatgcgcactccgaaagatttggaaatgcgatatcttacagttgaagaaaaaaataaagtcattccgaaattcaaacgcaagtccaaaaaatcattcacttttgaagatattgccaaagaactggccggtaaaaataactattgtttcaatggagacacagcagaaaaaccttatcggttcaattatcagatggataccaatgtggctgggtgtgtagtcaccgcccaattagaagagatattcggggataaatggcttgataatgtctgcgaagtttacacgcttgctcagggaaaaacaaaattcaatataatgaatgatgtttggcatgctttgttcaattttgatgatgaagatagattaagagaattcggaaagaatcgtttacagttggatgatgaggttgcaaggaaattcagcaagatttctatgccaaatgattatgcatctctcagcctgaaagctatacgtaagattctaccatatatgagagattatggactaatctattctcaagcagtcttccttgccaaccttgaagaagtgctgcctaaatatgtgtgggaaataaaggacatgcgtgaggctgctattgaaaagattattgatcttatcaataattacgataagagatgtgaggaaagaacattggagcaatgcatcaaagacttccttaaaaagaaattcatggtagatgaatcaagactgaagaaactatatcatccgtcaatgattgaactatatccatgcgttcaacccgacgatatgggattgtatcagctggggtctccccgtatcagtagtgttaggaaccctatggctatgcattcattattcagacttagaaaagttatcaatcttcttttgaaagaaaagaagattgatgagaacacgaccatacagattgagttcgcccgtgagctgaatgacgcaaacatgcgaaacgctatccagcaatatcaacgcaatcgtgagaaaaaccataatgaatatagagaaaggattatcgagtatggaatcaaagatcctacagaacgggacattctaaaatatcagttgtgggaggagcaggaacataaatgtatttacacaggagaggaaatctgtattggagattttctaggaacacatccgaaatacgatattgagcataccgttcctcgtagtgtcggaggagacagcacaatggccaacatgacattgtgcaacagtgcatacaaccgtgatgtaaagggaacaaaacttccgactgcgttgcaggactatgatgctatactacaaagaattgaaggatggaaagaaaagtatgtggaacttgacagaagaatccggaaaaccaaaggcgtaagcacatccacgaaggaagaaaaggacaaaaatatcaggaagaggaacttactggtgcttgagcggaattactggagggataagtacagcaggttcaccatgactgaagtccctgaaggattcgcacgcaggcaaggtgttaacattggcttgatttcaagatatgcaaggttgtatctgaaatccgttttcaaaagagtatttgttgtaaagggcatcataacctctgaattccgtaagatatggggaattcaagatgaatattcgaagaaagaacgtgtcaatcatgtacatcactgtatagacgcgataactatagcttgtattgggaagcatgattatgatatgcttgctcaatattatcatgatgacgaagaatttaagtggggacggtctgcaaagaagcctcagtttccaaagccatggccaacatttgtggaagatatcaaagctgtacaagatgaaattttggttgcacattataataatgacacattaccaaaacatacgaagaagagagatgataaacgacttattattcaaggtgatacagctagagcctcattgcataatgatacatattatggagccataagcgaaaatggtgaagtcaagtatgtcgtaagaagaaatttggatgctcttgatccaaaggatgtaaggaatattgttgacaaagcagttagagaaaaagttgaacaggcaattgctgacaacaaaaaccttaaggcggctatagaaaaaggaatctggatgaatgtagaaaagaaaattccgattaagaaggtaagggtttacacaccttcagtcgtacgtccaatccatattcgtaaacatcgagatgagtcaattgcagaatataagaaacaattccatgtacaaaacgatcgtaattatttaatggctatttatattggaaaagatcagaagggcaaagaaaaacgttcttttgaacttgttaataatattgatgccgcaaattattacaagttaagcaatgatgcattggatgaccttgtaccaagaactagcttgaaaggaaattatcctttggcatattgcctgaagattggaatgatggtgttgctttacgaagaatcgcctgaggaagtatgggatttaggcgtgaatgaattaacaaaacgattgtataaggtcaatggattatcatcaatgattcaaaagtcaccttatggcgtgatatttttgttacatcatcaagaggcaagaaaaagtacaatgattaaatataagaacggtgcttatcataataatgaagaaatgcgtgcaggaatcaaaatgctacacactcaaattaagtgcctagtgcaaggtgtggatttcgaaattaatgaacttggtgagataaggagaataatatgattaaacagacgattattttcacaaagccagcgtctctatcgttaaagaatgaacaactcgttatttcatcaaaagatctggaggatgtcgttactcgccctatagaagatatcggctttatggttattgctaaccaaatggtaagtatgacaatcccactgcttaacgcacttgcagacaacaacgtatctgttattttatgcgacaacaagcaaatgcccaaatcaatgctaatgacattggatggtaataaaactcttcaggaaagctacagatatcaaatagaagcaacagaaccaactaaaaagaaactgtggaagcagattgttgaatgtaaaatcaaaagtcaggctaacctaatggatagtcttgggtttgaagggaatgtgcttaaaccgttatatatgaatgtgaaatcaggagatagcgacaatagagaaggtgcagctgcgcgtatttattggaaaactatctttggtaaccagtttaaacgtgtacgagaaggaaatcaaccaaatgcaatgttgaattatggatatgctatattacgttcagcggttgctagagcattgatcggttctggattgtatcctgcatttggaatcttccatcggaatcgttacaacgcctttcctttagcagatgatataatggaaccttatagggtgtatgtggatgaaatcgtttatcgaatatatatggatggagctgtagatgaattgaacatagaagttaaaaaagaactgatgagggttttgtttgcagatgtcaaaatcggtaagatatatagaccattggagattgctttgtccatgacaagtgcgtctttattaagagtctataaaggtgatgaaaaaaaattaatattaccgacaaaaacatgagtgaagttagatttaattcatatcatatcatgtggctatttgttttctttgaccttccagtgcttacaaagaaagaacgaaagattgcaactgatttcagaaagaatctgatgaaggacggattcacgatgatgcaattttccgtatatattcgtcattgtgcatcttatgagagtcagcaagtacacatgaaacgagtgaagtctctagtgccagataatggacgtgttagtattttgggtgtgacggataaacaatatggtgatatagttaattgttggggaataggttacaaaagaaataaactaaaccttacaccattgcaattggaattattttagtatatttgcattaagatatatatacatcaatcacttctttggagagtctttattgacaactatttgattaaaaatggtttaaatagccatggttgtggtttgatgtaggatttaagacatatacaaccaaaaccaactaaaagcacttttcccatatgttgtggtttgatgtaggatttaagacatatacaacccagcagtgatttttgtaaatcaagtttatgttgtggtttgatgtaggatttaagacatatacaacatacggactgcctttttccttctcaccatagttgtggtttgatgtaggatttaagacatatacaacaaacatagactgaggaagcccatagttacgttgtggtttgatgtaggatttaagacatatacaaccacgagtattatcaggatcaccgaaattgtgttgtggtttgatgtaggatttaagacatatacaacatcccatgtggcgactactctctagtctcagttgtggtttgatgtaggatttaagacatatacaacttttacggtttaatcaatactcgttctaccgttgtggtttgatgtaggatttaagacatatacaactctataccgtctatatagtcagttttattagttgtggtttgatgtaggatttaagacatatacaacattgggtcttttgttattaacaattaaattgttgtggtttgatgtaggatttaagacatatacaacacctcaagcgtgattttatattgaccaatagttgtggtttgatgtaggatttaagacatatacaactcactcaccgtggcatggaacctccgcaagttgtggtttgatgtaggatttaagacatatacaacgggtacgttccaaagagtgcgtacaaacggttgtggtttgatgtaggatttaagacatatacaactgcgggcatacgctctgctcaacgagtcaagttgtggtttgatgtaggatttaagacatatacaactgaagaaagacaacaaaggaagagcatccgttgtggtttgatgtaggatttaagacatatacaacgtatcttttagtatattgtatctaattaggttgtggtttgatgtaggatttaagacatatacaacaattgttagtaaaataataatcgtgtgcccgttgtggtttgatgtaggatttaagacatatacaacatttagaatatcattttccagctgtccagtgttgtggtttgatgtaggatttaagacatatacaactgcaaaatgatagcctatcctcacggacaggttgtggtttgatgtaggatttaagacatatacaactttcggatttttttcgtatctttgaagatagttgtggtttgatgtaggatttaagacatatacaacaagttggggttaattccagcatctcgcaaagttgtggtttgatgtaggatttaagacatatacaacgtcgagctgccaaaggtggaggggtggacagttgtggtttgatgtaggatttaagacatatacaacaataatgcgtcatgtaaaagtgctcacaggttgtggtttgatgtaggatttaagacatatacaacggaaacaaattactgagcgtcctcttgaagttgtggtttgatgtaggatttaagacatatacaactagcgagtgcaaaagagtatgaaaaagctagttgtggtttgatgtaggatttaagacatatacaactccaagcgatatatgctactcacattgcgagttgtggtttgatgtaggatttaagacatatacaacgtgttgctcgcattggtaacatcgaaatggttgtggtttgatgtaggatttaagacatatacaacggtgacaacgtgttcgtcgttgaggacatggttgtggtttgatgtaggatttaagacatatacaaccgctcaatcaaatccatgttcgccttcactgttgtggtttgatgtaggatttaagacatatacaacgctcctggctcaacttcttctgaatatgtgttgtggtttgatgtaggatttaagacatatacaacttttttaaaaactcataaagagcacgaacgttgtggtttgatgtaggatttaagacatatacaaccggccagcctttgctttacctataactcctgttgtggtttgatgtaggatttaagacatatacaactatatggttactaattacatttggtaaacgttgtggtttgatgtaggatttaagacatatacaactcgtcgaggatgctcccggcgttcatcatggttgtggtttgatgtaggatttaagacatatacaacgacgggacgttcggcgccaagtacatgaacgttgtggtttgatgtaggatttaagacatatacaaccaaacgagcaaaaaggcgctgaatcggacggttgtggtttgatgtaggatttaagacatatacaactacattgcgttaacttctccgtttgtgtaagttgtggtttgatgtaggatttaagacatatacaacgatgatgagggcaattttgtccaggaattagttgtggtttgatgtaggatttaagacatatacaaccgaccgctggctgtcagtgtgtagtttaagttgtggtttgatgtaggatttcgaccatatacaataatcgctcgccccctcgtgggggcgtggattgaaactaataaactggaacgaattgtcagaataaaactggaacggtcattattcatccaatcaatcatcatgcttctcccaattgcttttgtcgtactccttccatccgtccgctagcattccatgtagacggcgcatcttgcggcgttactgcgtaacatgcccttcattctgatggcaaatataacaatcgtaaagttttgtcattcagcgcgaaagatttgtacgatttgaacagatttgtgagattatctgcgcggagcgcactcctaaccatttttatacaccctcaaggggaatagaagctttgcttgccacagctgaaccttcaggttcacaactattcctctttattatcgtcagttggcaagtaatcactggctttggcattcgaaatgatggaacgtcctaacttactttctaattgatttctcgttcagtctcacgtgcagtccaagcgttgtttacggattccagttcgtaatactcgcgtttgtcggggtcatcgatctgaatcagcctgcgatattgactccagtttaattgcgaagacaccaaatcccgagccatattctagcgctaatcgtagtgccagattcttaataaggtatgaaccatagtcggcacgttccttgccatgttgctcttcttcaaaaatgcgttgtcccaagtgccaatacatttgaacacggcaaaaatccacgctgcgcacagcgttagcccgtgcagattctataattgctcaggacggatttgccggacatcctccggtgaataacgcacgtcaacagctttcccgctctgggtgccctgataacggaatatcagacccatgccagcgcggttgagcatgtggagcaggtgagcggtctcggggtcggatgtggtgcgaagcgactcttccgtgcctttgcgcatcttgctctgcgactgctcgatggcctgcatcttcacgatgctctcgtcgcacatataataatagacggcatcgttgtcctcaatcgtgaatttcgtcacacggatgcctgtctccacatccactggcaacttgccgttcacatcgcttatctcagctttcaacgcttccttgtacgtggcgcgctcgtcggtttccgtaggttgggcgactggcttgtcctgagtagcagtcggattctctttcttcgtctgctgcgccgccttggctttgccagtgggctgctgtttggacgtctcgcttcccgagcaggaggcaagcacaagtacacttgtcagcatgaagctccacagcaagtgaatcgtgttctttctcattgttccgcaatataataacatgttcataacaataatttcaaaccatccccatcccctggccctcatccgcaaggccatctaaagtctaacgtctaaccctgtcaggaagtcaaaaaatcctttttaatcctttaaatccagcgtttaagccaaatgagcagtgctaagctcgcttgtgcactgccatggcgtagctggttcggcgaagccaatccagcgcgcagcgcgatgttttttcccatccgcaaggccatctaaagtctaacgtctaaccctgtccggaagtcaaaaaatcctttttaatcctttaaatccagcgtttaagccaaatgagcagtgctaagttcgcttgtgcactgccatggcgtagctggttcggcgaagccaatccagcgcacagcgcgatgttttttcccatccgcatggccatctaaagtctaacgtctaaagtctaacgtctaataactcaccaacaccggattgctgttcagtcctgaagccaccgtgttccacttctcgtaggtgtcgcgtttgtagttcaaatccaccacgttgatttcattgaacttacgccatttcacaccatcgcggtccatcttggcgatgcggttggctggaaggttagttacgtaaatctcgatgttgtttttgcccttgcggagctgactcgtgatgtcgcagcggaacggcacgcagaaaagtgtggcgcattcctcaccgttcactaccacgcgggccgactcgcgaacgtcgccaaggtcgagaataaatcgcatgccgtcgcgtttcttcactttcagtgtggtggaatagcatcctgtggccatcgtttcgttcagtttctcaacaccaagcgtggtccatgcagctgcttcctccatcgtgtaccgttcgctgattggttctggtgccgcctttgggaaggtcagcgtccagcctttcagaggttgggttgaagacggggctccgagatacggatagttggctgtgagaatggtgggtttgtcgtaagtgcggagaatcacactctcgcctgatgccagctggatacggacttttccgccctcatgcgttgcggcacccacaatgccagtcagagggttgtaaagtgcggcatcatggaacgtcacaccaaggtctatcaggctgtccacgtcgtggtcctgaaggttggagatgaaataatggtgaccctggtcgttcgccctgcggatacagctcagtcccagttccgtgcgcatcggttctttgcgtcctccgcaggcggcgagggcaaattcatagtctttggcgagggtggtgcagccgcgcagcagtcccaccacgttgtcgaattcctcctgttcgcctttcagctggcgtcccagtccgggaacgctctgaggatagctgcccacgaacaccaccttacggccgctttgggccagacgcagcagatgggtgagggtgcggagcggcatgaactgaacgtcaggaataatcacggcgtcatattgctgcccatccgcaagctccatgccgcgctcgcatgggcgcaggcggctaaggtagcggtcactgatgtagtccacgtcataaccaccgcggatgatggtctggatggtgtggatgaatttcggtgcacgcttctccatgctgtggatgtcgaacagcgccactgtgcctggttggtcgtaaatcatgtcgtagaacggaaggtaaaccaggaagtcgttgtcggggtggccccactggaggaacgactggcaacgctggatatattggctgaatgcgggcatcgcgtcccactgagggttgttcggagtcatatccacgctcgcatagaaacgccagccgggccattcggcttcttcgggcgaatagcaggaaccatggaagaacacgtggttcactcccgacacgaacatcaggtcgaggtcgggcttgcactggctcagcgacgtgcggaaatgctcggtaagccatgtgaaggtctcgctcgaggtgtagggcttgccggagagatgggctcccgacgacgcatatttcagcatcgacaggtcggagaagttcttcttcgtgaagccagggtcggtgcgcaggcctttgatgccaaagtcgctcaggccgaaaccttcgcattcaggaatatccacagctgcatagaggtcaatcaggttggctggagaaccatgtgcctggttgcgcgtgagggatccgtcggcattggcccagcgggtccactgctctgtgaagttcgtgagaagcatctcgcccaaggtctcgcggtagtcggagagcacacgcttgcaggcgtcggtgcggagcgagtcgggggtaacgaagaggtcgagcttctcttccagcttatagccccgtcgtttggcaaactcactcagaagggtgggggtccagtcggcgccataaacctcgtaggagtcgttgaagaaggtgtggggacggggagcgtgatgacgcacgaaggcggtggagatgccggccagatagctgcgcacggactctttgtcgaagtggtcgatcacgtagccctctccgccgggagcggcacgcttcaccatctgctgcgtgcggcccgcatagagcacgatgagccgacggcgtgccgaaggatccgccaccgatggcacgtccacaaccacgcgcttgccgtcacgtcgcactttcgaactcaggtccaccacaggcatcttatcctcgaagagcatggcgcaggcaagctgaggttctgacttctgcttcttgtccgtgcacgtgatgtcaagctcctgtccttcggctcccagctgatactgttggatgatggccttgcaggcggcttggctcagcggaacgtcaggacctccgaaaggccagcctgtgccggtggacatgttggtctcgatgcccaccgtttttcctttctctatcgtatgggtcagcattttcatccatccgtcgccaagaaacggcaactcgttggcgctgttgccctgaacaccgtagatgggagtgatctccacaccaccgatgccggctttcgcatactcactcaggttatagtccaaacctttttcagtcacggcagaacccaaccaccaccagcgggtgtagggtttggcttcctgagggatggaaatccactcgccgccactctgaccggcagcatgcatggcgctcaatgccaccaagagggaaagaaaaattcgtcgcatattctgttttaggttttgatttcgatttcgatttgaatgctcacttctcaatctgtcgatatctcgtaatatcgttatttcgatttctcgttttaaataaaaactctgctcatctgaataattcgttaaattagctttaattcgtcgtttttacccatccgcatggccaactaaagtctaacgtctaaagtctaacgtctaattcccgtctggtttcagtgcctcggtgaacgggctgtccacccagtggaaggtctcgacggcatcaggcttcgatggatcatataacgtatagtcgctgcgcaggtggctcacgattggaaggccaatttgcttcatcccttccacaatcatcttgctgatggcgtacgcaccgtatggattgaagtgggtgttgtcctccaatgccttcagctggcctggataggtgttggcaggatagtgcaccagcgccttcttcgaaccttccacacccatggtttcaaacagggtgcgggtcatgtcgtgaagctcaatcacaggaacctgttcacggcgggcaaccgcacgcatggcatcagggtagtcgccgtgggtctcacggatatgcccctcgccatcgaacgaacggcgctgggttggcgtcacaaacacgatggtggctttacgggagcgggcctcgtcgataaattgcttcaggcacatggagaagttgtaccaagcgccggcaccggcgaatttctgcttctggtcgttatggccgaactccacgaagatgtagtcaccttctttcatcagcgacaggattttcttcaagcggccggcaccgataaaggtggaggcggtctctccgctctcgccgtagttggcgatagccacgccgtcgtcaaaccagcgtggaatcatctgaccccagctggcccaaggctcgtagtcctggtccaccacagtggagttgccgcacaggaaaacggtgggaacggatgcgggagctggctcaatccggatgctcgagcaggctggctgctcaccgctcacttcaagggtcagcttgtcatcccagttcagcttggtcttctcgcgctctttgatgcggacacggtccaccaccttgcgttcgctgctgccgcgctctgtgccccatatttcggtgttgcgcttgttcaccacgaacgaataggttttgaattcacctttcttcgtctcgatgtcttccagcatcagacgacggctctcggcacgcaccaccgtgttgccccgctgcttcttcgcaccgagcgtcacggtcactttgtaattgccgtcaggcacgttcaccgacagaaagaaaggagcggtgccctttgtgccgcgaacctctttgccgaagcgctcactgatgagtggcgaactcttcacgagatccacaaagtcaaaaccataacctttctgcgcgtcatacaagtcgttcgcagtcaactgaatgccggtcttgtcgcgaccgtcaaaggaaaaattgtaggtctgtgcactggcacccacggatgccacagccaacaaaccaactgtcaaataatatctcataattatattatttatgtatattcttttaatttatccgcatggctcatcattcccatctattcccatccattcccatccattcccatctattccca

SEQ ID NO: 4200 - DNA, 23461 bp, synthetic construct
  misc_feature 1..23461: note = Synthetic
  source 1..23461: mol_type = other DNA
cgtctgtcccatgggacaacacatgaatccttgcggacaacggcaaacgaaaagcgactctggctatgtgtctgtcattacattatatagagcgcagcgatgtgaaggctgtccacttgggagtctttgcaagaaagccaagggtaacagaaccatatatgtcaaccataagttgaatgcatataaaaaggaagcatttttgctgctgacgtctgaggaaggtatgaagcacaggagtcagagaccgatagagccagaagctgcgtttggacagatgaaggcagacatgcattacaagcgattcaggcatttcggaaaggacaaggtttacatggacatagggttgttcggtataggattcaatttgaagaaacatttggggataaaacgataaaactcaatttggacagttttaccgtctgggacaattatgcccttttgtgagcttttgcgcagttttgttatcgataaaacaagaaaagtaaagtttctatacaatataataagattccccttgtgaagaaagactacgattcacctaaaatatacagaaaaacacaaaaaaaaggtgcgtcacaggcttatgacacaccctccttggggaaagcggtggaccctcccttaagggtaagggaggactgttgggttttcgaaagaaatcgaaaaactggtggtttttcgaaaaaaatcgaaagaaaaacatattaaggctaattaaggataggtggagtttcgagaaacaaaaacctcgtttctctaaaggaaaaagagaaacgaggtttcattatcactgttacattgggaacaatccgaagagttcagcgtcgatttgatccgtcactttgcggaaatcctcaggattttcctcaaagtgcaagttgtcgccatcaacgatgatcagctttcccttataccccttgatccattcctcgtagcggtcgttcagcccctgcagataatcaatacgaatactcttctcgaagtcacgtccacgcttctcgatatgactcacgagtgtagggatgctgcttcggatatagatcatcaggtcgggcagtttcaccagactgatcatcaggtcgaagagatcagtatagtttgcgaagtcacggtcgctcatcaatcccttgtcatgcaggttgggtgcgaaaatcttagcgtcctcgaagatagtacggtcctggatgatggtttccttgttctgtgctatttccaccacgtcgtggaagcgcttgttcaggaaatagatctgcaggttgaacgaccatcttttcatgtcctcgtagtagtcagcgaggtaagggttgttgtccacaggttcgaagttaggcttccaaccgtaacgtttactgagtagtttggtgagcgtagtctttccgcttcctatgttgcctgctatagctatatgcatttctttatttattttttatgatggttattatttatctttcctcctcctccttcgagaagagtccgaagagttgcgagtcaattctgtcgacgatttcgccaaactctctggggttgtgttcgaagtcgaggttatccacctctatgaccagcaccttccccttgtacttcttgtatataaactcatcgtacaggttgttgatgccctgcagatagtcgatgggcatctgctgctcgtagtcgcgtcccctcttctgaatgttctttactaagtgcggaaccgacgatctcagatacaccatgagttcaggcattttgatcacctgcatcatcgagtcgaagagtcccatgtaggtatcgtagtcccgctcgtccatatttcccatattcttgttgttggtagcgaaaacatacacgccctcaaagatggttctgtcctggatgatggtctccttgctcttttctatctccaacaggtttttgaagcgctgtttcaggaaatacacctccaggttgagcgcccatctcgagatgtccttgtagtagtcgtcgatgtatgggttatcatctacaggctccagaaatttcttccatccataatgctttgcaagcatattggtgagtgtcgtctttccgctgccgatgttgccagctattgctatgtacatgttatgttgttataagtatattatcaatccgttgttatgattctttcgtaaactgctccacgaactggtcttccgtgatgataggaatgcccaactgctgcgccttcctgttcttggtgcttgccgaggcggcatcgttgttgatcaggaaggacgtgctcttgctcacacttcccgtcaccttacctccctgttgctcgatgtaagccttcagctcgttgcggttcttgtagtggtgcacgtcgcccgtcaccacgaaggtcagtccctcgcacatcgaacccttctcctgaggctcctcctccctgatgtcgagttccttcaggagtcgctgcaccttaccgaagtttttgtcgtcgcggaagaagccgataaacttggcactcttctccggaccgataccctcgatgcttgccagctcgtcgtcgaagagagccgtgcgtgccacctcgatgagctttgccaccgggtattcagccagcagtctcttcgccacatctccgccacacagcggaatgttgagcgcatagagcagatgacgaccgtcggtggtacggctcttctcgatgctttccaagaggttgtgcaccgacttgcggccgaacccctcgaaggtagcaatctggtggctgtattgcgacagatgatagaagtcggcatattcgtggatgaaaccgcagttgataaatcgcgaaaccgtctgttccgagataccctcgatgttgatgccctccttgctcacgaatcgcgagaacttcttcagctgcttggccgtacagtcagggttggtgcagtgcagcgtcttcgtgccgctctcactctccgtcaccaccgcctgtgcaccacatacagggcacacctcaggtacctcaagcacacccaccttctctgtgatgcgaatcaccttcggtataatcttgttggccttgatcacctgcagacgcgtacccttgccaccgatgcccagtcgctcacactcactgatgttacagagcgaggcacgttgcacggtagtaccctccaactccacaggcgtgaagacagccacgggcgaaatcgtattggcagcacacgaccattctatgtggtccagggtagtgtcggcatgcgtgtcctgccatttgaaggcatagccagcacgtgtggcatgatgtccggtcaccgaccccgtggcagcatacgccgtatcatcgtaggcaatcaccagaccgtcgacaggaaaggggaacaccttgttcgtcaccttgtgggtgaagaggtccaccaccgcctggatattctcagcagtagggtggtcgatgcgttcgcgctccacggggttgaagcccagcgaaacgaggaagtccatcctctcgccccacgaggtgatgtcgtgctccgtatatactaaggtaaagggaatccactgcagatgtcgtggcttcacctcctcgatgtccttcagagccagcgagcccgaggccaggttgcgtggattagcatagtcgccctccgtctccaacacaaatcgctcgaagtcaggataggagatcaccgcctcgccacgaatcaccaagtgtcccatctcgtctatctcttgaggaatacccgcgatggcaggtgccagataagtgatgttggtaccgatgtgcccgttaccacgagtcaccaccttggtcagcctaccgttgtcgtaggtcacgacgagagtcagaccgtccagtttccacgacagccagatacaccttccgtcagcccatttcaccagttctgccacactcttcgtcttggcaagcgacagggcagggaactcatgttcctccttctgtcccgccacgttgtcttccgacaccttggcagtaggcgagtcgggcatggtgatacccgtttcctcttccatcagtttcagccggtcgaacagagcgtcccattcatagtcgctcatcagttcccccttaccgttatagtaagcctccgaggcctggttcagtttatccacccattgcctcatcagcatttcttgctgtgtcatatatatattaatatttatcttactttttcaagtatggaagttcgataagttaaagaagcttccccggttagcaaaagtaaagtttccattgtttttgcaaaaataggaaatagttttcaattagccaaacattcttactcttttcactgatttcttaataaatatttggcagtctcatagaaaagccatacctttgtcgagtctaagaatttcaattcaaataacacaaagacatatgttccgactgaagacattaacgatattaggcagcaaggccgagctatccaccctccccgagggcaagttgctcatcaatacgatcaacgcccattcctacaacacagccctgaaggattccctctttgccgaggccctgtcgtgtggcgacgtactcatccccgacggagtgagcatcgtgaaagcctgccgatgtataggagcgaagtcgcagcctcgtgagcgcatcgcaggctgggatctcttcgactacgagatgaaccgtctcgaacgtgagagtgaagcatcaaccgccaaaggcgaaagtcctaagacagtgatgtttatgggaagctcccagaaagtactcgacatgatagtgaagcgagccgccgaggtatatccccatctcaaggtagccacctattcacccccttacaagcccgagttcaccgacgaggacaaccgcgccatcatcaccgccatccatgcctccaatcccgacctgctgtggataggcatgaccgctccgaagcaagagaagtggacctattcccactggtcagagctcgacatccactgtcatgtaggcaccatcggagccgtcttcgacttctttgccggcaccgtagcgcgtgcccccttatggtggcagaaccacggtctcgaatggctctaccgtctcctgaaagagccccgccgcatgtggcgtcgttacatccttggcaacaccctcttcctcaagaacatgttgaccgagaaactctccaaataacccttggcagcaatccctcagcaaacagccagcaagcaagcatcaatccagcaagcactcagcaagcatcaagcatcgggcaagcagccagtattgagcaagcagccagccagcatcgagcatcgagtgagcactcagcaagcatcgagcatcggtcaagcaacccgcaaccaagtccttgagtgaaagcgggttcatccccgcacaaaaaaccgcagctttgctgctggcgaagacctctgatggtccgccaaccatagaatgaaatggttacgagcgacgaggaggagcggtttcctcttcttccctgaggggagaagaccgagatgagaggtggaccctcccttaagggtaagggaggactggtgggttttcgaaaaaatcattattatgtcaagaaaaagcaaatataaatgcaagaaatgcggctacgccacggacatatatgaaggccgtggcttcatgggccaacacatagaagccatgacctgccccgactgccacaacatagtcccccttgtcgtaggcggcgtcataggagatgccgcccccagtttcaactcccttgtaggcagactctgcctccgttgcggttccgaccgcatacacctctgggatcaccacacatgcccccgttgtggaggtgagatgcaacccactggcgactccgaattttggacgtaagaagccccaaagcagcctgtctgtattattccaataccataaaacatcagtttctaattttaaaatatgtgaattcttcttctttttagacaaaaagcattacttttacagcgaaaaatgcactaaccactataatcctgcctcatattttaaaatgtaagaattatacaaagtagtgtgataacgatattattttgtaaatagtaaattatgtcgaatatcattttaaatcctggtgtttacgaaacactgatttcccaagcaatccaagataagctcgatgaattatccgagtctaagttcttggttaagaaagagaatattgacagcgcagaatcttataagatgctggctgaatatttgacggaaatagtttcaggcatcttaaaaggttatttcaggcgcaaagatggcaatgatacgatttctgcacaagtagaagtcgtcaatcgtattcttaaatttatagaacacgaatggaatgctgagggaatagaaaccacaccagatttactttcagaagaaaataagctatttttccttcgaggcatttacgacaaggtgggatatactaatgaacaagtcgcagcgaaagtcaagaaccaacgcatttctggatatagagtaagcaatctgtttactggtggaaacgatctttccatggatgaagaagtaagacgagatatccagacagcagatgaaatagatttgttagtatcctttatcaagtttgagggtctacgactaattattgattcactacgtgagtttgttcagcgtactggtaccagattacgagtcatgacaaccacttatatgggtgccacagacccaaaagcagtgcgaaagttgtatgacctaagagagttgggcaatgttgagatacgtgcttctttcaataccaagcaggaacgtttacatgctaagtcttatatctttacccgtaaaacaaatttcgacactgcatatattggttcgagcaatctcagccggtctgctttgactaagggattggagtggaatttgcgtgtcacgaccatagagaatccacatattatcaataagaccaaagctacgtttgatagttattggaatagtgatgattttgagaagcttgatacagaagaagcgcttcgtcgatttgaagagtctatctggaacgagcgccatgtcagctatggtcagcagacagatagtgaatacgttacacgttttgaacgtaagactcatcagataaaggtgctcgagaaattacagtttgagcgcaacattgttcatagttataaaaacctcatcatagctgccacaggtacaggcaagacagctattagtgcttttgatttcaaagattataacaagaaattcaagaaagaacatggacgaaatgcacgattattgtttgtagtgcatcgagaaaagattctcaatcaagctcgcagtacttattgctctgtcttggtagacagtaattttggagagatatggacaggtaagacaaaaccaggttataatagtagtcttgaacatctgtttattaccatccagaccttgaataataactgggtcacctttgaacgtatgggaccagattattatgattacatcgtcatagatgaggtacatcatagtgctgcaggtagttatcgtgaactctttaatagatttaagcccgagatatttgtaggtcttactgctactccagaacgaatggatggcaaagagattcgccccgatttcaataatcgttttgctgcagaaatccgtttgcaggaagcgcttaatcaacagctcttgtcacctttcgattatttctgtgtcacagacgatagtgtagacttaagcaggcttgcctgcaaaggcgacaaatatgatgtatcccagctaaatcaggtgtataataacaatgcacagcgttttggtattatacagaaagccttggacaattacgtgaatgatccgcatgaatgtaaggccgtttgtttctgttgtagcatagaccatgctaattatatggataccatgttccgaagtcatggatacaaatcaatggctgtcacttcacgcaattcctcagagttaagccatgcctcaatgatgcttgcacatggagaaatcaactatctctgtgtagcagatatcatgaacgagggtgtcgatattcccgagatagatacagtcttgtttttgcgtcctaccgaatcgttgaccatattcttgcagcagctgggtcgaggattacgattggctgatggcaagacctgtcttacagtgctcgattttgtagctcaggccaaccagtcgtataattacgagagtcgttttcgtgctctcgtaggacgttcctctcagagtatagagaaggagataaagaatggctttatcttcttgccacgtggttgtaccatcacgatggagaaacgagcacaatcatatattcttaaaaatattcatgaagccatatttaatctttcccggttgagaagagaatgtcgttctttcactcagaacacggggcaagatcttacttatgagaacttcattaataactttgatcttgactggcgaatcgtctataaatcaccggggtcgtgggctcgcttaaagaagcagtcgggcatagatgtgcccgactttgatgagcaaagcaagtacacgaagttgttggaaggcggcttggctcgtctcttccataccaacagctatcagtatcttgaatatcttctgaaactgataagcaacggaatggttcatccttcaaatgctacggctcgagaagataaattcttccagttgttctattatactgtatggatggatgacattcaaaaagtaaacaaactatatcagcaatcttttgcgagttgttctgatgctgttcgttccgtagccagtcttaagtggtttatggaggaacttagttttatggtttcacttcgtcatagtcagttgaaccaaaccaccaactggctaaaggtagatgatcaagctgaaatagaactctatggctgctatagctcagacgagattcacttactcttggagaataaactgggacgctggcaggtattgggcacacaatataataaggagcgcaaatttgccatggtctttgtgacattgaataaatccgataaggaatattcgcccagcacactatatgaagattatgccatatcgcccgagcagttccactggcaatcaatgaacaaagttcgtcagaatagtgaagagggacagcgtatcattcagcagcgtgagaatggatggaagttcctgctctttgtccgtgattcaaagcaggacgaatatggaatgacaaatgcgtactattgtcttggatttatggactttgacagctgtcataatgaatgccctatgaatgtcatttgggatatgcaacaatctattccaggatttattcttgaatcggctaaggctgtataacgacacgagatatgaaacaaatagaagtagttgccgccatcatctgcaatggcggcaaaatatttgccacccaacgaggatatggcgaatggaaagactggtgggagttccctggtggtaagatagaaataggagagagtcccgaacaggcactctgtcgtgaaatacgtgaggagttggctacagaaatatccgtaggtaatttgcttcataccgtagagtacgattatccccatttccatctcacgatgcattgttatctgtgtaaagtagagagtggcaacctcacccttttagaacatgaagcagccaaatggttgtccttagataatctgcaaagtgtcaactggttgcccgcagatagggaagtgttggagtatttggagaaataagaaagatggactaaatagaagttgcacagaatcgtataaaaaaaactcccaccgaagcgggagtataggtttaacaccttcggcagcaattaccgccttattgtgataagatgtaggaaatcttattctgaaggcaaaaatataacaaaaaacttgtttatccaaattatttgctgtacttttacaaaaaattaataattcattctataaaataatgaaagtatgactaaaattttaggaattgacacaggaactaatagtcttggatgggctattgttgagaagcagaccgatggatatcatttgcttgataaaggtgtaaacatcttccaagaaggtgtcaaaatcgaaaaaggaaaagagtcttctaaagcagcagagcgtacggctcataaagcagcaagagtaagaaactatcgcataaaattacgtaagatccgtctgcttcgtgttttaagtgattcccatttgtgtccaccactttctaaggccgaactttctgcatggcgactcaagaaagagtatcccaagaatgaattgtttatgcaatggcaaagtactgatgatgcattagaaaagacaccatacgcatgtagacacaagtgcctacatgagagtcttgattttagtagcatgactgatagatatatcttaggacgtgccttttatcacatgattcagcgacgtggctttttaagcaatcgtaaagatcagagtggtgatgatacaggaaaggtaaaagaaagtatcagcaacctgactcaagagatgcatgatgctggttatgagtatcttggagattatttttattctctttataaaagaggagagaagattcgtaatcattatactgcacgcaatgagcattatcttagtgaatttaaagccatttgtgaaaagcaagatttagctaagaatcttggtcaagaggtggtaagtcaaatagaaaaagctatcttcgaccagcgtcccttaaagtcacaaaaggggcaagtgggcaaatgtgtgtttgagaaaaacaagaccaaatgcccctcttctcatcctatgtacgaagagtatagaatgctctctttcatcaataatattaaaatcctaacgccaaaagatgatgcattacgacctttgtctgcagaggaacgagaacttatcatgcctttgttcatccgtaaatcgaagaagcaatttgattttgaagatatagcaaagaaactggcacccaagaagcaatatggatttttcaaaaagagtgccgatgctggtatgccgtatcttttcaattatcctatggatacatctgtttctggttgtcctgtaacagccgcactgaaagatatctttggcgacaactggattgatggcctttgcgaaacctatacgctggctgagggtaaaagtcgtttggatattattaatgatatttggcatgcattattcttttatacagataatacaaaacttgcagagtttgctaagaatcgtttacaattgagcgatgaagaagccaagaagttttgcgaaatttctttgccagctgattatgcttcattaagtttgaaagctatttgtaagattcttccttatctaagaagaggtttgatttattctcatgctgtctttttgggtaatttgtgtgaagtaatgccgcaatacgaatggaatatagaggaaatgcgtgaagcagccattgataatattatccacgaaatgaaccagatcgattctaaggatgcacgtacttttgaggtttgtattaaagaatatctgagggagcagtatcatgtatctgatgagaaactcaaaaagttgtaccatccttcgatgatggaggtatatccaagagtacaacatactaacaatcacggtgtttatcagcttggatcacctcgaattgatagcgttcgtaacccaatggctatgcgctctatgtttagattgcgcaaattggtaaaccgcttgttggaagagggaaagatagattcggataccgaaattcatatagagtttgcacgtgagctgaatgatgctaacaagcgtaatgctattgctgcttttacaaaggaaaatcaaaatgcaaatgatgatgccagaaagcagattattgctcttttcaagaaagaaacaggaaaggatatcgcccccacagataatgatgtcttgaaatatgttctttggaaagagcagaaacacatttgcctgtatacaggaaagcagatagctatttctgatcttgtaggggcaaatccaaagtttgatattgaacatacgattcctcgtagtgttggtggcgatagtacgaaaatgaacctgacactttgtgatagtcgtttcaatagagaagtcaagaaaaccaagttgccaacagagttgtctaattacgatgagattatgactcgtattcaaggctggaaagatgaatatgaatctcttgaagctcaaattcgtaagcaaaagaagttatcaaaaggtgcaacgactaaagaacagaaagataatatcatacgtaaacgtcatttattagaacttcgtcatgattattggaaaggaaagtacctacgtttcacgatggagagtgtacctgaaggttttagtcgtcgtcaaggtactgatatcagtgtgatttcaaagtatgcacgtctttacctaaaatcactattcaagcatgtctataccgttaagggtattgcaacttccaatttcagaaaaatctggggtatacaagatatttatagcaaaaaagaacgcgttaaccatgtgcatcattgcatagatgccattgtaatagcttgtacaggcttggatgaatataataagttgggtgcatattatcatgatgaagaaaatcatgaatggtatggtaagtctaaggcttattttaaaaagccatggccaacttttgttgaagatatcaaaaaggtgcaagatgaaatcttggtttatcattatacaccagataatatgccaaagcaaggacgtcgtagaattaaaatcaatggtcaaaaagtgctttgcaagggtgatgctgcgagaggttctttacataatgatacatactatggtgctatagagaacgatggtcaagtgaagtacgttaaacgaatagacttgacatcactcaaagagagtgatgtgaaaaatatagtagacgatactgtaagagagattataaaagcagctatccgtgagaaaggttttaaagatgctatggctggaacaatatggatgaatgaagaaaagcagataccgattaaaaaggtgagatgttttactccgtctgtaacaaagccattaaatattcgtcatcagcgtgatacttctacgaaggagtataagcaacaatatcacgttgctaatgatagcaactatatgcttgcactatatataggcaaggataaaaaaggaaaagaaaaacgagagtttgaaattgttaatatgctacaagctgcgcaatacttcagaacaagtaatgataaaaatgctgcagaagggcatcttgttcctgtaaaaagtgaacatgattatccatttgtttattctcttaaaattggaacctctgtccttctttacgaatcttcgccagaagaaatatgggaaagttctatgaaggaacaagcaagaagaatgtataaggtaacaggtatgtccacttctacgataagtaacagtgtttatgctagaataacctttgttcataatgaagaagcccgctcaagtaaggattttaaagcgaaaaatggcgcatacaaacagggagaagaacttcgcccttcaataatcatgctccacacgcaattaaatgctttagttcaaggctatgattttgagattaacgaacttggagaaattaaaagattaaggtaatatgattaagcagacattattcttttcaactcccgtttgtctttcgcttaagaattgccagattgtaatttcttggaaagactgcgacgataaggtaactcgtcctattgaagatatagggtgtgtcgttttagaaaatcaaatgataaacattaccttgccgcttcttaacgagttggtaaagaataatgttgctgtcatattatgtgataacaagatgatgccgacatctatgttacagagtttagacgcaaatactacgcaagctgaaagttttaaatttcagcttgctgttagtgaacctatgaaaaagcaagcctggaaacaaataattgagtcaaaaattaaaaatcaggcttccattttgtcccttacaggaaaaagtggtgatgtattaaaaccatattttagtaacgtcaaaagcggagattctgataacagagaaggattagcagctaaaatatattggaatatgctctttggtcattcttttaagagagaacgtgatggaagtactcccaatgaactattgaattatggatattccattttgcgagcagcaacagctcgggctttacttggatccggtttattgccaaatttgggtatatttcataagagtagatacaatgcttttccactggcagatgacgttatggaaccttatcgtccttttgttgacgaaattgtttatactcttttcagcaaaggcgtaaccgatttaaataaagattcaaaatccgaattattgcgggtgctaaattgtgatgtaaatattggaaaagtaaagcgtccattacaaatagctttaactattactacagcctctctcgttaaatattattctggtcaagtaaaaaaactgtctttgcccatcattatatgacagaagatagacttaatgcatatcatattatgtggctatttgtattcttcgatttaccagttaccactaaaaaagacatgaaagcagcttctctgtttcgtaagaacttagagaaagatggtttctccatgatgcaattttctgtctatattcgtcattgtgcttcgagagaaagtttagaagttcatattaaacgtgtgaaatccttattgccagaatctggaaaggttagtatactgagtgttacagataagcaatatggcgatatttataatttctgggggaagcctaaaagtattaataagagtaaaattacgaaaaaagtaatcagtgaacctattcaactggaatttttttagtaaatttgcatatagaaaaaaagtcctactcgccatttcttacaagaaatatggttattattacctgattatcagtatattcgtttctttaggttgtggtttgatgtaggaatataaagatatacaacggagcagtaaaagaaactttggacttgtcgttgtggtttgatgtaggaatataaagatatacaactgaccgtctgtggctgtttgctgttctcctgttgtggtttgatgtaggaatataaagatatacaactgttcattttcgttctcaaaccaaatagtgttgtggtttgatgtaggaatataaagatatacaacttgtccttctcgttatattcaaacacgaagttgtggtttgatgtaggaatataaagatatacaacagaaactgaatagggaacatggaatcagtgttgtggtttgatgtaggaatataaagatatacaacccaatagctttaatatcaggcatagcgtcggttgtggtttgatgtaggaatataaagatatacaactgcgtgtgaacttggacgcactcaaggcaagttgtggtttgatgtaggaatataaagatatacaacccagcattaagaatattagaaccgttctttgttgtggtttgatgtaggaatataaagatatacaactaaaaggattgacgtatataagggttatagttgtggtttgatgtaggaatataaagatatacaaccaagaaccattgttatccttaacaaatttgttgtggtttgatgtaggaatataaagatatacaacccacacctggcagcatcgagacaccaggaagttgtggtttgatgtaggaatataaagatatacaacataaccaagcatttgcaacaacttagcaagttgtggtttgatgtaggaatataaagatatacaacacatagttaataataccctccacgtgcaagttgtggtttgatgtaggaatataaagatatacaacaaattgagaaccgaactataaaatatatcagttgtggtttgatgtaggaatataaagatatacaacgtgatctattccaagtttacagccgtagcgttgtggtttgatgtaggaatataaagatatacaaccatagcatgaatattgaagataccttcggagttgtggtttgatgtaggaatataaagatatacaaccttgaagtctgcaactgctgttggtttaacgttgtggtttgatgtaggaatataaagatatacaactgttatggttaagaccttacacatgggtggttgtggtttgatgtaggaatataaagatatacaactcttgctgataaagcacacgagtcggcaggttgtggtttgatgtaggaatataaagatatacaacatggcaacggaaaccccgataccagccaagttgtggtttgatgtaggaatataaagatatacaacatccgctcgacaacagcggacaagcacagagttgtggtttgatgtaggaatataaagatatacaacctcgcattctacgagcgagagtggaaggagttgtggtttgatgtaggaatataaagatatcacggttacgagtgaaccgattgacaatatgttgtggtttgatgtaggaatataattatgttaacaagtgaacctgctatttatgttgaataataatgcaggtcacttgcataataaaagagtgtgcgattatcgaaagtttctgttgatgaatcttcagaaataagtgatggcgtgtttctttacttttcaataattagttggagtatgcgttatttgtaatgttaattttttaattatttgatatatgagaaaatcggagaggatattcaactttgaaatggaggagagggaaggtaaggtgctgctcacaacgaaggaatggccgtatagtgtgctgcaggtggtgccggctacgccagagacgtttgatgaggtggtggagaaatgcagagagaggggtatggtggcgaagcatgatactgaccgctcttttgtcattattcatctctgtagtggggatcagaatgggttgttcccggaaaggcatgttgatatcaactccccttcggatgctcaaaggtgtattgatgccttgaaggatgctatggcgcaagcggctgttttttattattctaatgttattttgtcatagtttttggttatgacaaaataatattttttcttaaaagagggggattttatttagaaaatcaacctgtccttttttagccataataagaggtttttcgaaaacccaccagtcctcccttacccttaagggagggtccacctctcatctcggtcttctcccctcagggaagaagaggaaaccgccctactcggtgctcaaaccgcttcgctataaggttggcggaccatcagaggtcttcgccagcagcggagctgcattttgcggtatgcgaccgcatggataaaaatgagcgaaagggctgcagataggccaagatgcccatagcagcacgcctgaaggggcagaagctcttagtccagggcaacgccctgggtatgaggtcagtcagcaatgcgccctgtaagggtaaaagctttaaaatgcacataattaaaatggtaaatcagttgcgatatgtaaagcttttgcccttacagggcgtgtggggcaaaaacttgcgaaccttcagttgtttgtgcgtcccccaagagtcccgtttttctctctctcagggcttatcattttttaagggggctgaatctggtgaacgattgttctaaatgtcacgaaataaggaatatatgtactctttgatttcttttcgaatgcaaaactatttcgtaattcaggttttttgattacctttgcagccgtatgaaaaaaagaaagatgagatttatctgggcgatggttggcctgttggggctgtcgctcgtcagttgtgacaaggtgttcgacgtgcatccttatgatgtgaatatcaagggagagaagaatgtcaacgccaagcagatagtgaagatagaggaggcgacgaaggacaaaaccacctttcgtttcgcctttatcagcgactcacatcagtggctcaatgacctgagtgacgaggtgagcgacatcaaccgcaggccagatatcgactttgtgattcatggtggcgacatgaccgactttggtggcacaaaggaatttctctggactcgcgatcggctcaagaaactcaacaaaccctttgtggcactcttgggcaatcacgactgtctcggtacagggacaaaggcttaccaggtgacttttggcaatcccaactttgcttttatcgcaggcagagtgaagtttgtgtgcctcaataccaatgccatcgagtacgattattcgcaaccagttcccaatttcgactttatcaaggccgagtggaccaatcgggcagatgagttcgaccgctcagtcgtttgtatgcatgctcctcctttctccgagcagttcaacaataacgtggcagaacccttcaatgattacatccacaagctgccccagctgatgttctgtctcgacggtcatggccaccacattcgcatacaggacctctatgatgacggtactatcttctatatgacagcgagtgccaaggagcgaaagtattatatatttaccattactcccgacgattacagttatgagattattgatttttaggatatttcttcttttgtttctgatgcctgcatgtgttcaggcgcaacagaacgccgtggcagatacaacgttggctgctcgcgacacggtggtgaaacatagtcgctatgacaaacgcattcaccgttatcgccgctactggggagcactcatccctacgcaaaccgtcctgcagacttgtggcaacatgggactgttctcctttggagtgggctgggattatggcaagcatcaacagtgggagacgcagttgctcttcggctacataccgaaatatgactccaacagtgccaagatgacgataaccctgaagcagaattatataccctggtcggtgacgatgggtcatggctgggccttcgagcctttggagtgtggcttgtatttcaacaccgtcttaggctcagatttctggacgaagcagccgtcaaagtatggcagtggctattatcctttctccacacgcatccgccccaacatctttgtgggagagcgtttcacggtggatgtgcccgagaaccgccgcaagtttgtgaagagtgtcaccttcttctacgagctgagcaccaacgatatttatttcatgcgtttctatcgcaatggttctgccggtttctgggatgtcttcggcttgtcgttaggcatcaagacgcagctgttctgatgggatatgtgatagttgatactccttttggtttggaaaagtatcgagactgtgcgcttttggataagataagcgatactgtctgagattgattatgggttccagagttgaatatccataactttgttgccactatggttagcactgtcttcttcgaggtactgctccgtagtggcttctttttgttgggtcacttggtgccgatgatagtaggatatgccaatggctacagccaagagaaagactatgctgccgagaagtatgatgatgttttggttctttggcttttctgatagtcttttgcgcagaatctcaatgctgcctggacgcagtaagtgattgtgggtagtgcatatcttagcaattttctccagttttttatctccgatggtcgtggctatttcttcgatgactattcccaaggaaaagatatcagtccttggttctgcctttgcatctggcatgaactgttctggggcgatatatccagtagtgccggcagagtgcttgagaatgcagaaagcatcgctgtcggatagtccaaagtcgatgattttcacatgctgtcctgtatgagtaatcatgatgttagaaggcttgagatcccggtgaatgatctgtttgctgtgcatatactccaaggcgttcatcaactgaaggatgattttatgagcaagctcatgggtcagtgctttcctgttgatgaggcttttgagcgtctcgccgtctatgtgttccatcacgatggtggttcctaattctggaagttgctcaaggctgagggttctacagatattggggtgttccaactccaatccaatctcaaattccttggtgagggcttgttgatatactggtgtgtaaagaaagtccttcttgaggcatttcaagacgtagcgtttgccgtatttggtggcagtgaaaagtcgagtgtgtccggattgagaaacgtagtattcctgtagattactataggtattttctatgggagaggattcagaaccgtttgtctccttgtcgagatcttctgtatatccagagtttgactcgggatcattgttctttcctgttactttatcttgcttgtctggcatattctaaaaagttgatttgagtgattattacttcatgacgttgataagtgtgagaccgccattccttcctgccacaaaggctgcggttcgtttgccttttctttcgatataaggcagatatagaggctgctccttgataaagcatcctgtgacaaacttgtcgcctatctgcaacttactgttttcagatgtcaggacttcataggtgctttcgcccaaatagcgcaatcgcagtattcggttgggactccaaccgatggatatttcctttccttcttgcaggtcgttgcttatcacttgttgtgccatgaaaaaggatgagttatacttcgtgctgttcttcagccattttgtaaactctgcgtagttattgtaacctatatattgagccagggcatcaagtgttatatttcttggcttgtggtcgtcgtttacgtaaccgtataggcgtttgagggtggaggaggatatgctcttgccccatttttgtttgaggtagattgaaaactcctcgaagtctgtagtggtacagagcatctttccgtatttttgctcgatgagcgatttcaattcttctatttctggagtcgtcataatctgtcgttttatagtctttttttatctgttgttttattacttggaagagtcacttttgatgttcttgaattgtttccaaatgacatctcctttgtagaatgcagcttttcctgttggcacatgaacaatgcaggtattgagaaaactggtgcctcttgtggtgaaggcatgtgaactgcatacaggtggaagagttgcctctatatagatgtcggtgagagggcagaggtcgaaggcatagtcggaaatagcctctgtcttactgcctatccttactactttcaactgtttgcaaccttgaaaggtacttgttgggattcgtttcagattggcaggtaactttacttctttcaccttgctgtccataaaagctccttgacctatttccttcatgttgtcaggaagaatgaatgtctcgatgctgcattccttgaaagcatagttaccgatagaagtgatggtgcttggcaaggaatattctccttgcttgcccattggaaaccatacgatgttggtttgttgtgcattgagtaacactccattgacgctgctgtagttggagttggcttctgaaacttctatgcctctcagcgccgtacaaccgctggatggaagcagattgcttaccgaagcaggtatctctatcttggcgagtgacttgcaattcataaaggcatccttttcgatggttgtgacatctgtaggtaggataacttttgtgagataatcgcaattggcaaaaagtccttgtccgatgacgtggtcttgtacatatctgttagccccgtatggtccgcctcctgccacaatctttacatccgtcatgtctatgtaggctaatttgccaggagtatcggtctcgtccaagtttctacccatcatctttctgaggcaattcaggtcgtctccattcattggacctgccaaggtgagtgatgtataatcatatagattgttgcccaaaagggactgcagttcacccgcttctttaagcatgatggcatcgcttgttgtcgtataggtgatacactcaccgatcgtttctcccatacggcttttggcatacggccaaatcttataggtcgtattgagagtaagttcgtctataaggagtttctgttgtcccaagcctccagagtagttggtaagaatttctttcgtggcatttttgcttggaagttctttctcgatgttctcttttttagactgtgaacccgttgtgttcttggatgccaattcgtagtagcatcctgtttcggtaatgttctctccaccatcttccaagatgtcgtaactgacgaaggcacttgttggtccatgacttaacaatgttgtatttcctacctttggtttctcgttgggtagtgtcgtaaagttcatgatgtttccagatgtgatggttcgcccattgctgccttgcaacatataataataggtattgcttgcaatgagatttttcagacgaacggagacgttgttttgctttgatatcttttcgctttctgttgtgatagggactgtctggtccatattctccgttgttccatatctgaaatagagttgaggcatgtcagcatctccttctatttcggcaatgccgttcagggttgcttcatttcgcgtgatgtcggtagcagccaaagtcgataggtttggctctaagtaagatggcttgtcgctgctgcatgaagccatgagtatgataattgcaagattgatgataagatgtttcacttctttaaaatattttgattcctaatccgatacaaccttcccattgttttcctgcaatggtaatggtggaggctgtcatcgtaaacctgttgaaggaagcaagtacgcctgcttcggctgatatgcccttatgggtcaatccttcgttgagtagataaccgccaccttcgctttcactcctttgccaggccgttgcgcatcgtccgtatccaatgccctcgaataatcgtatgttgcgacttatatggtggatggctccaagggtcagcgtgtaattgctatgtcgtgtctcgcctgtgaagtagggcttagtgccattggcatcgatgcttccgtctttttggcaattaccttctgtattcccgatggttcgcaagtcgttgcttgcatggaggaagaaaccatggcgtttcatcatagcaaagaaaattccgtatgatggaccgtcttggtggagtgccacggtagccaaggtgtagatggagagtggcatcttgggcttagttcgtgatattgttatcgtgtcggtcacggtctttacttctacgatggtgtcgtgaacttctgtgatagtaggtttggggaggttgagtttcaactcgtaggtcatacggctctctaatggcttgtccaacttgtagtctctgattactccccattccgggtgtttcaaggttagcatcttcgtacctttgggtagataaagccatatttcgcccacttcgtccttgcgtttcacaattcctaatggggtggagaaagcaaagtcgcttggagcctctatcttcatgagggcacaagcctcgtcattgaggtcgcgtacattgtcaatgaaggcacttacgtcgttgggcaacaagcggaaacttgccaccgagaagtcttgggctgaacaggagaagggcataagcagtaaggacatgatggcaatcacgactcccgcttttctttcctttatccttttgatgatttcttgaaacttcataccttatta

SEQ ID NO: 4201 - DNA, 22877 bp, synthetic construct
  source 1..22877: mol_type = other DNA
  misc_feature 1..22877: note = Synthetic
ataccattcagttggtggattctaattatgtgagcgacttgacggtcaatagcgaccgttgggagttttcgttgcctattggagagaaacgcaaaggcaaaagggctgaacgtgtaggtaccacacatctgggcttcggttggtgtaatgcgttgaatggtcctgacaatatggatattgcaatggggtcgtcatgggaaatcttctggaccatcttccaatggaactacacaccgaaaggtgggcgtaacacatggtccacgggtattggcgtagattggagaaactaccgtatgaagggacattggcgtttcgacaagactcctgatgataacgtggttgtcgttccgtataagtctgtggatgtgcatgatcagttctcgcgcataaaagtatttagcttgcaggtacccttgctctatcgttaccgcattggtcgtggtttttccttgagcgtgggcagtatattgaattttaaccttcatagcagcttgaagacacgctacaagataaacggtgagaaattcaaggaaacttgcaatgatgccaacgtaaaccttgtaacgttagatttcatgggtatcgtctctacgccactcgtcagcatgtatgtgaaatattctccttgcaatgtgctcaagagtgcgcacgctcctaaattccaatcattgtcggtgggaatctatctataggataaataacttatcttttgttaaatagttacatttttaattagagatttctctatttataaaaaactctttgtaatttcgcaaccagatatgaacaagaacctctatatcattggcggctgtaatggtgctggtaagacaacggcttcatatacagtgttaccggaaatccttaattgcaaggagttcgtaaatgctgatgaaatagctcgtggtctatcccctttcaatccagagagtgttgcaatagaagcaggacgactcatgttgcaaagaatagactacttgttggaaaaagatacttctttttctattgagacaactctatcaactaaatcttatgtaaatcttgtcaagagggctcatgaaaaaggttttagtgtcaaactcttgtttttttggcttaattcacctgaactcgccatcagaagagtggcagagcgagtagcaaaaggtggacataatatacctgaaccaatcgtaagaagacggtacgtggcaggtattataaatttgtttgctcttttcatggatcaggttgactattgggatatatatgacaatagcgagtttccacgtaggcaaattgcttgtgggggaaagaatgctactactattattaatgacgttttattatttaatcagataaaaaggtatgtcagataaagaaatcagagatttttctcagaaaataaaactggggttagaacttgctgaaagaaaaatgcttgaagaaaaagcattgcatggtgaaaatattatagtgtcatctgatggcaagacctttcagtacataccagcaaaacaaatcattgaggcatcaaagatgtaaattgaattctttcttgaaagatgagaattgcttttgcgtgtattttattgaaaaaataagcccgtttgctgaaactttttgcaaacgggcttacttttttttaattttgcaaaaaataatgataaaaacgtaaactgtttatgaagaataccctgatattgattttgacatttacgacatccttgatgacgtatgcaaatgattatacctacaattatctggtgtttaccacccaggacggaacggaaaaggcgataacggtagaaaacttgaaattgtcttttgtcgatggacaattggtggttgataacggggtggaaagtcagacgtatagcttgacgagtctgtccaagatgtttttctctgaaagcaccgtcgatggaatcgttgagaccgtcatcaatggcaatgaagtcgtggatgtgtttaccgtctcaggtatatggatggggaaattcgggaacgtcgatgatgcaaagaaatcattgcaacggggagtgtatgtattgaaacaaggaaaaacaacaagcaaaatagcaatcaaatgaaaagattatcaatgcttctttctgccttcatcacgtcgatggcgatgatggcacagactttaaacgtagtgcaggggaatgtgacttacgcatttcccgcatctcagtgtggagagatgaactatgccaacggcactacctgtacgattctcaacaagacgttcacgctcagcgaggttgacaatatgtatattgacaacagtgaggtgaccgacaatatggttgaggttacctatgaggggacttctgccaaggttagggtagctggcaatgttgcccaatatgttactccttcgcttagtggtgctcacgtgagcattgctcaaggctccgacttaggcgatgaaacgggagaaatcatgtattcattgtcgggttcgtcagatgatggcgagttttatatgacgggttcgtataaggctaccgttgaactcaatgggcttacgttgaaaaacaccacccccgtctattcgggtgcagcgattaatatcatggacggtaagcgtattgacctgagcatcaagaaagatactgaaaactcattgactgatgctacctctggctctcaaaaggctgccctctattgcaagggtcatttggaactcaaaggtaagggtacgctttatgtgtatggtatgttggctcatgcaatcaagagcgcagaatatatgcaaatgaaaaattgctccatcaacgtgaagcaggcggtgaaagacggtatttcatgcgatgaatatttcttgatggagagtggagagctggccgttgacaatgtgggtgatgatgcaatccaagtagatattgacggaacggaaagcacgggcgaaactgccaaccacgatgatgaggatagtggtaatatctatcttcaaggtggaacactcaacttaaacgtaactgccaacggtgccaagggtataaaggctgcgggcgacgtgaaggtgagtggtggaagtatcaccgttatacagacgggatctattgttgccgatactgatttaagctatcctacttccatcaaggcagatgccaatatcaacatcactggtggaaccatcaacatcaataacaccgctgatggcggtaagggattgagtgcagacggaacgattaacatcgacgagagcaatgcttctgttaccattgacatcattgccaacggaaagggtggaacggctgaggtcacgggctctaccgaaaccgaaatcactggctcgtataaggtttatgtcagtgtgcctaccacgggaggcggtggcatgggacctggtggatcgggcaatagcgcatggaagaatgtgtatctctacaagagtgatggcacgttggtgcaacaattgaccaatacggtgtctaagtcgaacggctattctaccgtaacattctactattatgactttggcgcatctgattctggcacttattacttcaagagcgataattacacttctcgtaacactacctatgccattaagtcggcaaccttctctggtcccacttctggaagtgatatctattatagcatttccaatagttattccaccagtagcggcactcgtacctactcgcttaccaacgtaaccagtacgtatagcggcagtagcgacttgagcgaagacgagggaacgggctataatgccattggtatcaaggctgatggaaaccttaccatcgctggaggaaccatcaccatcaagaatagtggtgctatgagcaagggtatgaagtcgaaggctacgttgaccatcaatggtggaaacattacgctcacaccgagtggagctatgcaggtcatcaataacgatgcttcgtacagcatgggaatcaagacggttgattttgtgcaaaacgatggaacattgaagatcacgtcttcgggtgctgccggtcgtggcatttcctccaccaacatcaccaccaatggcggtacgcttaccataagcaatagcggtacgggccagtcgggtagtagtgacgactataccgccaagggattgaaagctgatacaaagattgcgctcaatgctggtacgattaccattaccatgacgggcaatggcggtaagggcatcaagtgtaacggtacctatacgcaaggcacgtcagatggcaacggtcccacgctgaccgtgaccactacgggtagtcgatttggtagttcttcttcttctggcggctggggctggggacctggtggcggaatgcaagagggtagtggaggctcagccaaaggtattaaggtgcagggaatcatctacttatatggcggtaccactgaggtatctacgtcaaccgacggagcagagggattagagtcgaaaaccacgatttatgttgagggcggcaaacactatttcaagtgttatgatgattgcatcaattgtagcggagctatttatttcaacggtggagctacggtttgttactctaatggcaacgatgcggtagattcaaattatggaaggacgggagccatcaccattggcaacggagccgtatttgcctactcaaccaagggagcacctgaagaaggtatcgattgcgacaacaatagttatatccagattacgggtaatggctatgccatcagcgcaggtgcaaaccaaggtggcggtggcggctggggtggctcatcaagcagtactatctccaatgccaagcagggatatgctttcgtgacgagtacgttgagctattctgctggtcgttactataccttagctgatgccagtggcaacaaccttgttacttatagctttgccgcctcatgtagcagttcgttggctctcttcacggcaaagggaatggtcaagggtagtacgtataacatcaagtacagcaccgtagaacctactgatgccactactgcctggcacggtctctaccttggcagttctcataaggggacaacgagtctgaccaacaacatcacggcacaataagttcggataaaaaacagaagtgcatgtgtaaatcataattgataattcataattcacaattgacaatgcgcaattgacaattgtgaattatgaattatcaattatgaattatttttttctcctttctcacgtgaataaaccgaaaaattttatatctttgcggtgttattctatcgactacacttttttcttaataactaaataattaaaacatgaaaaaaatctatttacaaacgttgacgttgtgtctgttgctggtgacttcattgtcagccagtgcagagactgttactgccaaatgggatttcaagaacgacattcccgctggcattcaggaaagcaccaactatcaaggtaaggtggctgacgtggtgtctgatgttgccgacatcgtcatgcacgtagatgctacgagtggaaaactctattgcgtggggcgcaacaatgcccagatgaatccaggtaccgtgcttcaaatccccgttgtctccaatgaggatgtggttaccgtggaaggctatcccggctattgccattttgccgtgggtggcgatgagaatggcggcgagagcgtggtgagccatatcgctaccaatgccgaggtgaaacaaggctatgtggaggttactgccaccgctggcaacaattacatttatagcattcaggtggtgcaaaacaaggacaaggcagccgtggtttataaggacgaacccgccattgctacgttccccttcaccctcggtacggaaggacaaactgccgacttcggtgatgcggcagacttcttcctcaatagtaaggtgacgtatggaagtggcttgaatttgaaagatgccaattcgggcgcaggtatcgcagagacacgatttgaaccatacgatcaaaacaactctgccgatgctaccaacctcatccaatttaccatccaacccaagtttggcttgacatttacgcctactaaggtgaagctcaatgccacccgcttcggtaccgacaacggtcttctcgacattgcctggctcaatgccgatggcagcaccgtgaccttggctactgaggtgaagcccaaccgcaatagcggcaccaatcccgccattgctgaagaggaaggacaaaagtatagtaaattgtcgtacgacgtgaaaggtgctactcctggtgagggcgtttgcggacttctcgtgaatctctatcacttgcaatcgggtaagcaaattggttttgccgatattgtcatcgagggtactatcaacggacagatcatttccgttcccatgcttggctcattctctgccaatggtgtaaactatgtggctgacaatgtgtttgaggctgatggagacaattacgtggctaccatcgagctgtcgaagagcgaggagatgatttcacccaacaatcccgttgctgacgtggtgactctcgctggtgaggtgggtgacatcacttacaaaggcgacgagaccacttgtgtgactaccattcccgttggcttgaatgacatcactatcaactatatcgtcaactttgtgcaaaagcccgacttcacgctgacatacgttaataccgatggaagccagatgggtacgcaagccgtagagaaggatgctgccatcagggagtttgccatcgactacaacgaggctattgccgaagagggctacaaggtgcgcggatggtttgagaagaagtcgggtgccagaaaatacaccaccgccgacgtgattaccagtgacatcaccctctacgctgtggctacggagattgaggttccgcacgactataagaaatataacttcgacctgaccagcaccaccttctatcctgaagatcatgaggcattcacctctaccggctcaggctattggcacgacgtgcaacacggatgggcattcaacaatggcgacgtaatcacgttgctcgtgggcgagaaggcaactatcttcgttaccaactgccaatactctaatgccgatgcacaactcgtcttcaaggatgctcagggcaatgaggtaggacgcatagccggaaagggcgagggcgacggtcagatagatgctttcgcatacgagggaagcgctggcgaactctttatggaaatcgaatcgaatggtgccgtttacatccataacatcaagatcgtgaacaccaagaccaccaactaccaacaagaaggtcgctggtatttcgtgaagaaaaacgacgtgagcagcttgtatgatgtactcgacgtggtaagtggcgtaaacgccagcaaagacgctgaacgttcttacatcttcatccccgacggaacgtatgacatgggtgagaccgtgctgactgccgtgagcggttacaacatctccatcatcggtcaatctaccgagggcaccatcatcaagaatgctcccgaggtagctaatgagggtatcggaacaaccgccgttctcgtcaactctacccaaaatctctacatgcaagacctcacgttgcagaatgcactcgactattatgccgctggtgatgctggtcgtgccgtttgcttccaagacaagggcgaccgtgctatcctgaagaatgtggctatgctttctcaccaagatacttattacagccaaaacaccaaacaatcgtattgggaggattgcgacatccacggtaccgttgactttatctgcggtggtggtgacgtgcgtttcgtgaacacgacgctctctttggaaccacgctctgccaacggaacgggcggacgtacaattaccgctcctaccaccactactgagtttggctacgtgtttgacggatgtaaagtggttgacctggcagaaggaaagggcgattggaacttcggtcgtacttggcaaaactatcctatctgtatctacctgaacaccacgctcgatgccaatagtgccaagacgctggtaaactctcgctggacgcagaagggtatgaacaacaaagacccgaagatattcggtgagttcaacacgatggatgaggctggcaacaacatcacaccttccagcaactacatcacctctttcaagggaacgttccaaaccatcctctctgcggatgaagccgatgcgtatagctatgacaagatgtttaccaactgggatcccgcttatctcaccatccaggcagaggcacccgaggcaacatataccgacggcttggtttcttggaaaccagccaacaacggagccatcgcctacgctttgttcaagaatggtgagtttgttaccgtggtggaaggcaccgactatgaaatcgagctcaccgagaacgataagctcaccatccgcgctgccaactcgatgggtggattcggtgaagagaaagaggtacaggtggctgctcctatctctgaggacggtggattcgtagatggcgtgaatgccgtggagaacaacccagccgacgagaccgtttacaacttgcagggtatccgcgtgaagaatgccagcaagggcgtgtttatcgtcaacggaaagaaagtgattaagtaatcagaatcattgatatatgtaacgggggaatggaccaaaatggttcattcccctgtttagttagggataggggaggagtcttaataaaaatgtccaccgttaaaggacgatggacaaaaacctaatgtctttacaatgcaaagtgcttgtcataattgttatcaaaatgtgcgacaaaattgtgtttgtatttacttgtgaaatagatctggaagaaaggaaaaatgggttgaaacggttaaaatatcccttcttttgtgctaacatatatagttatggtcgtaactatatatgttatgagcgtaattatgtatgttagcgagctaactatatatgttgtaaatgaactaaaacatgctgtttttgaagtaaaaacgaggtatctttggttaattgtaaatacaatttgtttataagtcgttgattgatagttagttgtggtaaagctaaaaaataagcattttttcgactaagactaaattagtttgaaaaaatgcttgtttattgatgctgaaattaagaattttcaagacaaagtaaatgttagattgaatgatgactattaaatataaatattatctgactcataaaaaaactcccacctaagcgggagtataggttttacccttcggccatcatggccttattgtgataagatgtaggaatcttacatctgcaaaagtacaaaatttttttgtaaattcaaaattaatttgtaacttcaccgaaaaattaactaaaaacaataactatggaccgaattttaggaattgatactggtacaaacagtcttggttgggcagttatagacaagagtgaagagataaccacgctcgttgcgaaaggtactaatatatttacggaaggggtgaaaatagaaaaaggtattgaatcttcaagggcagcagaacgaacagaacatcgttcggtacgtaaacaatattggcgtaggaaaataagaaaaatacgtttgttgtcaattctgagcgagaatcatttgtgccctccattggataaggaaagtttgcgtcagtggaggcttaagaaagtctatcctgttaatgaaagtttcatggaatggcaacggactgaagacaaactaaatatcaatccttacagatatagatatatttgtttgacgcaaaagttggatttgacagacttgacgcaacgttatattttaggtcgtgctttgtatcatctgaatcaacgacgtggctttctgagtaatcgaaaagaaaatacgaaggagagtgaaggtgctgttaaagatggaattagtactctgtctaaaaacatgaaagacaatggatgtgattatttgggagagtattattttaaattataccaggaaggtaaaaagataagaaatcactatacggctcgcaaagagcattatttgaaagagtttaaagctatttgcaggaagtaggagatagacgcagatttggaagaaaaacttgagaaagctattttcgaccaacggccgttgaagtcacagaaaggacaagtaggaacttgcacttttgaaaaaggtaaagctcgttgtccatcatcccatcctttgtatgaagattttagaatgtacagtttcttgaataatatcaagatgaaaatacatacactttatgaaaatactgaacggggattgacagaggaagaaaaactaaaagttatacctctttttaaacgaaaatcaaaaaagacttttccttttgaggatattgcgaaaaagttggcaggaaagaataattattgttattacaaaagtgatgtagataaaccgtataagtttaattatcagatggacacgcaagtatctggtagtgtggtcagtgctcaattggaagaactatttggtgaagattggcttagtggtgtttgtgaagtatatactcttgctaaagataaaacacgttttcaaataatgaatgacatttggcacgctcttttcttctttgatgacgatgagaagttgaaggagtttgctgtcaaccgtctgcaattgaatgatgaggatgctgagaagttcagcaatatttcgatgcctaatgattattcttcccttagtctcaaagctattcgtaagatgcttccttatatgcgtgattatggaatgatgtactcccaggccgtgtttgttgcaaatctttgtgaagttttgcctcattatatatggggaatcaaagaaacgagagaggttgccatagaaaatgtgattaatgaaataaactcatacgacagtaatcgcattgatggtaaaacaatggaagcctgtataaaagattttttgagagaaaaatatcaaattgatgagaataacttaaagaaactttatcatccttcaatgttagagctttatccacgtcaatgtccaaatgatgaaggtatttatcaattaggttcaccacgtattagtagtgtcaagaatcctatggctatgcattcgttgtttaggcttcgtaaagttgtaaatttattgctaaaagagcagataataacacctgagacaaaaatacatatagagttctcgcgtgatttaaatgatgctaatcgtcgttgggccattcagacttggcaacgagacaacgaaaaggaaaggatgaattgcagaaaggaaattgagaaatatatatcaaatcctactgattcagacattatgaaataccagctttgggaagagcaaaaccataaatgtctttacactggtgaagaaattagaattaccgattttttaggaagtaatccgagatatgatattgaacatacaatacccagaagtgctggaggagatagtactaaaatgaatttaactttatgtagcaataggtttaatagagatgtgaaaagaactaatcttccctctcagctcactaatcatgaagatattcttgaaagaattgctgcatggaaagaaaaatacgaagaattggctaaacaaataaggaaaaccaatacaagaggtgctgcctcaaaagaggaaaaagataaaataattaaaaggcgccattacttatctttgcagtatgactattggcgaggtaaatatcagcgatttgtaatgacagaggttccagagggcttttctcgcagacagggaacagatattagtgttatatcgcgttatgctcgaatgtatttgaaatcagttttcaaacaagtatatattgtgaagggaattgctacttccgactttcgcaaaatgtggggtattcaagatgaatatacgaagaaagaaagaataaaccatgtacatcattgtatagatgcaatcaccatcgcatgtatagacaaaaatgagtatgacaaattggctcagttttatcatcagtcggatgaatataagttgggaaggggtgaaaaaccagtctttggaaagccatggccaacatttgttagcgatatcaaacagatacaagatgaattgctgatagcacattatttcaaagacaacatgcccaagcaagccaaacgttatgtacgagatagtaaaggcagaaaagttttaacacaaggagatactgcacgtgcctctttacataatgatacatattatggtgccatagaagttgatggtgcgattaaatatgttgttcgcaaaaaacttagtggattagaagagaaagatgttaagaatattgttgatgctgaagtgcgatctaaagtggaaaatgcaatccttctacacggttcgttgaagaaagcattagaggaaactatctggatgaacgaggagaaacagataccaataaataaagtacgagtttttacaggttctgttactcgtcctatcaatattcgtcaacaacgtgataagtcgagacatgagtataaaagacaatttcatgttcagaatgaccgaaactatatgatggcaatctatatcggtcatgataagaatggtaaagagaaacgtgaatttgagttaatcaacaatataactgctgcaaatttctatcgtcgtagtaatgaccgtatacctaccgataatcagctcgtaccactttacagtaaaagcggatatgagctttgttatcgtttgaagattggtacaatggttttattgtatgaaaattctcctgaggaggtatgggaactggataagaaaaacctgcaaatgcgattatataaaataacgggattgtcgtcaatggtgattcaacagaaatatgaatttggtactattgagatggtgcatcatcaaaatgcaagaccaagttccgacgttaagaaagtaaatggtgaatacaaatcaaatgaagaatttcgtccaggaataaaattgttacacactcagtttaaagcccttgtccaaggagtagattatgaaattaatgatttaggagagataaagagattgttatgataaagcaaacactgatgtttacatcaccagtgtcattgtctctaaaagacaaacaaatggttatcacatttaaggataataaagacacggtgactcgtcctattgaagacgttggctttgtggtaattgaaaaccccatggtcagtatcacggttccattacttaatgaattagcagataataatgttgccgttatcttctgtgacaagaaaatgatgccaaaaactatgttgatgacacttgatgggaatacaactcaacaggaaagttataagtatcaattgaatgcttctcttccaatgaagaaaaacgtttggaaacagttggttgagtgtaaaattaagaatcaatcattattattgaacaaagttggaaaagatggtggagtcttgaagccttattatttgaacgtgaaatctggggattctgacaatcgtgaaggagctgctgcaagagagtattggagactgctttttgatggtggttttaaaagagaacgcgagggcctaccgccaaatggcatgttaaactatggatatacgatactgcgtgctgccgtaacccgtgcattgataggttcaggattatatcctgcatttggagtgtttcacagaaatcgttataatgcttttcctttggcagatgatattatggaaccatatcgtccgtttgttgatgaaattgtctatcacctctattatgatggtgctgtcaatgaattggatagtcagacaaagaggagactgttacgtgtgttgttctcagacgtgaaaatggggaaagtgacaagaccattggaaaatgcattgtctctgacgacagcatctttattgaagatgtataagggagaatctgataaattgtcattgcctatgttagtatgagcgaaaatcgtttaaatgcttaccatattatgtggctattcgtattctttgatttaccagtggttactaaaaaggaacgaaagacagcatcactttttagaaagaatttggttaaagatggctttgtgatgttacagtattcggtgtatattcgtcattgtgcatcgtatgaaagccagacagttcatgttaagcgaattaaatcttttgttccagatacggggatggtgagtatactaagcgttacagataagcaatatggtgatattgtgaacttttggggaaaggagaaaaagaaaaaagtacatacagaacctcttcaattggaatttttttagtagttttgtgaaagaaataccacatcaaagccacttcttagtgcaatttgtcagggtaaatccctgtgttataacaatataggatacctaggttgtggtttgatgtaggaatagatagatatacaacgaataagctataattgttatgacacaaagagttgtggtttgatgtaggaatagatagatatacaacgaaaatcaagaacgcccacattaacgtagggttgtggtttgatgtaggaatagatagatatacaactcagagagcgaagcatgttgtcaatctcctgttgtggtttgatgtaggaatagatagatatacaacgctccgtacaaacaaggtagagacaaaggcgttgtggtttgatgtaggaatagatagatatacaactgacatggggagaggtgcacatgcagggtgttgtggtttgatgtaggaatagatagatatacaacattcgctggcaacagcagaacaaaccattggttgtggtttgatgtaggaatagatagatatacaaccccgacaccacacacccgaccactcacaccgttgtggtttgatgtaggaatagatagatatacaacttatcgaacgattccttttcgtagatttcggttgtggtttgatgtaggaatagatagatatacaacaattaaacaaatttattaagcacgtgcaagttgtggtttgatgtaggaatagatagatatacaacttgacaggcgaagaaatcaatcagttatacgttgtggtttgatgtaggaatagatagatatacaacatctataggcgtagtggtgaggattgtatgttgtggtttgatgtaggaatagatagatatacaaccaggcataaaacaaaagaaacatgaaacgtgttgtggtttgatgtaggaatagatagatatacaaccgtgcatagccatgttgatagccgacatctgttgtggtttgatgtaggaatagatagatatacaaccatcttgtcgcaccttaaaaaaaccgcaaggttgtggtttgatgtagcaatagatagatatacaactttatatgtacggtccttctgtgcatcattgttgtggtttgatgtaggaatagatagatatacaacacaaaccgtaaacgatagggattatgagcggttgtggtttgatgtaggaatagatagatatacaacttcgagtaaaaattcctctgagagcaaagggttgtggtttgatgtaggaatagatagatatacaacgggcggattttgccccgaagcaaaaagcggttgtggtttgatgtaggaatagatagatatacaacatcccatcgaagaagccgaaagccgcaagggttgtggtttgatgtaggaatagatagatatacaacacgcacaggaatacttagacaggctctgttgttgtggtttgatgtaggaatagatagatatacaacagtcagatgatgggtacggaaactacaaggttgtggtttgatgtaggaatagatagatatacaactgaagatgcagctcttgaacgatgcaggagttgtggtttgatgtaggaatagatagatatacaaccagcggagagatgacccgtgacaactacgagttgtggtttgatgtaggaatagatagatatacaaccaagcgacaaggcgaagtcaatagagcaggttgtggtttgatgtaggaatagatagatatacaacctgataggtattttaagagtacatactacgttgtggtttgatgtaggaatagatagatatacaactgtcgaggttcttcgaataagtgtcaccgggttgtggtttgatgtaggaatagatagatatacaacagagccagacgaaagcgagcagttctcgagttgtggtttgatgtaggaatagatagatatacaactccatgccgttttcttccagcacgtccttcagttgtggtttgatgtaggaatagatagatatacaaccaaagaaaggcaacaggatggtgaagtatgttgtggtttgatgtaggaatagatagatatacaacacataccgaacagccagtttacagcggtagttgtggtttgatgtaggaatagatagatatacaacctctgaatactacaaacggattcaggaactgttgtggtttgatgtaggaatagatagatatacaacgttctgtcgtgaggtaggttctggacgcaagttgtggtttgatgtaggaatagatagatatacaactcaggcacgtcagcaaggccgacttccacggttgtggtttgatgtaggaatagatagatatacaacgttgctcgctgacatgataaacggcaaacagttgtggtttgatgtaggaatagatagatatacaacaagcaacacgggtgattgttcaagtgcaaggttgtggtttgatgtaggaatagatagatatacaacaaaggaagaaattatagattttatctataagttgtggtttgatgtaggaatagatagatatacaacaagatgaccattaagatttatgctgaactggttgtggtttgatgtaggaatagatagatatacaactcaagtgcttgtattcctcccttctcacgttgtggtttgatgtaggaatagatagatatacaacagcaacacgggttatggttcaagtgcaaggttgtggtttgatgtaggaatagatagatatacaacgatatgctattgcaagaccatcaacaccgagttgtggtttgatgtaggaatagatagatatacaacttcaggcggaaatatctcaatgtggccatggttgtggtttgatgtaggaatagatagatatacaacctgcacaattaattaacgatttcgtagctagttgtggtttgatgtaggaatagatagatatacaacggtgagtatccaagagacgggcagcagacagttgtggtttgatgtaggaatagatagatatacaacgtctgcaagacgtacagcattaaacttatagttgtggtttgatgtaggaatagatagatatacaactacaatcatattggcagccttacgaacttgttgtggtttgatgtaggaatagatagatatacaacgattgcaaagcacttgcaataccgttatagttgtggtttgatgtaggaatagatagatatacaactattcttgaaactttcagaattgagcacctgttgtggtttgatgtaggaatagatagatatacaacggaatctggaaaattcttcatcgaaaggcgttgtggtttgatgtaggaatagatagatatacaacagaagcacctgcgaaggaagcaaccgtgaagttgtggtttgatgtaggaatagatagatatacaacatcttgtcaaaatgtctttgtcaccttggagttgtggtttgatgtaggaatagatagatatacaacagaagactgctttctatcatcagaatccaagttgtggtttgatgtaggaatagatagatatacaactgcaggtacggctatcatttcgacgtatgtgttgtggtttgatgtaggaatagatagatatacaacttgaatattatctaataaatctaaatacttgttgtggtttgatgtaggaatagatagatatacaacaacaggaattaacccgtttttgtcgaaagagttgtggtttgatgtaggaatagatagatatacaacttccctttttgtatagcaattagattttctgttgtggtttgatgtaggaatagatagatatacaacaagaccagatttcaatttaaacatatctgagttgtggtttgatgtaggaatagatagatatacaacataatcataatcatgatgcaagtatagtagttgtggtttgatgtaggaatagatagatatacaacagccataataatgccgtgacatggtgcagtgttgtggtttgatgtaggaatagatagatatacaacatgattcacaattaccacaatctacataatgttgtggtttgatgtaggaatagatagatatacaacaatatggttttccagtccagagaactcgtagttgtggtttgatgtaggaatagatagatatacaacaatacgttcatattacgaccgttcaagtcgttgtggtttgatgtaggaatagatagatatacaacccatgaaagtgtttgtatctgagtatgtagttgtggtttgatgtaggaatagatagatatacaacgaacactgccaacatattttgcaaaccagcgttgtggtttgatgtaggaatagatagatatacaaccaaatctaaaccaaaagcatcagtaattgggttgtggtttgatgtaggaatagatagatatacaacaattccataatgtcgtgacatattaatacgttgtggtttgatgtaggaatagatagatatacaacgcatagtcacggaatctttgaggatgttgcgttgtggtttgatgtaggaatagatagatatacaaccacttgctcggcaaaagccattgttgctggttgtggtttgatgtaggaatagatagatatacaactaactgaaacatcattgaaagacatttcagttgtggtttgatgtaggaatagatagatatacaactgccctcgctaaatactcgatgcgtgacaggttgtggtttgatgtaggaatagatagatatacaactaaacatcttgaaagctatcacctatctgcgttgtggtttgatgtaggaatagatagatatacaaccacaatgtcagaagtagtagaaccatatccgttgtggtttgatgtaggaatagatagatatacaactatctgaagccgaaagtttgctctatcggggttgtggtttgatgtaggaatagatagatatacaacaagcccatgcagatgtggcaaagagtacgagttgtggtttgatgtaggaatagatagatatacaactcttacttaatcaaattatcttatgaaaagttgtggtttgatgtaggaatagatatacattttttatataggatcgatagagcccctatatcggctattctataatgtgatgctaaaataaaaaagaggaaatgtaattatttgatttacattcaaagaattacgtttccttttttgtgcgcctgaaaggactcgaaccttcacgtcggatgacactagatcctaagtctagcgcgtctaccaattccgccacaagcgcataacatgggtacaaaggtaagaaaaaatagataatttagatgattttacgatgattttttttgagaaagtatggtttttcttgagcagcatagagtttttgggggagaatggtgctatttgtgtttgttgatgatgctacgtgcgtactcaatgatggtgtctttcccccttctcaggtcggcatcgttgagtgatacgtagtggtgtggaggaatgccaaactcggtgtcgtttttgtctttgtcgtacatcggacaggcggagaaccgcacgctccacccgatgggcagttcggatgagaaggggagccctgcgcctccccccgtatggtcaccaacgacggtggcatgagggcagcatttcatgtacttggtaaactcgttagcggcgctgaatacctgtcggttggtgagtacgacgacctttttttgccatcgtatgcccttggagggagtgagccattgctcttgtaggggtgagaattcgttgtgtccctttcctgttttgtgctgcatgtatcccacgagtattttctcgttggtgaatcgtgcagccagttgctcggcactggaaagaagtccgcccgtattgttgcggatgtcgatgatcagtccgttgcagggagccaaatagtataatatctcgtcgaggttgccggcacccagttcgttggaaaaggtggggcagcggagatacccgatgttatcgtcaaggattttgtatctgagaccagaggcaatgcgatagtcggttcctatatatatattaaataaggtgtcgctgaagttggtggggtaatcttcgtgccaagcccagtaacgtcctaagtcgaagctggtatagaggttgacgtgcccgtctttgagctcgctgagcatattagtgagcacctcgaattgctggtacttgctcattccttggtttacttgttggttgtaacgtgagtgaacctcgttccaatcaagtccgtattgtttctgtttgtagtcgaagaagcagtaatgctcgtcgatgatttgccaaagagcctccaggttgccttgtggcgtattggagaactcctcttccttgacgcacgacatcaataaggaggtgaggatggtggcagctatgagggtgacagatggtttcatggcagtattataaatggtggacccatccgatgaggaatgaatgggtgtaatgatggcgcttgatgttgttgacattgctttgttgaatgtcgccgagatagcctaaacgcaattttgagtgaggttttttgggcgacaattgcacgtccaatgtgagtgcatggtggagggaaggtgcagagacgaaggtggtgggtacgatgttgtggtcgtagtttcccttggaaaaaatctcatagtaggattgtccgtaattgggtgagaacatcaatcctacgagaggagtagagagatggtagcggatgagaaagctacgatgacggaaagtgtttttgtaagagatggaagctgatggggcaaggtggagagagatgtcagcttgtacgggattgttgctatttcgggtgttatatagaatgcccaatttggcatcagtacatcctccaacctgcagggaaaagttgggggagaggatccagttgtaatggagggagaactggaagcgataggctccagctaactcgttgccattgcccgcacggttgtctaagatggaaagacaaccgtggtgggtaaaggtgtgagagagatgtctgggagagatgcggctcctgttttctgccataatccttatttctgtgcctttatattgctcggcagagatatatgtgtcgagaacgttggcggcaccaattgcaatcatgaaggctctctccttgggattctgcatgttgtaatttgatgcagagagaccgccgtgagcaagagaaacgctatcgttttgagccgcacaaggtaacgccagcaaggagaacgtagcacacaagattatgaatatttcagctatcttcatcagggaagaggcttaattgttctgatgtctgcccattcttagacggctgactttgtgaggaaaggtcttcggagatagcagtctcattgggtgtttcttcagagatgttgtcatcttcctcgccattgtcatcagcggatggattctcagggagtttggtaggttcgagttcttcaatggaagtaacgttacaggtggtgatacgttttcctttcgccttgaaacccttgaccatgataaattcttctacatcaataaccattggctctttgtcggcatcaaatccaccgaagttgacctttatgcgtgggaatggttggtcggtgagaatcaacaacttagaattagggttgtcgccaagataattctgctttttccttgtagcctccatggtgaagcgcttgatgtaaggatagccctgattgtcggcatcgaagagcacggcagtccagatcttagtggaatcccatttctcaatgattttgatgttatcctcatagtgattgtttgcatcgaagttggaaatgtaaaattccccattatccaaaatcacgagaatcatttcgtcatcgttaaattctccgaggaatgtgccatgttcgtcataattgagacggttcacgtcagagtcgtaccacacctttcgtcctccgagagtagagtgaccgcggtctttcagacttattctgtggacaggtttcttagagagcagataacccttgctcgactttcccctgatggtaatcttagagaagtcgcgggtgaggaagatagacttgagtgtggggctggagtcgagtgttaccttgatggtttcggcttcaccattgggattagaagtgaaataaaggattttagaaccaggctttccttgcgttaaatcatattccttgtcacgtgtgatggcggtgacgttgaaacgtttcatgaacgtgaatccttctctaccatcacgataggcaacattgtaaatagtacgcgtgtcgtttttcttgaatacttgtacgtgcaggatgttttttccgacgaagatcttgtctgccacacgaatgaccttaaacttaccatccttataaaatataataatgtcgtcaatgtcggagcagttgcaaacaaactcatcctttttaagtccagtaccgatgaatccctcggcacggttgatgtaaagtttttcgttagcctctacgactttcgttgcctcgatggtgtcgaaattacgaatttcagttcttcttggatagttggctccatatttgtttttgataaacgtaaaccagttgatggtaacgtcaaccatgtgggcaaggtcgtgattgatgccttttatttcgtcttttattcttgcgatgaggtcgtcagccttatccttgttgaactttaagattcgttgcatcttgatttccatcaaatgaagaatgtcatcacgtgtgatttcacgaatgaaatccttcttgtaaggctccaatcgattgtcgatatgttcgatggcagcatccatgttttccgcattttcaaacttcttgtccttgtagatgcgttcttcgatgaagattttctctaaagatgcgaagaacaattgctcctccagttcttttttgcgtatgc

SEQ ID NO: 4202 - DNA, 22715 bp, synthetic construct
  source 1..22715: mol_type = other DNA
  misc_feature 1..22715: note = Synthetic
tgaccgccatgttctatgcgagcctcattgcaccattcgttctcgcctacatcttctatgcttggcgcagcatcgacagcaagaaactcgataaagccgaattgggcgacgacaaacacgcttattaaactcgttttgggtgcgtaggaacgtgattttttcacaagctcaacagctcgtattacgttcctaacaactcaaaaacaataatgaaaaacgtggaaaatggactttgttccgttttccacgtttttttgttaccataatctggtgtgcggaacggatacgagttgttaagtttgtgaaaaacctccgcccctacaccttttttatatataggctgttttgcgctttaaaacaataggttttggaatgcaaaacagtaggttttgaaaatcagaccggttatcctgcaatttatcccatatttttgtgcaaacgataaaaaatgtaagcatacctacaaataggcattggagggatagaaaatgccctcgttttgtaatccaaagattgcaattattggtgtataatcttaaaggcgatacctaaaagtaggtattgagtgcataaaactattcgtttttgcacatcttaaaagacttgtgcaatgaaaaatacttaattataagtattgtcaaaaaaagataaaccgagtacctttgtaacctaaaaaataataaccagaccaagtatcccattataaggtactcggttaaaaaatttactaaattacagatattgttatgagagaagaatggagaggtttcacaggcacaaagtggcttgatgaagttaatatgcgcgagtttatccagtcaaactatactggctacgatggcgatgcagaatttcttgcaaatccaacagaagctactgacaagctttggggcagattaaaagaactccaaaaagaagaacgcgctaaaggcggtgttctcgatatggaaacagaaatagtttcaagtatgacagcttatggtgcaggctacattgacgaaagtatgaaagaccttgaaaaagtagtaggtcttcaaaccgataagcctttgaagcgtgcctttatgccatatggtggtatcaagatggctgaacaagcatgtactacttacggctaccaaccatcagaaaagctccacgaaatctttacaaaatattgcaagacccacaatgatggtgtgttcgatgcttatactgacgagatgaaactcgttcgccacaaccatattcttacaggtcttcctgatacatacggtcgtggacgtatcgtaggcgactatcgtcgtgtagctctttatggtatcgacttcctcattgcagagaagaaaaaagacttgaagaactgcggttgcggcgaaatgcaagacaacattatccgtcttcgtgaagaaatttcaatgcaaatcaaggcgttgaaagaaatgaaggaaatggctaagatttatggttacgatatttctaaccctgctaagaacgctcgcgaagcagttcaatggctctattttggctacctttcagctatcaagacacaaaatggtgctgccatgtcagtaggtcgtgtgtctactttcctcgatatttacatcaaccgcgaccttgaagaaggtacattgaccgaagaagaagcacaagaattgattgaccacttggttatgaagttccgcatggtgaagtttgctcgtattccttcttacaaccaactcttctctggcgacccagtttgggcaaccctcgaaatggctggtttaggtatggacggtcgccacatggtaacaaagaacgacttccgtttcctccacacattggaaaacatgggtccttcaccagaacctaacctcacagtgctttattctccagctttgcctgaaggtttcaagaaatatgcagcaaagatttcggttaagacaagctctattcaatacgaaaacgatgaagttatgcgtccagtttggggcgacgactactcaatttgctgctgcgtttcagcaacacaaacaggtaaggaaatgcaattcttcggtgctcgtgccaacttggctaagtgcttgacatacgctatcagcggtggtgtagaccacaaaacacgcgaacaatgcggccctgcgttccgtcctatcgaaggcgatgtagtaacttacgaagaatttatgccaaaattcatggatatgatggaatggttggcaggcgtttatgtaaacaccttgaaccttatccactacatgcacgacaaatatttctacgaagcagccgaattggcacttattgataccgatgttcgccgcacattcgcaacaggtatcgctggtttcagccatgttgtagactcaatttcagctatcaaatatgctaaggtaaacatcgttcgcgacgaaacaggtttcccactcgaatttaagaccgaaggcgagttcccacgctatggtaacgacgacgaccgtgcagacgaaattgcagtatggttgctcaagactttcatcagcatgataaagaaacaccatacttatcgtgattcagaaccaacaacaagtattttgaccattacctcaaacgtggtttatggtaaatatacttcaaatatgcctgacggtcgtcctgacggtgctccattggctccgggtgctaacccatcatacggtgcagagcaaaacggcttgttagcttctttgaactcagtagcaaaattgccttacgaatatgctttggacggtatttcaaatacacaaaccatcgctccaagcacattgggtaaggacgacgaagaacgtacaaataccctcgtgggcgtaatggacggatacttcagccgtggcgcacaccacttgaacgtaaacgtgttcggtgttgaaaagctcatcgatgctatggaacaccctgaaaaggaagaatacgctaacttcaccatccgtgtcagcggttacgcagtgaagttcatcgaccttacacgcgagcaacaagaagatgttatcgctcgtcaggctcacgctaaaatgtaagcattgatttaagtttttaaaatattaaaaagataattgggcagctgcccaattatctttttcatattgagaaagtcagacaggtccgacaagtccgacaggttagacaaaactacaaacattatggcagaaatccccacaatcgacatctccaccgagcaaaccatcaacgctgatggcactcacaccgctcgtgtacactctatcgaaaccttcggctcagtagacgggccaggtattcgcttcatcgttttcctcaaaggttgcgccatgcgctgccagtattgccataatccagacacatgggaaccaaattcagacaccctcaccaccgccgacgaactcttagaaaaagcactccgatacaaaagctattggggcaaaaacggaggtatcaccgttagcggaggagaatcgttgttgcaaatagacttcctcatcgaatttttcagaaaggcaaaagcaaaaggcataaacacctgtttggacacatcggcacagcccttccgccgcacaggtcagttcttcaagaagtttgaagaactgatgcagtataccgatttgctgcttttcgacattaaacatatcgacactgtcgagcataaaaagctcacagggtggggcaacgagaacatactcgactgcgctcgttatctttcagaaatcaataaacccatttggctgcgccacgtcctcgtgcctaccattaccgacaacgatgaatatctgcaccgtttgcgtgcttttatcgaagaattgcacaatgtagaacgcatcgaagtgctgccttatcacacacttggcatttataaatgggaaaatttgaacctaccttacgccctaaaagacataccagaacccaccccaaaagcggtggaatatgctcaacgagtgttagaaggaaaagcataaaaagataatttttattaatcttctgttcataaccttttcttgttcaaagaatttctatacctttgttcccataattggtcaattctatttaagaatgaaaaggattattattgctattagcctgttatgcttgccatttatacttttaggacagaataatataggaacaaacgacaacgaacaagcaaacgaaatagcgcacatatcacccccaaaaactccagcggaaaggaaaaagctgtatgagtctttggcaatcatgggcgatgctgtgagccaatataaacttgcgctttgttatgacgatggaatcggtgttccacaaaactatggtgaagcgctgaaatggtatcgtaaatccgccgaacaaggagtgccacaagcacaacacaacctcggttttatgtacgcattgggcaatggtgtacgacagagttggaaagaagccgcaaaatggtttcagcaagctgccgaccaagaccatacattggcacaattcgccttaggctcatgttacgaaagtggcaatggcgtagaacaaaattatgtagttgcagcaaaatattttagagcagcagctgcaaagggattgctgcccgctgtcaatgccctcgcctcattttattttgaagggacaggcattgtgcaaaactatgaagaagcactaaaattataccgtcaagccgccgaacaaggctactcggaatcacaatataaactcggagtttgctaccaaaaaggcacaggagtgaaagccaatataaacgaagcactgagatggtttttaagggctgctcaacaaggatatgcccctgcacaaaacgattacggcacttatttcttagatgagaacaaccctaaaaaagattatcctaccgctttgttctggctacataaagctgccgaacaggaaaatgcacaagccatgtacaacattgccgtaagttacgaaaacgggtggggcgtagcacaaagcttagaaaatgccataagttggtatcgaaaggctgcattggcaggcgatgccgatgctatgctgcaaatgggattggcatacgcagacggaagaggcgtgaaacaaagttggacagatgccactcaatggcttttgaaaggagcagaagcgggcaatgcggaagcccaatcctactttgccttgtgtcttttacaaggtaaaggcatagcaaccgatgctaaaaaagccgtaaaatggttggaaaaagcaatagaacaaggcaacgcaatggcagctaacaatcttggattttgctatctcaacggatttggtgttgaaaaagataaagaaaaagccaaatattattttcagaaatcagccgaaatgggctatgagttggcaaagaaaaatttaaaattcataaaataaaagtgtggtaaatttgctcccttatgttcttgtaagaatacattttttaaagaaaatatatacaataatttgcagtttatggaatttttatttaactttgcttcatcattttttcaaaaagccataaaatgaaaagaaaagttatattgtttgcagcgttgcttttgccccttttcgttttagcacaaagcaatttaggcaaggcggacgataaaaaaacagatgattttgtacacgaaaactattttggagggtttacacctgaagaatttcaactctataaagatgctgcaaaggctggcgatgttgatgcacaatacaacgtgggctactgctacgagaatggtgaaggagtggaacaaaactatagcgaagccgcaaaatggtatcgtaaagccgctgagcaaggactctctgctgcacaacatggcttaggatttctctatgcctacggtcaaggagtgaaagagaattggacagaagctgcaaaatggtttagcaaagctgcagaacaaggctacggactgtctatttttgccatgggagcttgttacgaagacggcaatggagttccgcaaaactttgtagaagccgcaaaatattaccgcaaggcagtggataaaaatgtggttgaagcctacgaagcactcggacgattttattatataggtggtggcgtgccgcaaaactatgaagaagctgtaaaattatttgcgaaaggagcagctttgagaaaccctaatgcgcaatattatttaggactttgctatcattttggcaatggaatcaaggctgataccactgaagcggtgaagttgtacttgctatcggcagaacaaggatttgctcctgcacaaaacgaattaggtaatttttatcttacagacccaactcataaagattacaaaaaggcacttgaatggctgaataaggcagttgcccaagacttgcctgacgcttttttcaacatggcactctgttatgaagaagggtggggcgttgaacaaaatttgaaaacagcggtagagtggaatcgcaaagctgctttagcgggcgatgctgaggctattacaaaaatgggaattgcttacgaagaaggaaaaggtgttgaacaaaatatgaccgatgcggtgaaatggtacctgaaaggtgctgaattaggcaattcggacgcacaaaccaactatgctaagtgtcttttacaaggcaatggtattacgcaaaattacacagaagccataaaatggttggaaaaagctgttgctcaaaaaaatccaatcgctattaataacttaggattttgctatctcaatggatttggtgtaactgccgaccttgaaaaagctgagcaatattttcaaaaagctgccgatatgggctatgaattggcaaaggaaaatctaaaaatgctaaaataaagaataatgaagaaattctctactatccttgtgttactctttgtcagcaccattgtgttggcacaagacttcaatcgctattttattgatgccacattgcgcatcgattacacgtttattggcaatataaagcaacaacatattgccgttgatgaactctgtaagatacctcgttggtatggtaaacatcagcgattgagcgaattacctgttgaaggaaatggacaaattaccgtccgcgaccacaaaacgcaaaccattatttaccgtaattccttctcaactttattccaagaatggctctcttacgatgaagcaaagacagcgacaaaatcgtttgaaaacgttttcctcgtgccatttcctaaagatacagccgacatcaccatagaattgcgcgacaatcgccgttctgtgatgacacaactcacccatatggtggtcccaaacgatattctaattcgtaaaattggggataaatcggttacgccatacgaaaccttgcagcaagcagccgatacttctcgttgcattcacatcgcctatgtggcagaaggatataccgaagcagaaatgccaaccttcctaaacgactgtcgcacagctatggaagcactctttgcgcacgagcctttcaaaactttacgcaaccgctttaacgtggtagccgtgaaagctccgtcagccgaaagtggcacttccaacccaggaaagggcatttggaagaacaccgcactgcactctaatttcaatactttttacagcgaccgctatctaactacgttgcatctcaaagatttgcacaattggttggcaggaactccctacgaacacatcattgttttggtgaatactgacaactacggagggggcggaattctcaattcttacaacctttccatgacacatcaccgtgcgttcaaacctgtggtagtacacgaatttggacattcttttgcaggattggctgacgaatatgcctacgactacgaagccattccaatgtttccccacgacattgaaccttgggaaaagaacattaccactatggtcgattttaaatcgaaatggtcggacatggtgaagaaggggacaaagataccaaccgagcagcctgccgacttagataagcccaatgccaagaaagaaaagtggcaaattggtgcttacgaaccagctggttacagtatgcacggcgtttatcgtgcctatcccgattgccgtatgcgcaccaataacaaccccgaattttgtcctgtttgccagaaagcaatcaccgaattggtgaagttttacacagaataaatcaattttgccaaccctaacagtctgatagcctccctcaacactccgttgggaagaaagaagcctcccccaacccctccgttgggaggggagtgcaaatagatagttggtggggcaggtgggaattggcagatgggaatagtcggacaagtctgaaaggtctgacgagtcggacacagcaattgatggtaggttggtggctaaatggtgcaacaaataaaaaaactcccttctccacgcaattatggggaagggagttttttatttttcaactttgttgagccttctgctccgcaagtttttttgacctctacgctttattttgcagcgatgcactcaacttctaccaaagcattctttggcaaagtctttacagcaatggctgaacgagcagggaatggttcgttgaaaaattcagcataaacttcgttcatggctgcaaaatcgttcatatcagagaggaaaacagtagttttcatcacgttagcgagcgagataccagcttcttcgagaatagcctttgcgttggtgagcgattggcgtgtttgttctttgataccaccaggagcaaattcgcctgttgcagggtcgatagggagctgaccagaagtgataactaacccgttagcttcaattgcttgactgtaaggaccaattgcctttggtgcttttgctgtgtttataactttcataatctttggtttttatttgtttttggttttcttttttattgcctttgtttttcttttttgtcgccttcggtttgtgttgaaccattgtgccgtaggttttcatggcaaagttaataataaattgtgagttttgcaaagatttttttgtttgcttttttgtacccatataccttttttcaacctattctgtaaaaaaatagaaggtgtgcttcaaaaaagcacaccctcataggtttgaaaacctgcggcatatagccttattgtgataagatgtagaatatcttatgctgcaaaaataagaattttgtttggaaattgcaaatattattactatttttacaaaaaataattataatcaatggaaaaacaacgaatattaggattagaccctggaacaaatagtttaggttgggctgttcttgattttgataattcaaagcaagaatataacttagttcgcaaaggagaagttatttttgaagaaggtgttggtaaaagcgaaaggggcgaattttctaaagctgcctatagaactttttacaaatcaacgcgtaagcactattttcgccgcagactgcgcaaaatagaagtgctaaaagtattggttaaatatgatttttgcccatatctatcagacgatttgttaaaacaatggcacgaaaagaaaatttatccagcagttaaagaatttatggattggcagcgaaccagcgatgcagaaggaaaaaatccatactatgaccgccattgctgtttgaacgaaaagttggatttatcattaaaatcagatagatacattttaggaagagcattgtaccaccttacgcaacgaagaggttttaaaagcaacagattgatacaaaataatgatgaaaatgaagaaggaaaggttaagaagggtatttcagaattaagtacagaaatgcaagaagccaattgcaactatcttggagattatttctataaactttataccgagaaaggtaatactgtgcaaattcgcaaacgatatactgacagagaaaagcattataaaaacgaatttaatgctatttgtgagaagcaagaacttaacgaaactatcgtaaaagaattagacaaagccatcttctttcaacgtaaattgaagcctcaaagacatggtgttggtaaatgcacatttgagccaaataaccgccgatgcgcaatttcacaccctgattttgaacgattcagaatgctatgctttatcaataacatcaaaataaaactccgtttgaagaaaatttacgccctttaaataatgaagaaaaagcattgatagaacctcttttttatagaaaatcaattaaaaactttgattttgaggagattgcaaaaaagttggcagggaaaaataattactgttatataaaagatgattcttcaaagcaatataaattcaactatcgcatgtcgcaaggtgcttctacatgccagaccattgcaaagctaaaatctatttttggtgaagagtggaaaaatggtattgcagaaacatatactaatagaagaaaaaaggaagggcttaagaaacaagctgaaatggttgatgatatttggaatgttctctattctgtgtcagaatgcgatgtactaaaagattttgcaataaataagttacagcttgacgaaaaaactgcagacaatttttctaaaaccaaattagcacaaggctttgctacattgagtttaaaagctatcagaaaaatattacctttcttagagcaaggttttggctacaccgaagctgtctttcttgcaaatattcctacagttgtaggtaaagaatattggaataacgaagatattcgtaatgatattatggaagaaatcaagactatattttatcataatactttaaagacaaacgattcacataataccatacttttttgtattaaagatattttaagcaataattttgatttagctccaggggcaatagataaactatatcacccatcaatgataaatgtttataaagatgttatacccaatgaagatggcattcttcaattgggttcaccaaaaatagatgccgtcaaaaatccaatggcaatgcgttctcttcatatcattagaaaagtcgtaaatgaattattaagagaaggtatcatcaatagtgatacagaagtaagaattgaatatgcaagagaattaaacgatgctaataaacgtcatgctatagcggattggcaaaaaaaacaatacggaaagcatcagaaatatagaaaagaaataaaagaattattcaaagctgaaacaggttttgaaattgaacctaatgaaactgatattcttaaatttgaattatgggaggagcaaaatcatatttgcctatatacaggacaagaaatcggaatttccgaatttgtaggagaaaatccaaaatatgatatagaacatacttttccaagaagtttaggtggtgatagtacaaaaatgaatatgacgctctgtgaaaataaatttaatagagaaaacaagcaaaagaaattgccttcagagttagcaaaccattccgaaattttggaacgtatagatgattggaaaaagaaaatttatattttgcaaaaaaaatatgacagcatacgtactcataatggaatggacaaagaaaacaaagataaaaaaattgtgagtaggcacaaaataaaattggagttagactattggaaagggaaatataaccgctttacaatgaccgaaataccagagggatttagtcgcagacagggtatgggtattggattaatatctcgctatgcaggtttataccttaaaacaatattccataaaaaagataatccacaaaagtctaatgtttatatcgtaaaaggatctattacggcagagtttcgtcgtatatggaatatacaagacgattacgagaaaaaatgccgcgataaccatattcaccattgcattgatgctattgtggtaggttgcattggaaaaagagaatatgacttaatggcgcaattttatcgagatgaagaaaaatatagatgggaaaagaagaaaaaacctttcttcaaaaagccttgggaaacatttactcaagatatgctttcattgaaagatgaagttcttactgtacattttaatccgagcaattttactaaaaaggcacataagaaagtctttacaccaaaagggatatttgttgctcagggagattgcgcacgagtaaaacttcataaaggaagctattttggtgcaatagagcaaaaaggggaaattaaatatgttatgcgaaaagaattaagcgcattaaaaatcgaagatataaagaatatagttgatgctgtagttaaagaaaaagtacttgctgtagtaaaaaagaaaggttttaaacaagcaatggctgaacctatctacatgaacgaagataaacgcatattgataaagaaagttcgcctattcgtttcccaagcaaatcctctgattgttaagaagcatagagacctttcttctaaagagtataaacaaaattattatgttgataatgaaggaaatctaatgatagccatgtatgaaggagttaaaaagaatggaaaaattgatagagaaattacagttgtaaataatttagaagctgcaaaattctttaggcagagtcaaaaaaataatgcagaaaaacaactaatatcacatttaagtcccaaaaatggttatccattaaagaccgtcttaactcaaaaacaattggttttgatgtacgaagatagtccaaaagaaataaaattgagagatacaaaaaatatggtaaaaaggctctaccaggtttttggaatagaaaaagatggacgtgttaaactgaaattccatcaagaagcccgttccgaaggcttgaacataaatagtgcagcatttaaaatacaagatactccagaatcattataccgacatactaaatcaaatttgaaggtgttagtaaatggagtggactttaaaataaatattttaggagaaatatcattaatataacgcttatgcccaaatactgattattgttcaaaaatttgcaaagatagagaaatgagtgaatttagattaaatgcttaccatattatgtggctatttattatgttcgatttgcccacgattacaacaaaggataaaaaagaatctgctcgatttagaaaagatttagaaaaagatggctttacaatgcatcagtttagtatctatgttcggtattgtgcatcgttagaaatagccaaagtgcatataaaacgagtaaaatcacttgtacctttagcaggaaaagttagcatactaatggtaactgataaacaatattctaaaatgataaatatttggggaggaataaagaaaaaatctccttcaacacctgtacagttagaacttttttagtaaatttgcagttaaaagattatatcaagttcacttcatataacataaaaatattataactcgttgtaaaacagtttgctatgcaatgtatgttgtgatttgatgtagaatgcgcaaaagaaataactttttacttctccgcttcttcttccgtaatgttgtgatttgatgtagaatgcgcaaaagaaataacttaaataaatttattatgacttacgacaagttgtgatttgatgtagaatgcgcaaaagaaataaccgactcggctaaatcgcctgctttgtcagcgttgtgatttgatgtagaatgcgcaaaagaaataacgtcgtagcgtttctcctttaattcaagctcgttgtgatttgatgtagaatgcgcaaaagaaataacgcccgtgaagattgtcttatacattacgatgttgtgatttgatgtagaatgcgcaaaagaaataacttgcatggttcatggacatacacacaataagttgtgatttgatgtagaatgcgcaaaagaaataacaccacccataaaagcagggcagttgataatgttgtgatttgatgtagaatgcgcaaaagaaataactaattctcctggttttaaatatccgtcaggtgttgtgatttgatgtagaatgcgcaaaagaaataacaacacatcaatattaccgtctattgatgtagttgtgatttgatgtagaatgcgcaaaagaaataaccggaacagtatataaaggtggcaaagatatgttgtgatttgatgtagaatgcgcaaaagaaataacaaatttcaatatatgagcaataaagaaaatgttgtgatttgatgtagaatgcgcaaaagaaataacagttcaacgatgccagcctatttgttacttgttgtgatttgatgtagaatgcgcaaaagaaataactcgttcttcttacattgtcagaacgttgttgttgtgatttgatgtagaatgcgcaaaagaaataaccttacagatgcgctgtggtgtataaccaaggttgtgatttgatgtagaatgcgcaaaagaaataaccattccgtatgctaatgtgagggctgctccgttgtgatttgatgtagaatgcgcaaaagaaataaccccttttggcgatattttatcagagggggaagttgtgatttgatgtagaatgcgcaaaagaaataaccgttaccttttttatccactgccgcttgtagttgtgatttgatgtagaatgcgcaaaagaaataactaaaataggtatgataacaatattagggacgttgtgatttgatgtagaatgcgcaaaagaaataacctataatccacaacacggtaaagttcaatagttgtgatttgatgtagaatgcgcaaaagaaataacctcgatattgagccaattattttctgttagttgtgatttgatgtagaatgcgcaaaagaaataacatgaagtggcgcaacaaggtaatgaagtacgttgtgatttgatgtagaatgcgcaaaagaaataacccttgaacttgacggactcagcgcaatatcgttgtgatttgatgtagaatgcgcaaaagaaataacgggcggtaaataagcatacaataatcgcaagttgtgatttgatgtagaatgcgcaaaagaaataacggaagattgagaggaagtatcatattcacggttgtgatttgatgtagaatgcgcaaaagaaataacttattttttacaacttttttgggtgcagtgttgtgatttgatgtagaatgcgcaaaagaaataacgccacatgtgcacgatattacgctttaagtgttgtgatttgatgtagaatgcgcaaaagaaacaacgaacaacgttcaatagaagtgtgttacggagttgggaaacaaaagttcataggaatgctttcatgacaatattttgtaaacttgtgcttgttagttgaactcactgaaccaacatattcttttaaacgttaataaggtttaaatacacctgttggctaagataaaatttggtagtttcaaaaaaaaagtactacctttgcactcgcaattcagagataacacaacatcttaattacaattgcatggttaatatcgcgggttggagcagttggtagctcgccaggctcataacctggaggtcgcatgttcgagtcctgcacccgcaacaagtttcaataagtcgctcatttttgagcgacttatgtgcgtttataagatagaattattcatgataattttgtctcagcggatttttccagttggcaaagcgcagtattgaacataaagttcatacctttgcagtatgaaatcagacgcattattacggctcagtaggaaaaatatcctcatatttttcctactgagcccttttttttctatagaatttcgtttattgctgtaacttttggatacaaaaaaggcacgaccacagtcgtgccacctatttattatataaataaccaaattgttttgagcttgattattagttcacacctcacggtgttgaactaaaatcttgcatcaaaatgtcatcctattaactaacctattaccttaataacctattgacttcctgaaaattcttttttttacttaaacaactaaatctttaaacctaaacaatctattcttataaactttacgtttgcaaaggtaaagagtattttccaatgttccaaatatttatttggaaagtttacaataactgcaataacttgatataaatcaatatatttggtgcttttatgcgtgatttatagaaagaatgacgtaagttttaggataacgaatcagaatgttaggtgataaaatagggggaatgattagtgataaaataaatttttgctaatcattttactataatacgcaaatttactcacttgtccccatgctgcaagttgccttttggttgttgctatattataaggtgcaaccgaatgtaaaccattctttgaaggcagaagggaattgggttggggcagaagggagtagggcaaagaacgcactaccgctgcctgacatctgcgcatagaaagctcccatatcgtagagcgattgtttcacgctgcgtatttcggggtaaacgctgaaaatggagtgttcaaaatcgttggacaagtggttgcgccactctgtaacagggcgtttgacaatgtctaagcagttttctgcgggtgcttttggggtgataaacgagaaggcttgagccgtagaaatagccacaggaggtttcactatgaagagataaagtccttttaagtgagccaaatcattggttatgggttgcaaaatttcgcctattcctgttgcgtatgctggttctgaggttgcaaaaaaggcacaatcggctcccaatttcgctgcataatgttgtaatttctcggtcgttagtgataggttacagagttggttcaccattcttaaagcgtaggttgcatcagccgaaccgcctcccaatcctgcttgagaagggatattttttttcaaatcgaagctaacgtgcggtaaatcgaaatcgttggctaacagtttgtaagcctttacgataagattgtcagctgcattgccttcaattttgtttccgctcatggacaaggaacaagcatttggcgttccgtccgtgatgtttgcctccaatcggtcggtcagttcaataggataaaacacagtttccaagtcgtggtagccgtctttgcgctttgccacaacgttgagaccaagatttattttacaacaaggataggttatcatactttctatttttagcttttgcgaccctcttcgtcgggcgagggcatacaaaatggcttatcgttcataggcgaagacaagttcgaggtgaatgcttcgcttaatcttctacaaagttacacaatcattatggaatatttgcgagagtttgaagaattttgattaattttgtagcgatatgccagaaaagaatagtaacagcaaaaaaagtccgaatagacgccagaccgcgcctattgacaacacgtttggacacttgcaaccgcaagcgttggacattgaaaaagtagttttgggagcgttaatgattgataaagacgcctttacggtggtatctgaaattttgcgaccagaaactttttacgacccacgccaccaaaaaatatatggggccatacagtctttgaatttccacgagcgtcctgttgatatcatgaccgttgccgaagagttgaaacatcaaggcaatttggaggaaattggtggtcctgcctacatcgtagagattagttcgcatgtggcatcgtctgcccacatcgattatcatggtaagattttgcaacagaagttcttagcacgacaattgattcaatttgcatcaatgatagaaaccgatgctttcgacgaaacagttgatgttgatgatttgatgcaaagggcggaaggcagtttgtttgaactatcgcaaaagaacatggcgcaggaatatacgcaaatagacccgattgttcagcaggcacacgaattgcttttgaaagctgcaaacaataaggatagtggcggattgacaggtgtatcaacaggctatcacgacttagataaaattacagcaggttggcaaccgtccgatttaattattattgcgggacgtccagctatgggtaaaacttcgtttgcattgagtttggctaaaaatatagccattgataaccgcattccaatggctttcttctcgctcgaaatgaacaatgtgcagttggtaaaccgcttgttgtcaaacgtttgctctatctctggtagcaaaatacttagtggacaattagacccaagcgattgggaacgatttgatacgaaccttagaaaaatggaaggcgcaccaatttatgttgatgacacgccaggattatccgtttttgagctccgtacaaaggcaagacgattggcacgcgagcatggaataaaagttttgatggtcgactacttgcagttgatgaatgctaatggcatgcgtttcggcagtcgtcaagaagaagtttccaccatcagccgctcgttgaaaggattagccaaggaattggacataccagttttagccctttctcaattaaatcgtaccgtagaacaacgtgatggtatcgaaggtaaacgcccacagctgagcgacttgcgtgaatcgggagccattgagcaagatgccgatatggttctctttgtgcatcgtcccgaatactatcgcattttccaagacgaaaaaggcaacgacctacacggtaaggcgcaaatcattatcgccaagcaccgtaaaggcgcaacaggcgacgtgttactcaactttaagggcgaatttacccgatttgctaaccccgaagaagacaacttcctcccttccatgaacgacccattgggcggcacaatcatggaaagccgaatgaacaacgacccattgcccccaccaccaggcgatatagatttctaaaaaagctccccaatccctttcgcaacaacgaaagggattgagaaggtttcaccttgattttacaaaatagcctattttggagttgaaaagcataactttttagcactaaaataggctattttaaaaaagtaaccgcccctccgttattttcgtttcataaaatgttgtgtctgtacaatataaaaaatgtgcaacactcttctctttaaccgattaaaatcttatgtctcagcatggatagttagcataaagttgttgtttttaaaaaaggattttggagacctcagcaatattgcgccatgcaagttaggtaacgagatatttagccataatatagacttcattgctcgcaatcaccgatgacatttttaccacgatcacgattattaattattgtatttcattttccgatgcagaagtgtctaaaaatgttgtggagggtttcttgcgacgtgatttgatttcctgtaatttctccgagaatggcgatggtgtctttaaggtcttcggagatgaggtcgccactgaggttcattgccattgcttcttgtacacggaggagggaggcgtgggcacgggtaagggcgtcatagtggcgagcgttggtgatgatggtcgtgttttcggtaagttcgggtaggtcggcaaccttgtatattaggctttcaaggcggtcaatacctaagttgtatttgcccgaaatggcgatttcgtggtaggtttggttctcggaaagggtaggagtggtttcgggaaggtcgtctactttgttgcgcacgagtatgagctgtttgtcagtacattgtgtaatgatttcttctttctcggcttcggtgggttcttggtctactacccacaatacgatttgtgctttttgtagttcagcgagggtgcgttctatgcccaattgttccacataatcggtggtttttcgtattcctgctgtgtcaataaataggaaatcgacgccgttaatgctaatgctatcttctatcacatcacgagtagtgccgtgaatatcgcttacaatggcacgattatcacgaagtaggcggttgagtagggtcgattttccaacgttggttttaccgataatggctactggaatgccgttttttaaggcttgacccgttttgaaagagcgtgcaagggttgtaactttgctgtcaatttcgttggcgagttcctttaattcagtgcggtcggcaaactctaattcctcatggtcggagaaatcgagttcgagttcgagcaacgaattgattttaagtagctgctctcgcagtgtagaaagttctgaagaaaaatgccctttgagttgcgaaagcgcaagtttgtaagatgctttgttagtcgatgcgatgaggtcggctaccgcttcggtttgcgataagtccattttgccattgagataggctcgttggtgtattctcctggttttgcttgttggcaaccagcttcaatgagttggtgtagcacttgttcgagaatataagccgagccgtggcaggagatttcaaccgcatcttcacccgtgtaagagtggggcgcccgccaaagcgaaacgactacttcgtcaatggtttgttggtctttgtcaattatttcaccataatgcaaggtgttggcagtggcatttaagatagattttgagaaaatagaatctactatttcgatagctttactgcccgaaattctgataactccgattgctccaccgggttgtgtcgccaatgcgcagatagtttctgtggagataagaggattgttgtaagtttgcattatgtttctttttataagattttagggacacacgaaaacgtatgtccctatattttaaatggaattgaaagtcaattaaattctttcaagtacctttttaatcagtccgtcaattgtatttttgtaaccagcatttgcttctttttgtaaacgattagcgattaccatgcagcaagttaatgctttgtgtcccatgtgttgtgctaaacctgccaatgcgctactttccatttcaaagtttgtgcattggtgtcctttgtattcaaattttacaattttttcgttcaaatgtgggtcagccaaaggcacacgcaagcgacgtccttgaggtccaaagaatccaccgcaagcaattgttacgccacgaaccatatcgtcttgtgcaatttggtctaagagttctttatcggcatttgctacatatgggttgcccaatgctggtttccattctacttgtttcttaaattcttcttcaaactctgtatccaacttttctcggttggcataatagttcagcaatccgtcgaagccgatgcttttttctgatgcaatgtaagttccgataggtgtgctttcttgcaaaccaccgcaagttccgatgcgcaccaatgtgagttggcgtagttcggctttttctttacgagtttcgaagtcaatatttgccaatgcatcaagttcatttaccacgatgtcaatgttgtcgcagccaattcctgtactcaatacagtgatgcgtttgttcttatattttcccgtaatggttctaaattctctattgttcacttcgcattctacaccgtcaaagtgagaagctactaatgcaacacgtcccgggtcgcctaccaaaataactttgtctgctaagttttgtggcttcaaatgcaagtgaaaaatacttccatcttcatttataataagctcagaaggagcaaaaaatatatcttccataattctttgaatttggtaaattattagttcgttcttacaaagatagttatttttggaaattggagcaagaaaataggtatatttttgcccaaatttcctgattactaatctataaatacgaaaaatcgagttaaaacaaggtttcgacttgttttaactcgattagttttcatgaaaatattacttcaaaagatgttctgccatgttctgtgcagcctttctaccgtcgcccattgcgaggattacagtagcgccaccacgaacaatatcgccacctgcatagatttcatgaatagagctttgcatttcttcgtttactgcaatggtgttctttctgcccaattccaatccttcaatagattttggtacgagtggattaggcgaaacacctactgcaactacgacttggtcgcattcgatgtttactgtcttgcctgttgatttagggctacggcgtccgctttcgtcaggctcgccgagttccataacatcgagtatagcaccgcaaacacgaccattttcgtcagcgatgtattcctttggattgtgcaaagtaaggaagttaatgccttcttcttgtgcgtgtttcacttcttctacacgagctggcatttcttcgagcgaacgacggtaaaccaaagtaacatcagcaccaaggcgtttggctgtacgacaagagtccattgcggtgttaccaccaccaactaccaaaactttcttgcctataataataggtgtgtcggtgtcagggttggctgcgtccatcaagtttacacgggtaagatactcgttacttgacagaatattgatgctattttcacctggaatgcccatgaaattaggcagtcctgcgcctgaacctacaaagattcctttgaaaccgctttcctttaattggttcacactgatggttttaccaatgatagtatctgtttggaaatgaacgccttgcttgctaaggttttccacttccacctcaacaatcttgttaggcaaacggaattcaggaataccatatttcaatacaccgccaatttcgtgcaatgcttcaaatacataaacctcaaaaccacgtttaaccatatcgcctgcaaagctaagacccgcaggacctgagccaataacagcaacttttatgccgttagatggggctaattcaggcaaggtggtgttgccgctttcacgttcatagtcggctgcgaaacgttccaaatagccgatagctactgctggctcgttcatcttcaagtggatacaacggctttcacattgtttttcttgtgggcaaacacgaccgcaaacggctggtagggcagacgtatctttcaaaacacgagcggcattgaggaattgtccacgttcaatgttctttacaaaacttggaatattaatgtttacagggcaaccttccacacacgttggctttgcaca

SEQ ID NO: 4203 - DNA, 22388 bp, synthetic construct
  misc_feature 1..22388: note = Synthetic
  source 1..22388: mol_type = other DNA
tcgttcaaggtgctaactctatgattttccaattgggaaagacagacgtagagcgccgattggtagtaaactcaacgggtcgtaaatgggaatttacctttacaacgctcgtaacctttggtggtgcattctttgcatcgttcccactcttttacagtacaagtttcggctctgcttattgggtatgggttgccattcttttcacttttatcattcaagctgtaagctacgaatttcagaacaaagcaggcaacctcttgggtgtgaaaaccttccaaacttgcttgattatcaatggtatcgttggtccattgctcatcggtggtgctgtagcaaccttctttacaggttccaacttcatcgttgagaaagccaatatcgtcaatgaaatgcaacccgttatctcgcattgggcaaacggctcacgcggtttagacgtattgttgaacccttgggtagttgttttcggtatcgcagtggtattcttggcacgtgttttgggtacactctacattcataacaatgtgaacgacgacgctatccgctctcgcgtgcgcccacaactgctcatcaataccgtcttcttccttgttttcttcctcgctttcttggtgaaaacattgctcggcgaaggctatgcagttaatgcagaaggcgttatcgtcatggaaccaatgaagtatttgaacaaccttttggatatgtggtacttagccgttatccttttaataggtgttctcatggtactctatggcatcgtgcgcaccatcatgcaacctactttcattaaaggtatttggtctactggcatcggcgttgtcctcgtagtcatcgttctcttcctcattgcaggttggaacaacaccgcctactacccttcaacagccgatttgcagagttcgctcaccttgcaaaactcaagttcaagcgaatttacattgaccgccatgttctatgcgagcctcattgcaccattcgttctcgcctacatcttctatgcttggcgcagcatcgacagcaagaaactcgataaagccgaattgggcgacgacaaacacgcttattaaactcgttttgggtgcgtaggaacgtgattttttcacaagctcaacagctcgtattacgttcctaacaactcaaaaacaataatgaaaaacgtggaaaatggactttgttccgttttccacgtttttttgttaccataatctggtgtgcggaacggatacgagttgttaagtttgtgaaaaacctccgcccctacaccttttttatatataggctgttttgcgctttaaaacaataggttttgtagtgcaaaacagtaggttttgaaaatcagaccggttatcctgcaatttatcccatatttttgtgcaaacgataaaaaatgtaagcatacctacaaataggcattggagggatagaaaatgccctcgttttgtaatccaaagattgcaattattggtgtataatcttaaaagtaatacctaaaagtaggtattgagtgcataaaactattcgtttttgcacatcttaaaagacttgtgcaatgaaaaatacttaattataagtattgtcaaaaaaagataaaccgagtacctttgtaacctaaaaaataataaccagaccaagtatcccattataaggtactcggttaaaaaatttactaaattacagatattgttatgagagaagaatggagaggtttcacaggcacaaagtggcttgatgaagttaatatgcgcgagtttatccaggcaaactacactggctatgacggcgatgcagaatttcttgcaaatccaacagaagctactgataagctttggggcaaactaaaagaactccaaaaagaagagcgtgctaagggtggtgttctcgatatggaaacagaaattgtttcaagtatgactgcttatggtgcaggctacattgacgaaagtatgaaagaccttgaaaaagtagtaggtcttcaaaccgataagcctttgaaacgtgcttttatgccatacggtggaatcaaaatggcagaacaggcatgtaccacatacggctaccaaccttctgaaaaattgcacgaaattttcacaaagtattgcaaaacccacaacgatggtgtgttcgatgcttatactgacgaaatgaaactcgttcgccacaaccatattcttacaggtcttcctgatacatacggtcgtggacgtatcgtaggcgactatcgtcgtgtagctctttatggtatcgacttcctcatagcagagaagaagaaagacttgaagaactgcggttgcggtgaaatgcaagacaacattattcgtcttcgtgaggagatttcaatgcaaatcaaggcattgaaggaaatgaaagaaatggctaagatttatggttacgatatttctaaccctgctaagaacgctcgcgaagcagttcaatggctctattttggctacctttcagctatcaagacacaaaatggtgcagccatgtcagtaggtcgtgtgtctactttcctcgatatttacatcactcgtgatatgcaggaaggtacattgaccgaagaagaagcacaagaattgattgaccacttggttatgaagttccgcatggttaagtttgctcgtatcccttcttacaaccaactcttctctggcgacccagtttgggcaaccctcgaaatggctggtttaggtatggacggtcgccacatggtaacaaagaacgacttccgtttcctccacacattggaaaacatgggtccttcaccagaacctaacctcacagtgctttattctccagctttgcctgaaggtttcaagaaatatgcagcaaagatttcggttaagacaagctctattcaatacgaaaacgatgaagttatgcgtccagtttggggcgacgactactcaatttgctgctgcgtttcagcaacacaaacaggtaaggaaatgcaattcttcggtgctcgtgccaacttggctaagtgcttgacatacgctatcagcggtggtgtagaccacaagacacgcgaacaatgcggccctgcgttccgtcctatcgaaggcgatgtagtaacttacgaagaatttatgccaaaattcatggacatgatggaatggttggcaggcgtttatgtaaacaccttgaaccttatccactacatgcacgacaaatatttctacgaagcagccgaattggcacttattgataccgatgttcgccgcacattcgcaacaggtattgcaggtttcagccatgtagtcgattctatctcagctatcaagtatgctaaggtaaacatcgttcgtgatgaaacaggattcccactcgaatttaagaccgaaggcgatttcccacgctatggtaacgatgacgaccgtgcagacgaaattgcagtatggttgctcaagactttcatcagtatgataaagaaacaccacacctatcgtgattctgaaccaacaacaagtattttgaccattacctcaaacgtggtttatggtaaatatacttcaaacatgcctgacggtcgtcctgacggcgcaccattagctccaggtgcaaatccttcatacggtgcagagcaaaacggcttgttagcttctttgaactcagtagcaaaattgccttacgaatatgctttggacggtatttcaaatacacaaaccatcgctccaagcacattgggtaaggacgacgaagaacgtacaaataccctcgtgggcgtaatggacggatacttcagccgtggcgcacaccacttgaacgtaaacgtgttcggtgttgaaaagctcatcgacgctatggaacaccctgagaaggaagaatacgctaatttcaccatccgtgtcagcggttacgcagtgaagttcatcgaccttacacgcgagcaacaagaagatgttatcgctcgtcaggctcacgctaaaatgtaagcattgatttaagtttttaaaatattaaaaagataattgggcagctgcccaattatctttttcatattgagaaagtcagacaggtccgacaagtccgacttgtccgacaaaactacaaacattatggcaaaaatccccacaatcgacatctccaccgagcaaaccatcaacgctgatggcactcacaccgctcgtgtacactctatcgaaaccttcggctcagtagacgggccaggtattcgtttcatcgttttcctcaaaggttgcgccatgcgctgccagtattgccataatccagacacatgggaaccaaattcagacaccctcaccaccgccgacgaactcttagaaaaagcactccgatacaaaagctattggggcaaaaacggaggtatcaccgttagcggaggagaatcgttgttgcaaatagacttcctcatcgaatttttcagaaaggcaaaagcaaaaggcataaacacctgtttggacacatcggcacagcccttccgccgcacaggtcagttcttcaagaagtttgaagagctgatgcagtataccgatttgctgcttttcgacattaaacatatcgatactgtcgagcataaaaagctcacagggtggggcaacgagaacatactcgactgcgctcgttatctttcagaaatcaataaacccatttggctgcgccacgtcctcgtgcctaccattaccgacaacgatgaatatctgcaccgtttgcgtgcttttatcgaagaattgcacaatgtagaacgcatcgaagtgctgccttatcacacacttggcacttataaatgggaaaatttgaacctaccttacgccctaaaagacataccagaacccacccccaaagcggtggaatatgctcaacgagtgttagaaggaaaagcataaaaagataatttttatcaatcttctgttcataatcttttcttgttcaaagaatttctatacctttgttcccataattgggtcaattctatttaagaatgaaaaggattattattgctattagcctgttatgcttgccatttatacttttaggacagaataatataggaacaaacgacaacgaacaagcaaacgaaatagcgcacatatcacccccaaaaactccagcggaaaggaaaaagctgtatgagtctttggcaatcatgggcgatgctgtgagccaatataaacttgcgctttgttatgacgatggaatcggtgttccacaaaactatggtgaagcgctgaaatggtatcgtaaatccgccgaacaaggagtgccacaagcacaacacaacctcggttttatgtacgcattgggcaatggtgtacgacagaattggaaagaagccgcaaaatggtttcagcaagctgccgaccaagaccatacattggcacaattcgccttaggctcatgttacgaaagtggcaatggcgtagaacaaaattatgtagttgcagcaaaatattttagagcagcagctgcaaaaggattgctgcccgctgtcaatgccctcgcctcattttattttgaagggacaggcattgtgcaaaactatgaagaagcactaaaattataccgtcaagccgccgaacaaggctactcggaatcacaatataaactcggagtttgctaccaaaaaggcacaggagtgaaagccaatataaacgaagcactgaaatggtttttaagggctgctcaacaaggatatgcccctgcacaaaacgattacggcacttatttcttagatgagaacaaccctaaaaaagattatcctaccgctttgttctggctacataaagctgccgaacaggaaaatgcacaagccatgtacaacattgccgtaagttacgaaaacgggtggggtgtagcacaaagcttagaaaatgccataagttggtatcgaaaggctgcattggcaggcgatgccgatgctatgctgcaaatgggattggcatacgcagacggaagaggcgtgaaacaaagttggacagatgccactcaatggcttttgaaaggagcagaagcgggcaatgcagaatcccaatcctactttgccttgtgtcttttacaaggtaaaggcatagcaaccgatgctaaaaaagccgtaaaatggttggaaaaagcaatagaacaaggcaacgcaatggcagctaacaatcttggattttgctatctcaacggatttggtgttgaaaaagataaagaaaaagccaaatattattttcagaaatcggccgaaatgggctatgagttggcaaagaaaaatttaaaattcataaaataaaagtgtggtaaatttgctcccttatgttcttgtaagaatacattttttaaagaaaatatatacaataatttgcagtttatggaatttttatttaactttgcttcatcattttttcaaaaagccataaaatgaaaagaaaagttatattgtttgcagcgttgcttttgccccttttcgttttagcacaaagcaatttaggcaaggcggacgataaaaaaacagatgattttgtacacgaaaactattttggagggtttacacctgaagaatttcaactctataaagatgctgcaaaggcaggcgatgttgatgcacaatacaacgtgggctactgctacgagaatggtgaaggagtggaacaaaactatagcgaagccgcaaaatggtatcgtaaagccgccgaacaaggactctctgctgcacaacatggcttaggatatctctatgcctacggtcaaggagtgaaagagaattggacagaagctgcaaaatggtttagcaaagctgcagaacaaggctacggactgtctatttttgccatgggagcttgttacgaagacggcaatggagttccgcaaaactttgtagaagccgcaaaatattaccgcaaggcagtggataaaaatgtggttgaagcctacgaagcactcggacgattttattatataggtggtggagttccgcaaaactatgaagaagctgtaaaattatttgcgaaaggagcagctttgagaaaccctaatgcgcaatattatttaggactttgctatcattttggcaatggaatcaaggctgataccactgaagcggtgaagttgtacttgctatcggcagaacaaggatttgctcctgcgcaaaacgaattaggtaatttttatcttacagacccaactcataaagattacaaaaaggcacttgaatggctgaatcaggcagttgcccaagacttgcctgacgcttttttcaacatggcactctgttatgaagaagggtggggcgttgaacaaaatttgaaaacagcggtagagtggaatcgcaaagctgctttagcgggcaatgctgaggctattacaaaaatgggcattgcttacgaagaaggaaaaggtgttgaacaaaatatgaccgatgcggtgaaatggtacctgaaaggtgctgaattaggcaattcggacgcacaaaccaactatgctaagtgtcttttacaaggcaatggtattacgcaaaattacacagaagccataaaatggttggaaaaagctgttgcacaaaaaaatccaatcgctattaataacttaggattttgctatctcaatggatttggtgtaactgccgaccttgaaaaagctgagcaatatttccaaaaagctgccgatatgggctatgaattggcaaaggaaaatctaaaaatgctaaaataaagaataatgaagaaattctctactatccttgtgttactctttgtcagcaccattgtgttggcacaagacttcaatcgctattttattgatgccacattgcgcatcgattacacgtttattggcaatataaagcaacaacatattgccgttgatgaactctgtaagatacctcgttggtatggtaaacatcagcgattgagcgaattacctgttgaaggaaatggacaaattaccgtccgcgaccacaaaacgcaaaccattatttaccgtaattccttctcaactttattccaagaatggctctctaacgatgaagcaaagacagcgacaaaatcgtttgaaaacgttttcctcgtgccatttcctaaggatacagccgacatcaccatagaattgcgcgacaatcgccgttctgtgatgacacaactcacccatatggtagtcccaaacgatattctaattcgtaaaattggagacaaatcggttacaccatacgaaaccttgcagcaagcagccgatacttctcgttgcattcacatcgcctatgtggcagaaggatacaccgaagcagaaatgccaaccttcctaaacgactgtcgcacagctatggaagcactcttcgcacacgagcctttcaaaaccttacgcaaccgctttaacgtggtagccgtgaaagctccgtcagccgaaagtggcacttccaacccaggaaagggcatttggaagaacaccgcactgcactctaatttcaatactttttacagcgaccgctatctaaccacgttgcatctcaaagatttgcacaattggttggcaggaactccctacgaacacatcattgttttggtgaatactgacaactacggagggggcggaattctcaattcttacaacctttccatgacacatcaccgtgcgttcaaacctgtggtagtacacgaatttggacattcttttgcaggattggctgacgaatatgcctacgactacgaagccattccaatgtttccccacgacattgaaccttgggaaaagaacattaccaccatggtcgattttaaatcgaaatggtcggacatggtgaagaaggggacaaagataccaaccgagcagcctgccgacttagataaacccaatgccaagaaagaaaagtggcaaattggtgcttacgaaccagctggttacagtatgcatggcgtttatcgtgcctatcccgattgccgtatgcgcaccaataacaaccccgaattttgccctgtttgccagaaaacaatcaccgaattggtgaagttttacacagaataaattaattttgccaaccctaatagtctgatagcctccctcaacactccgttgggaagaaagaagcctcccccaacccctccgttaggaggggaatgcaaatagatagttggtggggcaggtgggaattggcagatgggaatagtcggacaagtctgaaaggtctgacgagtcggacacagcaattgatggtaggtcggcgcgaaatagtgcaaacaaataaaaaactcccttctccacgcaattatggggaagggagtttttttatttttcaactttgttgagccttctgctccgcaagttttttgacctctacgctttattttgcagcgatgcactcaacttctaccaaagcattctttggcaaagtctttacagcaatggctgaacgagcagggaatggttcgttgaaaaattcagcataaacttcgttcatggctgcaaaatcgttcatatcagagaggaaaacagtagttttcatcacgttagcgagcgagataccagcttcttcgagaatagcctttgcgttggtgagcgattggcgtgtttgttctttgataccaccaggagcaaattcgcctgttgcagggtcgatagggagctgaccagaagtaattactaacccgttagcttcaattgcttgactgtaaggaccaatagcctttggtgcttttgctgtgtttataactttcataatctttggtttttatttgtttttggtttcttttttattgcctttgtttttcttttttgtcgccttcggtttgtgttgaaccattgtgccgtaggttttcatggcaaagttaataataaattgtgagttttgcaaagatttttttgtttgcttttttgtacccatatgccttttttcaacctattctgtaaaaaaatagaaggtgtgcttcaaaaaagcacaccctcataggtttgaaaacctgcggcatatagccttattgtgataagatgtagaatatcttatgctgcaaaaataagaattttgtttggaaataacaaatattattactatttttacaaaaaataattataatcaatggaaaaacaacgaatattaggattagaccctggaacaaatagtttaggttgggctgttcttgattttgataattcaaagcaagaatataacttagttcgcaaaggagaagttatttttgaagaaggtgttggtaaaagcaaaaggggcgaattttctaaagcagcctatagaactttttacaaatcaacgcgtaagcactattttcgccgcagactacgcaaaatagaagtgctaaaagtattggttaaatatgatttttgtccatatctatcagacgatttgttaaaacaatggcacgaaaagaaaatttatccagcagttaaagaatttatggattggcagcgaaccagcgatgcagaaggaaaaaatccatactatgaccgccattgctgtttgaacgaaaagttagatttatcattaaaatcagatagatacgttttaggaagagcattgtaccaccttacgcaacgaagaggttttaaaagcaacagattgatacaaaataatgatgaaaatgaagaaggaaaggttaagaagggtatttcagaattaagtacagaaatgcaagaagccaattgcaactatcttggagattatttctataaactttataccgagaaaggtaatactgtgcaaattcgcaaacgatatactgacagagaaaagcattataaaaacgaatttaatgctatttgtgagaagcaagaacttaacgaaactatcgtaaaagaattagacaaagccatcttctttcaacgtaaattgaagcctcaaagacatggtgttggtaaatgcacatttgagccaaataaccgccgatgcgcaatttcacaccctgattttgaacgattcagaatgctatgctttatcaacaacatcaaaataaaaactccgtttgaagaaaatttacgccctttaaataatgaagaaaaagcattgatagaacctcttttttatagaaaatcaattaaaaactttgattttgaggagattgcaaaaaagttggcagggaaaaataattactgttatataaaagatgattcttcaaagcaatataaattcaactatcgcatgtcgcaaggtgcttctacatgccagaccattgcaaagctaaaatctatttttggtgaagagtggaaaaatggtattgcagaaacatatactaatagaagaaaaaaggaagggcttaagaaacaagctgaaatggttgatgatatttggaatgttctctattctgtgtcagaatgcgatgtactaaaagattttgcaataaataagttacagcttgacgaaaaaactgcagacaatttttctaaaaccaaattagcacaaggctttgctacattgagtttaaaagctatcagaaaaatattacctttcttagagcaaggttttggctacaccgaagctgtctttcttgcaaatattcctacagttgtaggtaaagaatattggaataacgaagatattcgtaatgatattatggaagaaatcaagactatattttatcataatactttaaagacaaacgattcacataataccatacttttttgtattaaagatattttaagcaataattttgatttagctccaggggcaatagataaactatatcacccatcaatgataaatgtttataaagatgttatacccaatgaagatggcattcttcaattgggttcaccaaaaatagatgccgtcaaaaatccaatggcaatgcgttctcttcatatcattagaaaagtcgtaaatgaattattaagagaaggtatcatcaatagtgatacagaagtaagaattgaatatgcaagagaattaaacgatgctaataaacgtcatgctatagcggattggcaaaaaaaacaatacggaaagcatcaaaaatatagaaaagaaataaaagaattattcaaagctgaaacaggttttgaaattgaacctaatgaaactgatattcttaaatttgaattatgggaggagcaaaatcatatttgcctatatacaggacaagaaatcggaatttccgaatttgtaggagaaaatccaaaatatgatatagaacatactattccaagaagtttaggtggtgatagtacaaaaatgaatatgacgctctgtgaaaataaatttaatagagaaaacaagcaaaagaaattgccttcagagttagcaaaccattccgaaattttggaacgtatagatgattggaaaaagaaaatttatattttgcaaaaaaaatatgacagcatacgtactcataatggaatggacaaagaaaacaaagataaaaaaattgtgagtatgcaagtgcgcatttcgggtagcagtatctgcgtgtactctcaaaatactctgttgtggctacaatatggctacaattaaaaagaataaaaaaataaaagactatgatacaaggagttgcagcggaatggtcatttccctctctctccgcaatatcacttggttatcagtgatttgcaaaatttacacccaattttacacccaaaaatgtaaagttgggtgttttaatttaatcagggtcaaaaaggttgttctggctttccgcatattgtctactatgggttaatgggataattttgaagaatcccatatataatcgttattctaaatcagttagaaccaagttgcaaaattctcgtgcaccattagctttatatactttagctcctatttccgacaacttatcatacccattacttaaaccattggacccaagcaagaaaatgtataatttgtttccttcatttaaatattctctaaaatatgttatggattcttgtagattacccagctccccatcagttatgactacagttaccaactcatttttggatttttccaaagtgctttgtattcgatggatagggaactgagtaccaccacttccatttgtcaaaagtttttctcgtatttcgtcatattgaacagtccatgttatatcaacgcgaactgaatcagagaattctataagagctactttgcatttttttgattcaaaataattcaatattccaaaagaagcaagaacagcctgatgcatgttatctgcttctctagtcacagatttcatgctaccggatgtgtctacgacaagaagcaggtctcgtagtttcttttcagagccatgcgattctgttgtgattcgttcccatttcttggtagttattcctggaataagtttgggtgaagttatatacgaaagtattaaatctagactctctattggatcaccaattcgccatgtattaggataagaataatttattgggttacctgtatttgtttcttcttcaataggtataatgtcagaactttgggctataaaccataatttttccctatctttacatgagagaccaccaaggcctgcaatacccaataaatcaacaaattcattgagttctgtttcatgagctaatgcttctatagcttctttaattttatcagggtctgcgaaaactaaggcacttccattttcacttttatcttttggaccaatggaaaattgaccttgttgttggttactcagatctaattgtccctgctgctggttgccagaacttgattgtccctgctggccaccttgctgttgattgccagaacctgattgtccctgctgaccaccttgctgctggttgctagaacctgattgcccctgctgaccaccttgctgctggttgctagaacctgattgcccctgctgaccaccttgctgctggttgctagaacttgattgtccctgctgatcaccttgattatcattaccttctttcttgtctctaatataaagattaaaaaatgctctagtgtactcttctgtcttgctaaggaaagacgatttatcgtctattccattttccttgaattttttagctatctgagcaactattttcagtaattcagcatcattttctttaatgtcaagactacatccccatatggcctcttttgttagaaacatgagcttattatgacgcggacagatggctatatttgccccctttttaatccaattgatttcactttgtagcgtctcttgggggtgcaaataaaaattctttgtgtcaacaatgatatcggcggcttgatttgctattgaaccacatgcgtattcaatattaatgccaagatgtgaatactccctatagtaaatatttcgaatacattttagcattctaaggtgtgtaatcacatcaaagggacagcacatataatgttctatttcatgccgggtcaaaacttttacttcatcttgaaattccttatagctgacaggcaactttccaaaatttaaatgtatctgccaagttttgtcaatagtaatataatattgtcctgtagagtagttctcatcgtctgcgagaagcatttgtacttctggcataggaatccccaatgagttatgatactcactcgaaaaaacatactctattgcttcttgtgcctttgtcttatatgtttctaaatcaacaaccatcgttatgctttaacaaatagtcatacagatctgagacctcatcccctttatacacaaatttatatttggaacggacaaatttgacctttaagtcacagtcatcctttgtaatatcacgcaatgtatactccttacctttccataagtcttcattgtcaatgtcaacatcaggagctgcataaatgattaaatttttaagttcttgattttgaagaacaaaatcctttgtcaaaataaactcgcgtgatttgatgccaatcccccttatcctcctatcaatttgcactgaaagatattgacgattgggtatattgtatttaaaagcaatctcgtttttaagagccttcaaattctcaatattagtagtgttttctattcgtctattgtaatctatgatttcttgataaacaggcttatacttatcaataacaactggtaaaatttcagcatttaggataagagaattataggaaggtttactcgcttcttgtacaaataagtcaaattcttctttagacaatgcccctttttttatatattcaaagtccaataacaacttcttaaccccattaaattcattaagtattttttctacaatctgtcttgttccatcaagattcaaattggttatgaattcggcggttgtttttgcagaattcacattattccatgtttctgtcaaagtcgatgtaaattttttactaagaacagaacgatgccatatcatataaggagcaagaatcacaatgtgatttgttgtcacttgtttgtcccccaagaaccaagcaagtgctttgccatagcggtataaatcttcttttacacgaacgcttaaaggttgttttatcttacaacaaactttttcaggggcattcatatggcaattctcgcataaatttttatcaactgagatattgtcgttggattctttcgaaacacgttcgcacaaacgataagaagcaattatatagttaataaacaactctgcttcttcagaataaggaattgtcttgacggcctcttgaatttccttcagttctataccttttaagtaatcttctagactgtcctgtctatttgccttgtcttttttgccaatagtgctaaaactatcatagtcaggcatggtaattggtaaagctaaggcaaaacggtctctgaaaggtaacgccaattcttcattagcattgtctttgggattcaatgttgcatacaaagtaaatggaggtacaatcttactttgatcatgatatttaacgctaccttcagccaacaaggagagtaaaatattttgagcatacggtgaaagacgattgatttcatcaataatcttccattccgatgtgacaaattcattccaaacgacatcaagtttgccgttagtaagcttcttttgtcctaacatttgcgcaaaatcaaggctacccaaaattttctcttctgttaattgggaatgacctcgaagtatacaatcctcaattttttcttttgacttcttacaaaaaatctgacccaaatactttgataatgtggttttcccaccaccatgcccaccatatagcatcatggtaccacgctcaaccaacgcattaattactgctaatgtttctacaagatacacctttctctcagataacttgcttgacttgaatgtagctcccttaagttcatcattatgaacatatagattgttgattctcagcttgtcaagtgcttgaataatatcaatatttgtatatgtcatatctagaattccttcttaaatgataaagttataagaccattggatactaactcactaatgaattccggtttaaaatgctcgttatcaatctctgttgattccaacgaattcagccaattaatttgttcctctaattgagattgcttcaaaatctcaaggaacgtattttttattgaattcatgtctgttatcatatcaaagatagtaccttcttccaatgctaccaagaaagaaccagcttgtatcgtgtttataccattttctattgtagttgtacatttcccttgtgcgtaaattgaatcatatttcgattgcaattcaggatgcttctcgacaagttttaacaacaatggctttttgttgttatacgttgtcaagatttctttaaaaaagtcaacaattgtactacttgtgttgtcttcctttttcttaagttcagaaatcttcttgtcacaagaagtaatcttgttattgagttcttcttgcttgaatgctcttaactgtggcagtacactaccactgcgcacagaattataatcagaaaccaaagcggtaatgtctgctcctttctcaaaatctttccagtctgactcttcaaatgacatcgttggagagtcatagaattccttgatattattatatttgatttccagcggttcccaagtatttgccatatagcttgaaaggaaagcagacacctctccatttgtgtcaagcatttctttctcgaatcgcaggaaaagatatttcaaatcctcatcatctctatcagcgacaccggatttcagcagaatgtctatgcacttcttaatggatgaaattctcttcttggctttgttggaaaggctaatgtttttctcttggtcatcaagctctttcaaattctggctagaaattatggctttacttattatatccttataaaagtcaatcgagttcttctccttttgttctgaagtatatagttcatcagcactagaatatttcaattctggaattgagcacattacagaatactcattcgttaaattggacagaaaatccgcgatattattttcaaatttatcaggagcattgacgaatttcgatacatcctttttcaacttcttattgaaatcggaaatcatagtatcaaacaaatgtttttcatcttcttgtggaagttctgctatggaagacaatatatcgtcaatagacgatgaatatgattcatagtcttttttcagaaatgctctcagctttttgatgttttcatcgttattttttgtgtgttcttctatccatccaataaaggcatccaaacctggcgcagttatcttttcgtaaatctggtcaaagagatcaacgagttgcttgaagcacttgtcgaaatcatttttagacccgacaactgctaaacgctcatcaatggcatcaaactgttgcttccattctggtttagacaattctgccttcaatgctgtagcatatttggcatccttttttagttctaaggccttattgtattgtatgctaattttgtctaagctcatacttattcacattttattagttcacttatgtaatttttaaccgtattgtatgaagatgcagactccttgcaactcttacacgttttaagggcatcatctatctttgtcttatacgatgaagctgtcaaagccgattctagacattctttgaacttctgaatgtcattgttgtctatggtattctctttggctggcgtaagtttggcatcaagaacagcactcacttcagatttgggtgtcatatatctagcatactgccaccaacaccaatctccatcgaaacgtggtatttgacctgttggagattgttctcctagactgatgagttttgctgttaaagggtcttggtatatagtattaatctgagtttggtattctctttcaattctttccttctttgaattgagagaggtcaacacacctgttatctgagaacaaaccgtagacgcgttagatgttatgttcgcaattctccacacgatagaagatacaactgcgaaaatggttatactatcaggttcttctgcaaggattctcttacaattagcaagaagttgagacacctgttgaagtcccgaaacatatccttggaaaggcatgttttctggatttgctctttggtatttctttgaatacaacaaatccgtaattgcgtcaatggcctgacttactttacacacaatctcagtaagagtcttttctttatctgcgattcttatattaagttcagttctgagaggagtaaaatccatactctccacatatgactggagatacaaaagggtcatgaacatctttcccttggaagatccgtatgacaactgattattataagttgtaaaccaatgagaatccaagtcatctttaataaaagacagtaggtcagaaatttttgttgcgatgcgttctgtcttcatcattgttgcaaagcttaacatatgctttgaaatgacatcgtctttgtcgtaagaagctaacaacttatttgactcgttactcgatattatcttcaagatttggtcaaaatggaaagacttcgttataacatcctcaacaggagacaagaacaacttgtgtgaatggttaccgaccatttgcagcactttaacaaatgatggatttgcctctgttttctttttggcattttccaagatatagtaaagtcctaaatacttgctgatggtattggttacagacgattcgaggacgttattgaaatcccaacatatattatcgtcatagtcttctgcttcgcaaatcagatcacaaagagcatccttatactccttggcttgagaattgctaatagtcttaacgacacaagtgtcgccttcgttgaccaatctagaataatgttcaatagtacgaacgacttccttttgttttgtccactccctgtttttgattattgcaattgcagaattcacatcaatggttctgtcttcatttgctccagcaagttctccacaagaacctgcggcaattacaatttttgccaatgagtctataaaatctgcaatctgtccaccaaaattgaactggtatgtgttatagtcctcgaatacaagtttcttcaactttgcaatggctgtaatgttgccattagagtccatgcatagttcatttttcagagcatcaattttctcgttagtttggaaaaacacaatacgcaaagtctttgctgcgtcttcgtgcaattccgttttggcagaacgaatgtattctttcaaacgaaggatatacttgtccatctgtccttcatccaataatggaacgaacacaatcttgttattggtaagtcctgcagttaacaatacactctgcctgatattagactcagcgagtttcttttcaaggctcatctctttgtaattcaatttcggtgagccaattggttgctcgatgaattcacgtatcgcccgcagcgagaactgcatgtataaatcattgccgctctttactttgcaaatttcaaaaagtccatttaaattttcgaaatcatcgtcgatagactccgtttcaacagactgctcgatatgcttgatacactcaaggataaaatctttggtttgcttaatctcagatttgtcattgtcttcgtattgacttacaaaatcgtatgtcaattcaagtaaaggaacaaggaacgttgtggccagcgctttctctttgatattacgacaggctgtgctaaacgcaatattaccgttcttgtctgcacaagctgataatatgtaattgaaatacttagcgagatgtgatagatagtctacttccccaaactttccatcattatcttggcgtaatttcaggtatgtagaaaaatcgtcgctcaacgcggggtttagtgctttttccacattgaccaacccgtcctcgtctgtacagaagaaattctctgcactgtctttaatcgcatccttatatgaatcttcaaccttgatttcataaggttcaaaattcagcaagagtttacctgctataggacgaatatagctatttaagtcattgaaatactttgtttttaagtattttacatcctcgccactttcgtcaatagggtctttaaaaatacgttcattgataaaatcaataaattttttttcactgaaagcctggtaatcgatttcatctctgagtttctgtatgtggcctggacgacaacgtgacatccaccaaatgaaatttacatatccatttggtctttccttcatgaatttcttcttaagaagttcagctgtaggaaatggaatctgcattgtctttaaacggcggttagcagccgtctcgctatcattatttccatcagctcccttctcttttgcgacttcatatccagaagcaggtccatttccaatcaccagcagaaatggtttcgattgaacaatttgatcaaaaagttcacgtagaatgccaccgccagaagactcgacgatacgtttaagttcgtagaattttgattcaaattcgtcaaccaatagcaaagggatattattagttgctaatgcctcacgtataacctcttgagaaaataccgttttgcccatctccgattcagacgttttttctgcatctaatacaacaggctcaaaatcttttaagtattccgttagagtaagttcgtttttttcatagcgtcccttgaactcgggaaaagcgacatcggtaagttcgtcccagtcattgtccttcaaggactctatctgcgacgaaatcatcttgcgaattattatacttaattcgttattttccactttaccggtaggactgttgactgcctctttcttgacctcttcaacaatcttggccaaaggcatatagaaagtgggcgtatgcaagacttcccaaccatagtgaaacagataatataatgttgttgactttcctataccaaaagctccttgaagcataataggctgtatgttactattttcgcaacagccactcttcaagtctttttcgacagtctctcttaggcgttgatgctcgttactcaaatcaacccaacgggtctttttgatgaggggaatgtaagtttcgctcatgttattttaaccttatatttattggttcttttaataatggtgactttatctcatacagtcctttacttaaattatcataaacatttcgttcagaattatcgtatccctgtatctgctcgttcctgccattgaacaaactcatttcaactttaggtataattgttataacataccgatctgttttttcctaatttccaaatcaaatggcagttgtttgttattaaattctatacaatcattttctgtaattgcatttcccattttggcagctacagcatattcttcattaccagttaattccattaacttcgggtgaagaacatgcattactggcatatgttttgtcttgatataatctctgtatttcaaatctacagaaaaagagaaattaccggaatgctccgaatcgttgatataagataaaatggaatgattcaagaatcttgcattagaaatttctatctctctaaatttttttatctcatcagttagttcctggtcggatggtatattttctgtataatactcgccaacataggaacccaaaatttcaattaagatgggctgttcattccatgtttcaatcatgaatgggaatcctacgacagaagcgtccgtacacacttgatctgaagtagatgccatttctataaaaggagtaatcgggcaaactcgcacaaaagaattgtttgagtctaattcttcaatatcagaaatcaaaatcaccatataaggatgagatgcggtttgcatttcaccctcgtaatccaaatattgctgctttattgtccaaatttgattttgtttaatttgaggcaataagcgaagataaccattataattagatgcattcgcaaacaagtttttcatcttgtctacgtcctgagcagatatggctatattctcttcgctctgacccacaggttgtgggctgtcgaggaatttgataataacattcataatttctgttgatttcatatatgtaatactcctatttcgccaaatcgtccaaagattgagcgagattttgcaagaaacaaatgccatcgtcctcattctcagg

SEQ ID NO: 4204 - DNA, 21050 bp, synthetic construct
  misc_feature 1..21050: note = Synthetic
  source 1..21050: mol_type = other DNA
ttcttgccttccaagatattgttgatgatcaacgggatgagcttctcggggaagtggtatgggccatagttgttggagcaacgtgtgatggatacaggcatgtgatacgtgtcacggtaagcctgcacaaagaaatcggcactggccttacttgccgagtagggactatgcgggcagagcggtgtcgtctcggtgaagtaaccggtagctccgagcgccccgtagacttcatcggtggaaacctgatgatagcgcttgccggctttccatgtgggatagccctgctcatccttgcccgtcacccaagccttgcgggcagcgtccatgaggttctgcgtgccgaggatgttcacgctgagaaagagctgcggatcctcaatggaacggtccacatggctctctgccgcgaagttgacgacatagtcgatgtcgttctcagcaaagagtttgtcgacgagctgacggtcgcgaatgtcgcctttgacgaagaagcaccgcttgtcatcaacatcatccttgatcgaaccaagattgcctgcataagtgagcgcgtcgaggatgatgatcttgatatcctcattcacatactttttatgcaagagatacttaatgaagtttgaaccaatgaagccagcggctcccgtaacgaggtatgttttcatgttgtcttgttatgctaaagattaaaccgtttcttgataaattgtgcgataaagagctcagtctcctccaaaccgagcaggctggagttgatacagagatcataactctccgagtgcccccactcctttcctgtataataattatagtaagtggcgcggtcctcttcgcgcgaatgaatatatttacgtgcttccgcgcgattcatattgtatcgcttgcagacacgctgaatgcgctgatcgaggtttgccgtaatgaagacgctgacagtgttcttgaagtcgcgcagcacatagtcggccgtacggcctacgaagacgcaactgtcttgggcagcagccttccggatggcatcgctctgaaactgataaagcgagtcttgggaaaagttgttcttatagaagttgttctcgcccatgagtggtacatgcaaatgaaagagcgacttgaggaagcctttctgctcatcgttctgctcaaagaatttctcgctgaatccgctctccttagcggcgaggtttagcagttccttgtcgtagaacttgcatccgaaggtgtcggcaagcatcttggcaatgattctgccgccggagcctatctgccggccaacattgatgatgatcttcttatctgtattatccattctcggacagttttaattgctttttgaatttccgcatatatgtcagcaacatgacgaaggccacattggcagcgatgaagtcggagacaggaagcgaataccacacgccattgacaccaaagaacagcgggagcgtatagagcaaggggaggaggaaaagcagttggcgcgagagcgagaggaagatgctgaccttcaccttgccgatgcattggaagaagttagtgacaaccatctgcagaccgacgacaggtgtgacaagcatatccacgcgtatggcgaacaccgacagttttatcagctccttgtcgtttgtgaagatacgtgcgatgtattcggggaagaacatcgagatgagccagccgatggtccagatgacaatggctgagaggatggcgagcttgagcacgcgcatcacacggtccaacttctgggcgccatagttgtaaccggctatgggctgcatgccttggttaaggcccatgacgatcatgacaaacattgtggagacagccgatgctatgccgtaggaacctacggagagatcgccgccgtatctgacgagctgattgttgatgaagatgatgaccagacacgcgcagaggttcatcaggaaaggggagatgcccacactgacgatgttctttaccagccgtctcttcagcttgtagatgcccggcttgaaatggagcagttccttcttgttggagaagagcttcaactgatagatgagcgccaaggtctgcgagagcaccgtagccgttgccgctccacggatgccccagtggagcacgaggataaagagcacgtcgagcgcgatattcatcaacacggtgaagatcgttgcagtcatggcctgccgcggcttgctcgccgcacgcagcacggcgttcatgccaaaatacatgtgggtgacgacattgccgagcaggataatctgcatgaagctgcgcgcataaggaatggtctccttactggccccgaaaaaatagagaatgggatcgagaaaaaggaagcagataacagcaaagccgaagccgataatgaggttcagcgtcacggtgttgccgaggatttcctctgccgataggtaatctttctgacctaacttcagcgagatagctgtggccgagcccacacccactgcggctccgaaggctccggagaggttcatgaacgggaaggtgatggccagccctgatatggcgataggaccgacgacctgaccgatgaaggcccggtcgatgatgttatacatcgacgaagccaccatcgcgatgatggcgggtagtgcatactgaaacaacaacttgcctacaggctgcgtccccaaggctaaagttgcctgcttattgtctgattcacttgacatgatatataagtatggtgcaaaagtaacgaaaatatttgggctttcgcatttttcacgctacttttgcaaaaaataattctcatgaagcaacatgcccttaccctttttgagctcaactcgcttgtcggcgaagtgatcgacacggctttcgaccatgcttattgggttgaagccgagctctctgaagcacgtgaggtaaggggacactgctacatggagctcgttcaaaaagacattttctctgctactcccgtggcacgggcttccgccaaatgctggaagtcgacatgggtgaggctcaaaccgaagtttgaacacactaccggacaggcgcttcatgccggcatgaaagtgctgctgctcgtcactgccaacttccacgcagcttacggtttttcctggattgtgcaggacatcgaccctacttacaccctcggcgacatggcacgcaagcgcatggagatcatcaggcagctcaaggcggaaggcatcttcgacttacaaaaggaactcacaattccaatgttcgcccagcgcgtggccgtcatctccagtgagaacgcagcaggttacggcgacttctgccaccagctgttggacaacgagtatggttttgcctttcacatccggcttttccccgccgtcatgcaaggcgaccaagtggaggcatcggtcatacaagcactgaacgctgtctacgatgaggtggacgattacgatgtggtcgtcatcatccgtggtggcggagccacggcagacatgagcggcttcgacacgttggcgttggcggagaacgtggccaacttccccttgcccatcatcaccggcatcgggcacgaccgcgacgagagcatcctcgacatggtgtcgaacacgcgcgtgaagacaccgacggcggccgccgcgttcttagttgacaatctggttggtgtatggagccatatcgacggcctgcgggagcgcatcgcaggctcccttcggcagcgcatggacagagagaagagccggctggcgcgcgtcgccgaccgcatacccatccttttctccctcgtcaggcagcgacaggaggctaagatcgacagggcactcaacagcatcgtcacttccgtaaaggaacggatggcgcaggcccggcatcatgtcgccattttagaaaacaacatccaaccgctaatagagcgaaagatgacaaaggagcagaaccgtttagagcaactgaggctgcgtgccggggcgctcgacccacaacgactgctgaaacggggatacagcatcacattatataatggtaaggcactgcacgacccggctttgcttcaagagggcgaccggatagagacaagagtagagaaaggcatactcgaatcaatcattcataaagcttaagattatggcaaaaactgaaaagcaagaacccaaatatgaggaggccgtccgacagttggaggctatcgtagagaagttggaaaacaacgaactggacattgacgaactgtccaccgaactgaagaaagcgcagcaacttatccaactttgcaaagacaagcttacaaaaacggatgcagagatcaagaaaatattagataaagaataaattatcgtacatttattatcaatttattattattattgctaattttgcattgaattaatagaaagagaatttaaacatagatattatgaaagatttagattgggggaatttaacgttcggctaccgtaagaccgactacaacgtgcgttgctattatcgcgacggcaaatgggggaagatcgaggtctgttccgaagagtacatcaacatgcacatggctgctacctgcctgcactatggccaggaggctttcgaaggcctgaaggcttatcgttgtcccgacggcaaggtgcgtatcttccgcgtgaaggacaacgctgagcgcctgcagtcgacatgcgacggcatcgtcatgccgaaggttccgacggagatgttcgaggagatggttaagaaagtggtacgcctcaaccaggattacattcctacctatgagagcggcgctacactttacatccgtccgctgctcatcggcatcagcccgcaggtcggcgtgcatccctccaaggattatctgttccttatcttcgtcacgccggtgggtccttacttcaagggtggcttcgcctgcaacaagtatgctatcgtacgcgactacgaccgtgccgctcctttaggcacaggctgctacaaggtcggcggcaactatgccgcttcgctccgtgcccacatgtatgctgcgggcaaaggctatggctccgagttctatctcgacgccaaagagaagaaatacgtggacgagtgcggtgctgccaacttcttcggtatcaagaacaacacctacgtcacaccgaagagcacttctatccttccctcaatcacgaacaagagcctgatgcagatagccgaggatctcggcctgaaggtggagcgccgtcctgtacccgaggaagagcttcccactttcgaggaggccggagcctgcggcacggcagctgtcatctcgcctatctctgagctcgacgacctcgctacaggcaagaagtaccacttcggtgacaaaccgggaccttggtctacaaagctctacgagacactccgcggcatccagtatggcaccgtggaggacaagcacgggtggacaacagtggtcatcgagtaaacaatcacatgatattctttaagtaagggcggtctgaataccgcccttttcttgtttctattgtgtgatgcggtcattcagactaaaccaatagaacctggttcttcttgctgtgatgaatgcctgaggtacgaaggtcaaaaaatatgcgctccaacgcttacatacttatgcctgaacttctcgttcgactggtatcgccgcgacacccgcgacatgctcacctcgggcgaggtgaagccagtcgtgctcggtgcctccgtaccacgcgagaatgccgccaacctgaagaccactggatgggagtttccgtagagtggaacgataagctcgacaacggcctctcctacaatgtcaaaggcgtgctgagcgactatcagtcgaccatcaccaagtacaacaaccccacgggactcatctctcagtactatatgggccacaagataggagaaatatggggaaatcatcggtaactccacgcaccgctatgcctatggcatcacagttggtgccgaatataaaggctcctgatcatgctaattattcttaaagtattctaaatcaatgatttcgtgtcttactaagaggaaaaagtccgcctttcttcccgccatcgtaaataatgaataagaatgaacgttcgtaaatcttgataaagttgacaagtctttactcaataaattagtattctattatcattactcacgttttatcatcattgccaaaaacgaagtttcctgctacgttattgagtaacaactaccgacagaaaatctgacaatataacaatagtaaaagtgttttgataacagctgttttcctgccatttttgtaacgtagtgggaaaatggcgggaaagtcccataccgataatggcgcagacttcaatgcaatcgttgtctgcgccattggtagcataatggggataagataatgccaaggctaaatagcttggaaacgagacctctcctttataatctaccgattatgccatttcctttataatagtataatctaacgacagaaatcagttctggcgtcgaacacaatgttgacatttctgccagcataattaagaatgagatccttaatcatttttatcttttacaatccattctccctgtttcctaccaccgactcgttccaacaagcctttttcttgaagccttgcaatggcatacttcacgccatcttctgtaatgtcgcctaaggcttttgaaacttctaatcgtgtggcctgtggatatactctcagatattccaaaattttcttttgggtagaatcagacttcttttgggtagactccagtttcttttgggtagtaagctctcccttatgggtagaatttatattcttttgggtagtatcttttcccttttgggcagacctccaaacggtaaccttgaattgatcagcagattcttggttgtcgaactcaatcggcgtgttctcacgcatcacacggatgatacctgagcctaagccacgatagatcatcgtttttgctgccaactctgccattaaaggattgcgctgccgggagacgcccaatttaatgtcttccaccctaagtccaccatacagacaacctggattaataatctctacccggttggagaagatcaataagcgaatagctgcatggttaagcaagtcgaaatgcaccaaggcattctgcagcagttcttcgagtgcgacttcggatatttccagaatgccagtcgagttgaagttctgccctctttgctcatgtcgtaaataagatttgaggaaagccattccctccttgaacatccttggaagtgttcctgtaatatcgcggctgtccaagtagttggtatcgcctatatcatttccttgaaaagcaacggctttaagaacaacagaatgctcaaagcgttgtggatcccgaccgaagaacagcataccggcccgtgtgacctccccctcggcagtcagaatacccaaggattttaacatgctttccaaaggctggtcaaagtcttcaatctcacgaccatacaccctcctaaagaaatcccttaagtcagccatttccaaatcgtcaacggttgtgtcattttccggatcttcttccgggtgataatttccagaagactggaacaaactgagaatttccgcattctcggttatccgtcgtttgtcagccccttgcttcacccatatctcaccttgcagattcttgtagggcttgttgcgcccctcttcaattgaacagacgaggacatgcttgccttcaacctttacgacttctgtttcgatatatattgttggctttaccagctcctgagccgcattaccaagttctctgcttgtctgttgtatctcgacgtatgacaagcctttgatgactcctgtcttgtcttcaaccccaaacaatattacgccacccttcgtattggcgaaagcaatcatctcttttgccacttctttttgtgaagtgaacatctccttgaactgcactcttgtagtttcaccacaaagacaaaggtcttttaatgtatctgctgtcatgctaccctctattttcgacggttgtaataagcgtactcacttctacgttcaatacgctggcaatttctccaagttaggccaaggaaggctgtgtcttattgctgcgccaccgggagacggtgttgggcgatttgcccaattgctctgccagccaaccgctctttttatcgtggtcggccagtacagcttttatcctattgcggactgttatgccttgtttgttgtccataggtataatttttagctacttttatcgcaaagttacacaattgtatgtattatacaaaatgatagataagaaaatagttatgtgaagactaaaaatcatcatttagcggtgaatgttcagcaatgacgataacgcgacaaagcataacggtgacgtgacacatatgagacagaatcgtgacacggacgtagtaggatcgtgacacggatgacgtatcatgactttagccggtggatggtgaaccggtaccggactaagcttgaggggtacttgagccgtacttccttactttgtcaatgcgccaccctatcactataaagcatcgacaatgcgattgactcaaaccgtattaacctgagttcgggataagaaaagagtcttaaaagtttgataatctcgcataattttattatatttgttgttgtaaatcaaattgttacaaagatttaagcaataagaatcatggagattaccaaggacaatattacagatattttctgtattattgatgatttttgcgaagaatatgacaaagatatcaaggatctattcccacgtcaactttcgtataatcgttttgtggaattggagtcacgtgtgtgcttggagatgatgctgttcctacagttgttctgctttggcagatgcacgggcataagtttcgtagacagtacatgtgtgccggtatgccacgataagcgcatcaccagaaacaaggtgttcaagggctatgcagagataggcaagagcaccatggggtggtactttggtttttagttacacctcatatgcaacgaaagaggcgagctgctcaatttcatgcttacaaaggccaatgttgatgatagaaacgaggatgtatttaaccgtctgagtgacaatgtattcggaaagttgtttgcagataaggggtatttctctcagaatttgttcgatcgtcttttcaatgacggcatcaatctggtaacgggtctgaagtgcaatatgaagaacaagctgatacctctttatgataagatactgctgcgcaaaagatctgtaatagagacaataaatgacgaactcaaaaacgtggcacaactggtacactcccgccaccgaagcgtttataatttttgtatgaatgtcctttctgtattggtggcatacagcttcttcgagaagaagccgtcaatcaatatagactactgtattgatgcaaacgacaactgccttccaattttaaaacaagcagaaatattctttacatgaatagatattgttcatagctatctggctgtggaccgaatcatcacgtccatgaaagtaagattcgtttctatacaagagacttaacttatcccgaactcaggtttaaagaattctgaaattctcaagcattagatgcaataatttagcggatgttagtattctgatcatcgattgaaaacgaataggtatggagcaaatggccaaaacttcaacgatgagtgtcctactcaccgcacctcatccgttggcttggttcgtttgcttctgtcagagtgggttgcgcgatgtcgatggatatacaatgcagactgtaatcactcgttacagtgccaaggattaagccgtgttctctgtcttccatagttttgtcatggacttctttgtctccttccttggcacgtttttctgcgggatgtgatggtcttgatgttgaagttcaaaaaaactcccaccgaagcgggagtataggataacatccttcggcattgctgccttattgcgataagatgtaggatttatttttcttatctgatgcaaaaataaggaaaatatttgtagttcccgacttttgttcttaattttacggtaatttaataatgtaagcctatatatggaaagaattctcggtttagacacaggtaccaacagtttggggtgggccattgtcgataaatatgatgatggtcattatgaacttttagacaaaggtgtagatatatttcaggaaggagtaaaaagagaaaagaataaagaatcttcgaaggctgctgagagatcaaatcaaagagcccttcgcgtgcgctactatcgcatccgtttgaggaagattgcccttcttcgtgttctgtcggagaaccatctctgtccacccttgagcaatcaagaactttcggaatggcgacatcataagatttatcctaagaacgccttgttcatgacgtggcaatctactgacgacaaaacaggtaagaatccttatcatgacagatatgtctgtctgaccaagaagttggatctcaccgatcccgcaaaccgcttcatgcttggtcgtgcgttgtatcatatcaatcagcgccgcggcttcaagagcaaccgtaaggatctttcacgcgaagacaaggatacaggtactgtaaaagaaggtatcagtgaattgagtcaggagatcaagaatgccggctgtacttttctcggagaatactattataagctctatgagaaaggtgagaagatacgtaagcattatacagcgcgagaggagcattaccataaagaattcttggctatctgtcagcgtcaggggttggattcagaattggtcggtaagctggaacgcgccatattttatcagcgtccattaaagtcacaaaagggacaggtcggtcattgtgtcttcgagccgaagaagacaaaatgtcctgtatctcatcctctttttgaggagtttcgcatgttgtcattcatcaattcgataagaattcaaactccacaagaccgcgccatgcggccacttactgcagaagagagaaaaaagatctcaccactgttctatcggaagagcaagaggagtttcgatttcgccgatatagcgaggaagcttgcggggaaaagcaaatttgccaattataaagaaggtgaagcaccttatctcttcaactatttcaaggatagtaatgtctctggttgtcccgtgacggcttcccttcgcgatcttttcggagaggactggctctccggtgttaaggaagtatatgatagggcagagggcaagacggacctgcaaattatcaatgatatatggtcagccttgttcttctatacggataataataaattagctggctttgcaaggcaacatcttcaactgtctgttgaggatgcagagaagtttggtgccattccccttgatgatgggtatgcagccctcagtctgaaagctatctgcaagatccttccttatctgagaagaggaatgatcttttctcatgctgccttcatgggcaatcttatcgaggtcttaccccaagagatttggaattttgaaaaccgacgtgaagaagttatccatgaactggaaactacgatagccaactatagcaagaacacaaatgcacgcacacttgagcagtgctttaaggatcatctgtctgtcaaatatggcatttccgatgagcgattggagaaactctatcatccatccatgatcgatgtgtatccgaaggtcccattgggtgtcaataagttaggatcaccatgcaacaatgcccttcgtaatccaatggtcatgcgctctcttttccagatgcgtcatcttgtcaatcatttactcaaggaaggcaaaatagaccggaatacgactgttcatatcgagtttgcccgtgaactaaatgacgcaaataagcgtattgcttgggctcagtacactcgtgacaatcagaaggatcatgacaactgccgaaagaagattgtcgaactctttcaggaagctacgggtgagacaatagtgccgacggatgtggagatccttaaataccagttatgggaagagcagaaccatatatgtatttatacgggaagggagatcggtattacagaattcattggtcctgaaccttcttatgatattgaacacacgataccccgtagtaaaggaggcgacagtacgcgcatgaacctgacactttgcagcagtaggtttaaccgtgaaatcaagaagacgatgcttccatccgagctctctaatcacgagcttatccttcatcgaattgagggttggaagaaaaaatatgaagatttggatagccagatccgaaagatacatacttggagcggaatggagaaagttctaaaggataagaaaattcagaaacgtcatctcctccagttgcaacgtgattattggtatggcaagtatcaccgctttgagatgacagatgtcccggaaggattcagccgtcggcaaggcgttgacaatagtgtcatctcccgttacggccgtctctatctgaagtctttctttgatcgtgtgttcatcatcaagggactggcaacttctgatttccgtaagatctggggattacaggatgcatacaccaagaaagaccgcgtgaaccatgtccaccattgtattgatgccattgtaatagcttgtattggccctcacgagtacagtcagctggcatcctattatcatgatgaagaaaatcatgaatggtatggcatgtccaagcctcatgttgcattgccttgggattcgttcgtgaccgacatcaaggatattcagaacgagatctttgtagtccatcatacaaacgataatattcgcaagcaaggcagaagagttaaacgaaaagatggaacgaaagctcaaccttgcgacagtgtccgtgttcagcttcacctcgatacttattatggggctattgaacaaggcagtaaactgaagtatgtggtcagaaaaacattggatgccaatttcaaggaaaccgacatcaagaatatcgttgacgctaccgtgcagaagaaagtgcaagaggctgtcgaccggcttggctttaaagaagctatggcatccaccatctggatgaatgaagagaagcaggtaccgataaagaaagtaagatgcttaatagctccatctagttctcctaacattcacatacgtcaacatcgggatcagtcagacaaatcgtataagcgccaatatcacactttgaataaagagaattatgctttagctatatatattggcaaggactcgaaaggtaaggaaaggcgattggccaagatgattagttatatgagggctgctgagtattttaaggccagccataagcattcggatacagatgcattggtcagaacttctgaagatggttgcttattaaaatatctgctcaagaagggtatgatggttcttccatatgtagacagtcctgatgaattaaagtcttgtaataaaaaagatcttgtcaaaagattatataagataacagggctatctaccagcgctccctcttataaaatagaattgacttttcatgaggaggctcgtccaagttcggacataactcctaagtttggcgcatactcgtcaggaaatgaaattgctcctaaaattgttatgcgttatactcagttcagagcccttgttgagggtgtagactttgagctaagtgatactggagaacttaatgtgaagtaatcatgctaaaacagaccttgttcttttcaactcctgtgcatctgtctctgagaaataatcagttggttgtctcatggaaagtttctgcggacgttgtaatgaggccaatagaagatattggctttgtcattattgaaaatcagcaggtggtagtatctgttccgttactgaacgctttggtcaagaacaacgcttgtgtcattttctgtgacgaaaaccacattccatcaggcagtttagttggatttgacatcaattcaactcaagccgagactgtaaagatgcaggtggctgtatctgagcctaagaagaaacgggcttggcagcaagttgtggaggcaaagataaaaaatcaggctgctcttttgaaatattataaaggcgagataacaagattgtctttgcctaaaatgacatgacggagattagacttaatgcttaccgtgtgatgtggctgttcgttttcttcgatttaccggtggtgacagctgtagagcgaaggcaggctatactgttccggaagaatttggagaaggatggattctccatgaagcagtattctgtctacattcgtcattgtgggtcaaaagaaagtcttgatgtgcatgttcagcgtgtcaagggaatgattcctaaggaggggaatgtaagcattcttgccgttacggataagcaatacagtaatatctataatttcacgaatgtgcagaaggatcataagaaaaaagtaaatatcatacgaaaagagcccgttcaactcgaacttttttagtaattttgaaccgtaaagatcctatgacagctacttctttagttagtcagaaggtgcaagttattgatatcaagagtcttctggaacttaggttgcggtttgatgtaggataaaggagaaatacaacacaatacctgtgcacgaaaaaatagacatgttgcggtttgatgtaggataaaggagaaatacaacggcaatggcgatagcgtagaagctatgcgggttgcggtttgatgtaggataaaggagaaatacaacgaccacggaaggagccccctcaaaaaactgttgcggtttgatgtaggataaaggagaaatacaacaaaataacactaacttatgatcatcgagggttgcggtttgatgtaggataaaggagaaatacaacaacaagaccgacattgctcctgatgaagggttgcggtttgatgtaggataaaggagaaatacaaccgatgtccatcactcgtactctgccgtttggttgcggtttgatgtaggataaaggagaaatacaaccggcgctgactgctctctcgctgcctcccggttgcgatctgatgttggttaaaagagttgtgcaacaacttggcttagatgacaccgcatgggctgtcccgcggtcagagatagagcgtaatccaaacttgactcagaacgacggttggaattagacagacaaattattaagaaaatgaatacattatcgaaaacattcatagctgttcttctaagtggtggagcttatgctgccatcgcttgtgcggccacagcttgttccgcgagccctataacaggcatcacggaagcgaagacgtacaggaatccgctcattgacaccagcctgcccgatcctaccgtgatccgggcccaggacggttgctggtacctctatgctacggaggacatcagaaacacgcctgtctacaagtcggaaaaccttgtcgactggtcgtttgtgggcaccgcctttaccgacgagacacgcccgaagtggaacccgaagggcaatctttgggcacccgacatcaactatatcaacggccagtatgtgctctattatgccaaatcggaatggggaggcgagtggacctgtggcatcggggtggctacggcagctaggccggaaggccccttcacagaccatggctgcatgtttaccagtgagcagataggtgtgagaaactccatcgatgggttctacattgaggacagcggacacaagtatctcttctggggcagcttccatggcatttatggtatcgagctttccgacgacggactgtcggtcaaagccggcgagaagccgaagcagatagccggcacgttcatggagggcacttatatccataagcatggtggttactactatcttttcggttctgcaggcacctgctgcgagggagacaggagcacataccgcgttacgtacggtcgttcaaagaatcttttcggaccttatgtggacaagcaggggcgacgactgctggataaccattacgaggtgatgattaaaggcagtgatgccgttgccggacccggccacaatgctgagtttgtgacggacgacttaggtcaggactggatcatctaccatggtttcaagcgttcggatcccgatgccggcagggtagtgtggatggatcgtgtagagtggatagacggctggcctcatgtggcagagaaccgtccctcgacagtctcagaaagtccggcggtcggaaatatcctgttggccgatcctaccatcttcagagacaaggacatctattatctttatggcacttcttctcccgacggattcctcgtctatcagtcgaaggacttgaagcactggaaaggcccttgtggggcttccggagggctggccttgaagcgcggggatgcttttggcacgacaggcttctgggctccgcaggtgttcaagatgaaaaataaatactttatggcttacacggccaatgagcagatcgcctttgccgagagtgacagtccgctgggcccattccggcagaaggagatcgcacaactccctgctaaggggaaagagatcgatccctttgtcttcttcgacaagggcaaggcttatctttatcacgtgcgcttgcaggacggcaaccgtatctttgtggcggaactgaataaggactttaagtcggtgaaggagaataccgcgcgcgagcttatccatgtcaatgctgacgggtgggagaacacgtccaagacccaatggggcgtgtcggaaggtccgacggtcatcaaggaaggcaagacttactatctgttctattcctgcaacgatttccgcagccccgattatgctgtcggttatgccacagccgacaatccgttaggtccttttgtcaagcacggcgaaccgcttatcacgcgccgtctgatcggtgctaacggaacaggccatggtgacttctttgtcgacagggagggcaagatggaatatgtgtttcatacgcatgccagccgttcacaggtcagtccgcgtaagacagccgtcgttcagcttcagtttgacggaaaagacttcaagattgttgaagggacggaccgatacctgaggacggacgaatgaccgtaacataaattagggacattattcgttatccaagtggagcgatgccgtgttcggcacgtcgacttgtccgggtggtggggaacggtgctggtcactggttctccaccacttttaagtagctggcggatcctgcctcatccgtgtcacgatcctgcctcgtatggggcaatgacaccattatgcttttcttgttacaatgggagcagggatgttacggtattgttacttttctcaaaagaaatctaaatggaagcgagccggttaaactttagcgtcttttctgcttcaaacaatcagtcgcgacaagaatattaacagcgaatacgggaaacgtattccatcaacaagaaagattatgaagaagattatgttcacaatggctgtggctctgatgatgacgggcgcagtcttcgcacagagtagtaacaagcaaggcgagaagcctacgcaggaacagatggcgcagcgcatgacggaacggatggtgagtgcctatggtctcagtgacgctcagaaaaccgagttgttggcgctgaacaggaagtatgcgggcaagttccctatgggcggtcagcgtggcggtcgccgaaatggtccgggcaggaacggcaacgcacagacaggtgtcaagacagacgctcagaccggtgctacccggcaggctatgtctcaggaagagcggacaaagcatcgtcaggagatgcaggcgaaccgtgaggcttacacgaaggagctgaaggcgatcttcaccgatgctcagtatcagaaatacacggaaaacgaaaagaaccgcaggcagcaacgccgtgagggttcctctgtaaataaagagtaagctaaatacaagcatacccgcttcaacggctcgcgcctgtcgaagcgggtattgcattttgtaacaggcgtgagtgcgtgtcgaatcgggtatgactgttttgttgccggcttacccgtcggcaatctatttcgttgtcgggtttgacttcaccccgactattccggcaaacttgtcgtcaagatagaatgttgcagtgagcgtatctttcttgatggcgtacttcaaggtgatcatattgagccttgccgtgcggggctggtacttgatcgggccttttaccaatcgcgatgtttgggctcgcttgtgcatggcctctaacatcgagtcggtgagatggagcgtagagtcgacattcgaccaggcgatgtagtcgacatcagtcagcgccatctgctccgacatgaagtccttgacatgtcctttcgccgtgtagctgttgccgcacgacgagaagacagccaacatcatcaggaagcccagacctgcacaaaacattcgactggacttccgaacttctgtactcctgtacttccgtccttctgaacttctgacaatcatttcttaggaatattcttcagtatctcaagaagatgatcccataccatttgtacggtcgggatcaggaggcactcgtcgggcgtatgcacgttgtgcagtgtcggcccgaagctcaccatgtcgaggttgggatatttctcggagaagagtccgcactccagtccggcgtgtatgccgcgcacgacaggatctttgccgaagagcttgcggtaagcctccttggcgatgcgctggagctgagagccatgcttcggctgccaggcggggtagccgtcggtctgctccacatcggcaccggcgagctcataagcagcctttacggtgttgcagatgttcgtcaggttcgacgtgacgttggagcgctgcgaacttatcaccacgaccttgtcgtcctcgctctgcacgcttgccacgttgcttgaggtctcgaccatccatgccaattccttgtcctgacacatcgcgaagaccccgttgtcgacagcctgcaaagcactgatgaggcggcggctgacatcctcaggcatgaccttctgagcatcgcagctctctaagctccactccatgtgtgtgtcggtgacatggtattcgtcctcgacctgtgcggcgaaggtgttccagtcggccttcacttcttccttcttgccctcgggcacggcgaagatgatcctgccgtcgcgcgggatggcattgtgcatcttgcccgagttccactgtgccagccgcagcggcatctttccctgctccgtgtagaggaagcgggcgaggaccttgatggcgttggcgcgtttcttctcgatgtcgtcccctgaatgtccgccgttgagacctttcagcgagccttgcaggaagaagaagcccttcggagcgtcctctctctggaaacgaaaggtagcgattgtgctgcggccaccggcgcaggagatgaagatctcgccctcgttctccgagtcgaggttgatgaggtagtcgcctgtcatgaatccgggcttcatgccgatggctcccgtgagctgcgtctcctcgtcgcgtgtgaaggcacactcgatgggtccgtgctcaatgtcgtcggaggcgaggatggcgagctcgatagcgtcgcctataccgtcgtcggcaccgagtgtcgtccccttggcgtgcagccagtcgccgtcgacataggtctggatggcgtccttggagaagtcgaagtctacatccacgagcttgtcgcagaccatgtccatgtggctctgcaggattgtcgtggcacggtcctcataacccttcgtagcgggcttgcggataagcacgttgccggtttcgtcgactttcgtctccagaccgtgacgcttgccaaagtccttgagatattcaatcatcttctcctcatgcttcgatgggcggggtattttgttgatagccgcgaattgttcaaacacgcgggcgggtttcaattctgccatattcttttctcctttaataataatattttataataataatcctttttattgcgttatctctttgcagtttgttcttttaacgctatctttgcaagcgctaaggttacaaatgctgtgcaaatttaataaataatgatagaaacgttactccttacggtgttaattattgctatagccatggcacttctcagcgtgaaggtgctgctgacgaagaatggcaggttctcctccatgcatattcatgactcgcaggccatgaaggaccgcggtatccactgtgtcattgatgaagaccgcgagatgcgtgccaccggacgtttcagataaatcgtttaaggagaataagacaattaagataaaagacaaaaatatgaagaacaacattctcttcgcggtggctattgctgctgccacaacattgggcttcacttcttgcaacaagagtgcgcctaagatggacgacaagacagaaccggctgagcagaaagctccgagcaacaagattgcttatgtcgaggtcgactctatcatgactcagtatcagttctgcaaggagtacaccaagatcctcaacctcaagggcacgaacattcagaagaccctcgccagccgccagcagcagttgcagggcgctgccgccaacttccagcagaaggtgcagcagaacgcttacacccgggagcaggctgaggctatccaggccgggctgcagaagcagagcggtgacctgcaggcgctcaaccagcggctgagcaatgagttccaggccgagaccgacaagtacaacaaggcactgcacgattctatccagcattaccttgcctatttcaataaggatcacaagtatggtctgatctttgccaagcagggcgacaacctgctctatgccgacaaggcttacgacattaccgctgaggtcgtcgccggtctgaacaaggcttacaagagcaagctcaatacgaagaaataagattaccggtaaaaccgtattgtcaggagggtgcatcacaatctgatgcaccttttttgatggttgcgctcttttctactccttgaagcatactaccttggcgaggggattaaagggaagaattcaagaggataaaggggaagaattcaagtgaataagggtgccaggcttcttttttttaattttcttctcaaattatttggtagttccaataattagcagtacctttgcactcgcttacaaaaaagtatggctccgtagctcaactgaatagagc

SEQ ID NO: 4205 - DNA, 20583 bp, synthetic construct
  misc_feature 1..20583: note = Synthetic
  source 1..20583: mol_type = other DNA
aagagtttcatctggaagggtcagtacttcgagttggattctttcgagtctcccgctccaggattggtcattctcgagaccaagggcattgcgaagcaagagagtgtcaagtttcctcccttcatccatgtgaaagaggacatcacgggcaatacacaatattataattataatatcgctttgaggaagtagttttttaaagcttttgcccttacagggcgcattgcagactgacattatacccagggcgttgccctgggctaagagcttctgccccttcagggcgtgcagggtaatttcaatcctacaggagggcgtattgggtaattaaaagtccatataagcaacacgccccgaagaccaagaagctcacagaaatagcacgccctttacctttcccttcggccggtgaccgttggttcagggcgtgctgctatgggcttcatggccttcctgcagcccgtaagcgattcatatccatgcggtcgcataccgcaaaatgcagctccgctgctggcgaagacctctgatggtccgccaaccttatagcgaagcggtttgagcaccgagtagggcggtttcctcttcttccctgaggggagaagaccgagatgagaggtggaccctcccttaaggttaagggaggactggtgggttttcgaaaaatccctcattaaggctaagggaaatactggcggtttttcgaaaaaaaatcgaaagaaaaacatattaaggctaattaaggataagtggagtttcgagaaacaaaaacctcgtttctctaaaggaaaaagagaaacgaggtttcattatcactgttacattgggaacaatccgaagagttcagcgtcgatttgatccgtcactttgcggaaatcctcaggattttcctcaaagtgcaagttgtcgccatcaacgatgatcagctttcccttataccccttgatccattcctcgtagcggtcgttgagcccctgcagataatcaatacgaatactcttctcgaagtcacgtccacgcttctcgatatgactcacgagtgtagggatgctgcttcggatatagatcatcaggtcgggcagtttcaccagactgatcatcaggtcgaagagatcagtatagtttgcgaagtcacggtcgctcatcagtcccttgtcatgcaggttgggtgcgaaaatctttgcgtcctcgaagatagtacggtcctggatgatggtttccttgttctgtgctatttccaccacgtcgtggaagcgcttgttcaggaaatagatctgcaggttgaacgaccatcttttcatgtcctcgtagtagtcagcgaggtaagggttgttgtccacaggttcgaagtttggcttccaaccgtaacgtttactgagtagtttggtgagcgtagtctttccgcttcctatgttgcctgctatagctatatgcatttctttatttattttttatgatggttattatttatgttactttagaagataaaggagttaagggagttaaggagttatcgctcccttcggtcgctgaggagttaagacaaatgccttgagggcgatgtttaaagtttaattttaagtccactaaagcatttgtcttaactccttaactcctgagaaatctcctttaacttccctcctccttcgagaagagtccgaagagttgcgagtctattctgtcgacgatttcgccaaactccctggggttgtgttcgaagtcgaggttatccacctctatgaccagcaccttacccttgtacttcttgtatataaactcatcgtacaggttgttgatgccctgcagatagtcgatgggcatctgctgctcgtagtcgcgtccccgcttctgaatgttctttactaagtgcggaaccgaagctctcagatacaccatgagttcaggcattttgatcaccttcatcatcgagtcgaagagtcccatataggtatcgtagtcccgctcgtccatgttccccatattcttgttgttggtagcgaaaacatacacgccctcaaagatggtcctgtcctgtatgatggtctccttgctcttttctatctccaacaggtttttgaagcgctgtttcaggaaatacacctccaggttgagcgcccatctcgagatgtccttgtagtagtcgtcgatgtatgggttatcatctacaggctccagaaatttcttccatccataatgctttgcgagcatattggtgagtgtcgtctttccgctgccgatgttgccagctattgctatgtacatgttatgttgttataagtatattatcaatccgttgttatgattctttcgtaaacttctccacgaactggtcttccgtgatgataggaatgcccagctgctgcgccttcctgttcttggtgcttgccgaggcagcatcgttgttgatcaggaaggacgtgctcttgctcacacttcccgtcaccttaccgccctgttgttcgatgtaagccttcagctcgttgcggttcttgtagtggtgcacgtcgcccgtcaccacgaaggtcagtccctcgcacatcgaacccttctcctgaggctcctcctccctgatgtcgagttccttcaggagtcgctgcaccttaccgaagttcttgttgtcgcggaagaagccgataaacttggcactcttctccggtccgataccctcgatgtttgccagttcatcgtcgaagagagccgtgcgtgccacctcgatgagttttgccaccggatattcagccagcagtctctttgccacatctccgccacacagcggaatgttgagcgcatagagcagatgacgaccgtcggtggtacggctcttctcgatgctttccaagaggttgtgcaccgacttgcggccgaacccctcgaaggtagcaatctggtgactgtattgcgacagatgatagaagtcggcatattcgtggatgaaaccgcagttgataaatcgcgaaaccgtctgttccgagataccctcgatgttgatgccctccttgctcacgaatcgtgagaacttcttcagctgcttggccgtacagtcggggttggtgcagtgcagcgtcttcgtgccgctctcactctccgtcaccaccgcctgtgcaccacatacagggcacacctcaggcacctcgagcacacccaccttctcagtgatgcgaatcaccttcggtataatcttgttggccttgatcacctgcagacgcgtacccttgcccccgatgcccagacgctcacactcactgatgttacagagcgaggcacgctgcacggtagtaccctccaactccacaggcgtgaagacagccacgggcgaaatcgtattggcggcacacgaccattcaatgtggtccagagtagtgtcggcatgcgtgtcctgccatttgaaggcatagcccgcacgtgtagcatgatggcctgtcaccgaccccgtagcagcatacaccgtatcatcgtaggctatcaccagaccgtcgacagggaaggggaacaccttgttcgtcaccttgtgggtgaagagatccaccaccgcctggatattctcagcagtagggtggtcgatgcgttcgcgctccacggggttgaagcccagcgaaacgaggaagtccatcctctcgccccacgaagtgatgtcgtgctccgtatatactaaggtaaagggaatccactgcagatgtcgtggcttcacctcctcgatgtccttcagagccagcgaacccgaggccaggttgcgtggattagcatagtcgccctccgtctccaacacaaatcgctcgaagtcaggataggagatcaccgcctcgccccgaatcaccaggtgtcccatctcgtctatctgttgaggaataccagcgatggcaggcgccagatgagtgatgttggtaccgatatgcccgttgccacgagtcaccaccttggtcagcctaccgttgtcgtaggtcacgacgagagtcagaccgtccagtttccacgacagccagatacaccttccgtcagcccatttcaccagttcagccacactcttcgtcttggcaagcgacagggcagggaactcatgttcctccttctgtcccgccacgttgtcttccgacaccttggcagtaggcgagtcgggcagggtgatacccgtttcctcctccatcagtttcagccggtcgaacagagcgtcccattcgtagtcgctcatcagttcccccttaccgttatagtaagcctccgaggccaggttcagtttatccacccattgcctcatcagcatttcttgctgtgtcatatatatattaatatttatcttactttttcaagtatggaagttcgataagttaaagaagcttccccggttagcaaaagtaaagtttccattgtttttgcaaaaataggaaatagttttcaattagccaaacattcttactcttttcactgatttcttaataaatatttggcagtctcatagaaaagccatacctttgtcgagtctaagaatttcaattcaaataacacaaagacatatgttccgactgaagacattaacgatattaggcagcaaggccgagctatccaccctccccgagggcaagctgctcatcaatacgatcaacgcccattcctacaacacagccctgaaggatcccctctttgccgaggccctgtcgtgtggcgacgtactcatccccgacggagtgagcatcgtgaaagcctgccgatggataggagcgaagtcgcagcctcgtgagcgcatcgcaggctgggatctcttcgactacgagatgaaccgtcttgaacgtgagagtgaagcatcaaccgccaaaggcgaaaggcctaagacagtgatgtttatgggaagctctcaggaagtacttgacctgatagtgaagcgagccgccgaagtatatccccatctcaaggtagccacctattcacccccttacaagcccgagttcaccgacgaggacaaccgcgccatcatcaccgccatccatgcctccaatcccgacctgttgtggataggcatgaccgctccgaagcaagagaagtggacctattcccactggtcagagctcgacatccactgtcatgtaggcaccatcggagccgtcttcgacttctttgccggcaccgtagcgcgtgcccccttatggtggcagagccacggtctcgaatggctctaccgtctcctgaaagagccccgccgcatgtggcgtcgttacatcctcggcaacaccctcttcctcaagaacatgttgaccgagaaactctccaaataacccttggcagcaatcaccagcccccagcaagcatcgggcatcacgcaagcactcagcaagcatcaagcaagcacccagcatcggacaagcacccagcatgagcatcaagcatcgagcaagcaacccgcaaccaagtccttgagtgaaagcgggttcatccccgcacaaaaaaccgcagctctgctgctggcgaagacctctgatggtccgccaaccatagaatgaaatggttacgagcgacgaggagcggtttcctcttcttccctgaggggagaagaccgagatgagaggtggaccctcccttaagggtaagggaggactggtgggttttcgaaagaacttaaggctaagggaaccctggtgggttttcgaaaaaaaacactattatgtcaagaaaaagcaaatataaatgcaagaaatgcggctacgccacggacatatatgaaggccgtggcttcatgggccaacacatagaagccatgacctgccccgactgccacaacatagtcccccttgttgtaggcggcgtcataggagatgccgcccccagcttcaactcccttgtaggcagactctgcctccgttgcggatccgaccgcatacacctctgggatcaccacacctgcccccgttgtggaggcgagatgcaacccactggcgactccgaattttggacgtaagaagccgcaaagcagcctgtctgtattattccaataccataaaacatcagtttctaattttaaaatatgtgaattcttcttctttttagacaaaaagcattacttttacagctaaaaaatgcactaaccactataatcctgcctcatattttaaaatgtaagaattatacaaagtagtgtgataacgatattattttgtaaatagtaaattatgtcgaatatcattttaaatcctggtgtttacgaaacactgatttcccaagcaatccaagacaagctcgatgaattatccgagtctaagttcttggttaagaaagagaatattgacagcgcagaatcttataagatgctggctgaatatttgacggaaatagtttcaggcatcttaaaaggttatttcaggcgcaaagatgccaatgatacgatttctgcacaagtagaagtcgtcaatcgtattcttaaatttatagaacacgaatggaatgctgagggaatagaaaccacaccagatttactgtcagaagaaaacaagctgttttttcttcgaggcatttatgacaaggtgggatataccaatgaacaaatcgcagcgaaagtcaagaaccaacccatttctggatatagagtaagcaatctgtttacaggtggaaacgatctttctattgatgaagaaataagacgagatatccagacagcagatgaaatagatctgttagtctcatttatcaagtttgagggtctacgactaattattgattcactacgtgagtttgttcagcgttctgggaccagattacgagtcatgacaactacttatatgggtgccacagacccaaaagcagtgcgaatgttgtatggtcttagagagttgggcaatgttgagatacgtgcatctttcaataccaagcaggaacgtttacatgctaagtcttatatctttacccgtaaaacaaatttcgacactgcatatattggttcgagcaatctcagccggtctgctttgactaagggattggagtggaatttgcgtgtcacgaccatagagaatccacatattatcaataagaccaaagctacgtttgatagttattggaatagtgatgattttgagaagcttgatacagaagaagcgcttcgtcgatttgaagaatctatctggaacgagcgccatgtcagctatggtcagcagacagatagtgaatacgttacacgttttgaacgtaagactcatcagataaaggtgctcgagaagttgcagtttgagcgcaacattgttcatagttataaaaacctcatcatagctgccacaggtacaggcaagacagctattagtgcttttgatttcaaagattataacaagaaattcaagaaagaacatggacgaaatgcacgattattgtttgtagtgcatcgagaaaagattctcaatcaagctcgcagtacttattgctctgtcttggtagacagtaattttggagagatatggacaggtaagacaaaaccaggttataatagtagtcttgaacatctgtttattaccatccagaccttgaataataactgggacacctttgaacgtatgggaccagattattatgattacatcgtcatagatgaggtacatcatagtgctgcaggtagttatcgtgagctctttaatagatttaagcccgagatatttgtaggtcttactgctactccagaacgaatggatggcaaagagattcgccccgatttcaataatcgttttgctgcagaaatccgtttgcaggaagcgcttaatcaacagctcttgtcacctttcgattatttctgtgtcacagacgatagtgtagacttgagcaggcttgcctgcaaaggcgacaaatatgatgtatcccagctaaatcaggtgtataataacaatgcacagcgttttggtattgtacagaaagccttggacaattacgtgaatgatccgcatgaatgtaaggccgtttgtttctgttgtagcatagatcatgctaattatatggataccatgttccgaagtcatggatacaaatcaatggctgtcacttcacgcaattcctcagagttaagccatgcctcaatgatgcttgcacatggagaaatcaactatctctgtgtagcagatatcatgaacgagggtgtcgatattcccgagatagatacagtcttgtttttgcgtcctaccgaatcgttgaccatattcttgcagcagttgggtcgaggattacgattggctgatggcaagacctgtcttacagtgctcgattttgtagctcaggccaaccagtcgtataattatgagagtcgttttcgtgctctcgtaggacgttcctctcagagtatagagaaggagataaagaatggctttatcttcttgccacgtggttgtaccatcacgatggagaaacgagcacaatcatatattcttaaaaatattcatgaagccatatttaatctttcccggttgagaagagaatgtcgttctttcactcagaacacggggcaagagcttacttatgagaacttcattaataactttgatcttgactggcgaatcgtctataaatcaccggggtcgtgggctcgcttaaagaagcagtcgggcatagatgtgcccgactttgatgagcaaagcaagtacacgaagttgttggaaggcggcttggctcgtctcttccataccaacagctatcagtatcttgaatatcttctgaaactgataagcaacggaatggttcatccctcaaatgccacggcacgagaagataaattcttccagttgttctattatactgtatggatggatgacattcaaaaagtaaacaaactatatcagcaatcttttgcgagttgttctgatgctgttcgttccgtagccagtcttaagtggtttatggaggaacttagttttatggtttcacttcgtcatagtcagttgaaccaaaccaccaactggctaaaggtagatgatcaagctgaaatagaactctatggctgctatagctcagacgagattcacttactcttggagaataaactgggacgctggcaggtattgggcacacaatataataaggagcgcaaatttgccatggtctttgtgacattgaataaatctgataaggaatattcgcccagcacactatatgaagattatgccatatcgcccgagcagttccactggcaatcaatgaacaaagttcgtcagaatagtgaagagggacagcgtatcattcagcagcgtgagaatggatggaagttcctgctctttgtccgtgattcaaagcaggacgaatatggaatgacaaatgcgtactattgtcttggatttatggactttgacagctgtcataatgaatgccctatgaatgtcatttgggatatgcaacaatctattccaggatttattcttgaatcggctaaggctgtataacgacacgagatatgaaacaaatagaagtagttgccgccatcatctgcaatggcggcaaaatatttgccacccaacgaggatatggcgaatggaaagactggtgggagttccctggtggtaagatagaaataggagagagccccgaacaggcactccgtcgtgaaatacgcgaggagttggctacagaaatatccgtaggtaaattgcttcataccgtagagtacgattatccccatttccatctcacgatgcattgttatctgtgtaaagtagagagtggcaacctcacccttttagaacatgaagcagccaaatggttgtccttagataatctgcaaagtgtcaactggttgcccgcagatagggaagtgttggagtatttggagaaataagaaagatggacaaaatagaagttgcacagaatcgtataaaaaaaactcccaccgaagcgggagtataggtttaacaccttcggcaattactgccttattgtgataagatgtaggaaatcttattctgcaggcaaaaatataacaaaaaacttgtttatccaaattatttgctgtacttttacaaaaaattaataattcattctataaaatcatgaaagtatgactaaaattttaggaattgacacaggaactaatagtcttggatgggctattgttgagaagcagaccgatggatatcatttgcttgataaaggagtaaacatcttccaagaaggtgtcaaaatcgaaaagggcaaagagtcttctaaagcagcagagcgtacggctcataaagcagcaagagtaagaaactatcgcataaaattacgtaagatacgtctgcttcgtattttaagtgatgctcatttgtgtccaccactttctaaagcagaactttcagcatggagacttaagaaagagtatcccaagaatgaattgtttatgcaatggcaaggtactgatgatgattcggaaaagaccccttatgcttatagacacatatgtcttcatgagagtctggatttctgcagcatgacagacagatatattttaggtcgtgctttttatcacatgattcagcgacgtggttttttaagcaatcgtaaagatcagagtggtgatgatacaggaaaggtaaaagaaagtatcagtaaccttactcaagaaatgcatgatgccgggtatgagtatcttggagattatttctattctctatataaaagaggagagaagattcgtaatcattatactgcacgcaatgagcattatctaagtgaatttaaagccatttgtgaaaagcaggacttagataagaatcttggtcaagaggtggtaagtcaaatagaaaaagctatcttcgaccagcgtcccttaaagtcacaaaaggggcaagtgggcaaatgtgtgtttgagaaaaacaagaccaaatgcccctcttctcatcctatgtacgaagagtatagaatgctctcttttatcaataatattaaaattctaacgccaaaagatgatgcattacgacctttgtctgcagaggaacgagaacttatcatgcctttgttcttccgtaaatcgaagaagcaatttgattttgaagatatagcaaagaaactggcatccaagaagcaatatggatttttcaaaaagagtgccgatgccggtatgtcgtatcttttcaattatcctatggatacatctgtttctggttgtcctgtaacagccgcactgaaagatatctttggcgacaactggattgatggcctttgcgaaacctatacgctggctgagggtaaaagtcgtttggatattgtcaatgatatttggcatgcattattcttctatacagatgatactaaacttgcagagtttgctaagaatcgtttacaattgagcgatgaagaagcaaagaagttttgcgatatttctttgccagctgattatgcttcattaagtttgaaagctatttgtaagattcttccttatctaagaagaggtttgatttattctcatgctgtctttttgggtaatttgtgtgaagtaatgccgcaatacgaatggaatatagaggaaatgcgtgaagcagccattgataatattatccacgaaatgaaccagatcgattctaaggattcacgtactcttgaggtttgtattaaagaatatctgagggagcagtatcatgtatctgatgagaaactcaaaaagttgtaccatccttcgatgatggaggtatatccaagagtacaacatactaacaatcacggtgtttatcagcttggatcacctcgaattgatagcgttcgtaacccaatggctatgcgctctatgtttagattgcgcaaattggtaaaccgcttgttggaagagggaaagatagattcggataccgaaattcatatagagtttgcacgtgagctgaatgatgctaacaagcgtaatgctattgctgcttttacaaaggaaaatcaaaatgcaaatgatgatgccagaaagcagattattgctcttttcaagaaagaaacaggaaaggatatcgcccccacagataatgatgtcttgaaatatgttctttggaaagagcagaaacacatttgcctgtatacaggaaagcagatagctatttctgattttgtaggggcaaatccaaagtttgatattgaacatacgattcctcgtagtgttggtggcgatagtacgaaaatgaacctgacactttgtgatagtcgtttcaatagagaagtcaagaaaaccaagttgccaacagagttgtctaattacgatgagattatgactcgtattcaaggctggaaagatgaatatgaatctcttgaagctcaaattcgtaagcaaaagaagttatcaaaaggtgcaacgactaaagaacagaaagataatatcatacgtaaacgtcatttattagaacttcgtcgtgattattggaaaggaaagtacctacgtttcacgatggagagtgtacctgaaggttttagtcgtcgtcaaggtactgatatcagtgtgatttcaaagtatgcacgtctttacctaaaatcactattcaagcatgtctataccgttaagggtattgcaacttccgatttcagaaaaatctggggtatacaagatatttatagcaaaaaagaacgcgttaaccatgtgcatcattgcatagatgccattgtaatagcttgtacaggcttggatgaatataataagttgggtgcatattatcatgatgaagaaaatcatgaatggtatggtaagtctaaggcttattttaaaaagccatggccaacttttgttgaagatatcaaaaaggtgcaagatgaaatcttggtttatcattatacaccagataatatgccaaagcaaggacgtcgtagaattaaaatcaatggcaaaaaagtgctttgcaagggtgatgctgcgagaggttctttacataatgatacatactatggtgctatagagaacgatggtcaagtgaagtacgttaaacgaatagacttgacatcactcaaagagagtgatgtgaaaaatatagtagacgatactgtaagagagattataaaagcagctatccgtgagaaaggttttaaagatgctatggctggaacaatatggatgaatgaagaaaagcagataccgattaaaaaggtgagatgttttacttctataaggaatcctttatctttcaataagaaaaaacaacgagatttgtcagataaagaatataaaagaaactattatgttactactgatggtaattatatggttgcgttatatgttggttctacaaaaactggtaagagaaagactttccttgaatttgttaatatgatggaagctgcagattattataagacaagcaatgataaatctgttgttgcccataatatagttcctcttaaaaaagatgattgtcaattggctttaattataaaaaagggaactttggttatattctttaaagaaacaaaagaggaggtatgggaatgttctcaaaatgagatagttagaaatctttattatgtatccgtgatagaatctgatggtagagtaacgtttaagtatcatcaagaagcacgacaagataaagagcttcctcgaaatgataataaaacttctgatatgaggtcaaagattagaattagtcttgcatctgcgaaaatacttgttcaaggctatgattttgaaattaacgaacttggagaaattaaaagattaaggtaatatgattaagcagacattattcttttcaactcccgtttgtctttcgcttaagaattgccagattgtaatttcttggaaagactgcgacgataaggtaactcgtcctattgaagatatagggtgtgtccttttagaaaatcaaatgataaacattaccttgccgcttcttaacgagttggtaaagaataatgttgctgtcatattatgtgataacaagatgatgccgacatctatgttacagagtttagacgcaaatactacgcaagctgaaagttttaaatttcagcttgctgttagtgaacccatgaaaaagcaagcctggaaacaaataattgagtcaaaaattaaaaatcaggcttccattttgtcccttacaggaaaaagtggtgatgtattaaaaccatattttagtaacgtcaaaagcggagattctgataacagagaaggattagcagctaaagtatattggaatatgctctttggtcattcttttaagagagaacgtgatggcagtactcccaatgaactattgaattatggatattccattttgcgagcagcaacagctcgggctttacttggatccggtttattgccaaatttgggtatatttcataagagtagatacaatgcttttcccctggcagatgacgttatggaaccttatcgtccttttgttgacgaaattgtttacactcttttctgcaaaggcgtaaccgatttaaataaagattcaaaatccgaattattgcgggtgctaaattgtgatgtaaatattggaaaagtaaagcgtccattacaaatagctttaactattactacagcctctctcgttaaatattattctggtcaagtaaaaaaactgtctttgcccatcattatatgacagaagatagacttaatgcatatcatattatgtggctatttgtattcttcgatttaccagttaccactaaaaaagacatgaaagcagcttctctgtttcgtaagaacttagagaaagatggtttctccatgatgcaattttctgtctatattcgtcattgtgcttcgagagaaagtttagaagttcatattaaacgtgtgaaatccttattgccagaatctggaaaggttagtatactgagtgttactgataagcaatatggcgatatttataatttctgggggaagcctaaaagtattaataagagtaaaattaagaaaaaagtaatcagtgaacctattcaactggaatttttttagtaaatttgcatataaaaaaagtcctactcgccatttcttacaagaaatatggttattattacctgattatcagtatattcgtttctttaggttgtggtttgatgtaggaatataaagatatacaacccgtaagcgccatgagttggctatgcagtagttgtggtttgatgtaggaatataaagatatacaacccgcccatgaaaaacaccgccgcccgcgtagttgtggtttgatgtaggaatataaagatatacaactttgttctgagtatggaaaaaatacccaaagttgtggtttgatgtaggaatataaagatatacaacgcaacgccccccgctcaagcgttcgcggagttgtggtttgatgtaggaatataaagatatacaacttacgattaaccttatttttaagtttcgtagttgtggtttgatgtaggaatataaagatatacaacagaccaccaccaatcaatattgcatcatcagttgtggtttgatgtaggaatataaagatatacaacttgtggagttccatattctctttgtcttggttgtggtttgatgtaggaatataaagatatacaactgaatatgtctttgttcgttattccatacgttgtggtttgatgtaggaatataaagatatacaactctttgatcatctgtccgttcgttccaatcgttgtggtttgatgtaggaatataaagatatacaacgctggagctgtggctaagttggaattttagttgtggtttgatgtaggaatataaagatatacaaccagcgcccccctcaagcgttcggggttgtggtttgatgtaggaatataaagatatacaaccgccgtccgcgtaggacccgtcggagacagttgtggtttgatgtaggagtataaagatatacaacttgctggttataattcagagacacaaagacgttgtggtttgatgtaggaatataaagatatacaacagttcacactcccagacggtgatgcagtgcgttgtggtttgatgtaggaatataattatgttaacaagtgaacctgctatttatgttgaataataatgcaggtaacttgcataataaaagagtgtgcgattatcgaaagtttctgttgatgaatcttcagaaataagtgatgacgtgtatctttacttttcaataagtagttggagtatgcgttatttgtaatgtaaatttttaaattatttgatatatgagaaaatcggagaggatattcaactttgaaatggaggagagggaaggtaaggtgctgctcacaacgaaggaatggccgtatagtgtgctgcaggtggtgccgactacgcctgagacctttgatgaggtggtggagaaatgcagagagaggggtatggttgcgaagcatgatactgaccgctcttttgtcattattcatctctgtagtggggatcagaatgggttgttcccggaaaggcatgttgatatcaactcgtcttcggatgctcaaaagtgtattgatgccttgaaggatgctatggcgcaagcggctgttttttattattctaatgttattttgtcatagtttttggttatgacaaaataatattttttctaaaaagaggaggattttatttagaaaatcaacctgttcttttttagccataataaggggggctaaaatcaccccgtccctctttaccattaaagagggggctttcgaaaacccaccagtcctcccttacccttaagggagggtccacctctcatctcggtcttctcccctcagggaagaagaggaaaccgccctactcggtgctcaaaccgcttcgctataaggttggcggaccatcagaggtcttcgccagcagcggagctgcggttttttgtgcggggatgaacccgctttcactcaaggacttggttatgggcagcttggtgcatactgcttgcagtttgcttgatacttgctcgatgcttgattgctgctgatgggtgcttgttgatgcaggaattactgctggacttcttgccaatctatgagacctttgcctttatcgtcgagctcaaggcctaatccgatgacctgacggctgtctgcaaggaaaggttccagatactggcggtcgaaaatctgatgagtggcagcagacttgcctccgttgttttgcaatttcaattctattacgtagatatagcgggaggtctgtactgtcatgtcgattctacctgtggaaatcattttctctacttctacctttagtccaatagcattgaggatggtactgataatgagacgataacgctcttccatgtccatggaggcgagtttcttattgctgtacggcacgtcggctatcaaggccttcagggtcttcattgcctcgtttgtctcgcctgtccctaattgggcgtacaggttggcttggagcgattggaggtcgttctctgaacggagggcgagggatgggagaacctggtcgtaaagggcttgtttcacctcttcgttggggaagccaagtgtatagccaaactcgtcgtatttcttgatggtgaggtagcctgactggtaaaggaacagctcggcacctcctgcactgacatcggatgtctctaaggtgtttcgcatgatacggcaattctcgaagttcttcaatcgaagctccatgttgtcgacaaatttcggtatcagcgaagtggcccctgatgctgcccagtaattgctgagctcttgtgtgctcaatgcgttgatcaggctataggggttgtagatgtctgtcatattgcggcggctgaaatggtagccgtcatagtaggctttcaacttgtcgtgagtttcctgaagtgtccagttgttgacttcgcccattttctccagctctggcttgaagtttgttaatatttcttcttctgtgatgccacagatggttgcatattctggcaggaaactgatgttggtcaaattgttgagcacggagaaaagtgaaatctgcgtgaactttgtgatgcccgtgatgaagacaaacttctcgtattcgtcgcaggccttcagtactgcaaagacatcgcgatagacttcggtgcaggctttgtgatgttctgtcttccatgaatgttgcagcggtgaatcgtattcgtcgatgagaatgactaccttgttgccggttttgttgtatgcaccttcaatgatgttttggaatcttactgcaagagagctatcctgccgcacagcaatgttatattccgattcaaggttgtgaaaaacattgtcaagataactccacactcttttcggttcggctcctgccagactcatatcaagacggatgacaagatattgtttccattctttctctaactgcatgattttcagtccctcgaagagttcttttctcccttcgaagtacatctgtagtgcgttgataagaattgacttgccgaaacggcggggacggctcaggtagttgtactttttgccatgattcgccaaatgccagatgaggtcgctcttgtctacataaagataaccttcttctctgatttctttgaacgattgaatgcctgtcggcagctttctgttgctgatgtctgtcatgtttggttctccttgattaatatgcttatcttttgcaaagataatgcaaatgagcgcaatgaaagatttactttcaaattgccgagtgcagcttatcttctgcaaagataatgttttcatgtgatatatgcaaaaagattggcttaattttgataaaaaagcctccgactctcacgagcaggaggcatgataaaagaaaaaatgtaaggaagttaagggagttaaggagtttcagatgtggaaatggatctccttgagccatttgcgggtgtcgaaacagggacaggccttgcggacgccggggaggtcgcagtgaccgaggatctcggcatcggggaagtcgacgcagaggctgcggagcaattcttccatggtgatcttctgtgcttcggtgcgggtgtcggcaggacgacccttggcatcgagtccgccttcgtagcagatgcctatgctgttcttgttgaagtggagggcgtgggcgcctacttcgttctcgggtcggcaggggtagagggtgccgtcgcgggtgatgtagtagtggtagccgacgctgctatagccacgggctttatggcaggcttcgagctgctcgatggtgaaactctgggtgactctcgtcgcgctgcaatgcagcacgatgagagagatgttacggtgattttgcatagtcgttagatttttttgggttaacaaacgatggggtggttcgtctacattctgccgcagctggtgacgcagaaggcgccggcaatggcggtgagaacggtgatgacgaagttgatgatgttttttaatgtttcttttttcataatggtttaatttttttaatggttaatgtttttttggaggagaattttcaggagattttgaggagttaagggagttaagggagttaaggagttaagacatcagtcttgtggattggatacaggacatttgtccctctaacttctcttaacttccctctaacttctcttgattttctctcttgcgagcgctgggtcaattactctccatcgcctccggtattctcgcctcctgatgggttgctgcctgtgccgcctgatgggttgctgtcagagccgccggatggggtagtggtgcctccgcctgtggtgccgcctggcttcgtggtggaagaggattcgaggatgtcggcagcatccttgagggtggcgtcgaggtcgagacggctgttggtgagcttgcctgtggcacgggcacggagcttgacgccctctatgttctttgccacggtgaaggattccttcgtgtcggctcccttcttgggtcggatgccaatggagaaaatggcgaggtcgtcgatcttcacggagtagccgctgaggacgagttccttgacgcacttcaccatgtcggtgaggatgccgcgtacggctcctgccgagaagggtgtgttgtggctcgacatgtgctctgcgagttggtcgatgctgatggttgcggtgactgcaggacgggcatagtacttgccgtacgttccagggaactttttgttgttgttttttactaacttgtagagaatcatagttcttttagattttggttaatgtattacttgagtgcactaagttcattctctctgaatgacaatgcaaagatacgatgattttatttggcagtgatgccaaataaaacatgtcatgagaaatggtgccaaatgatgcgaaatgatgcaatcaaaaagcatcatttcgcaaaacccaccagtcctccattagccttaatgatgaactttttcgaaaacctacctggatttccttaacattaatgagggattttttcgaaaacccaccagtcctcccttacccttaagggagggtccacctctcatctcggtcttctcccctcagggaagaagaggaaaccgccctactcggtgctcaaaccgcttcgctataaggttggcggaccatcagaggtctacgccagcagcggagctgcggtttgcggtatgcgaccgcatggatccaaatcgcttacgggctgcttggtgcttgctctaagtttgcttgttgcttgctcgaagctttttcgaaaacctgcctggattaccttagtattaatgaggttattttcgaaaacccaccagtcctcccttacccttaagggagggtccacctctcatct

SEQ ID NO: 4206 - DNA, 19862 bp, synthetic construct
  source 1..19862: mol_type = other DNA
  misc_feature 1..19862: note = Synthetic
cggttacctcaacaggctttctcttggaagcctctgaaacagcttcaaatcttaagttgctcataccttatataatttaaaatttctgattttcaatgtttttataatctgttggaacgtttattttcccagccatttggcaattctctccatggcttccttgcagtcctcatgctcgccgaaggcggtgagtcggatgtagccttcgcccgatggaccgaagccgacacctggagtgcagactacgctggcaccataaagcatctcttcgaagaatttccagcttggcgtgttgtttggcgtcttcacccagagataaggtgcattctcaccgccatatactctcaagccgagtttctggagttctgctctcatgaagtgggcattctccatatagtaattgatggttgccttcacctgttccttaccctcaggggtgtagatggcttcggcagcacgctggctgatatagcttgtaccattaaacttggtgcactggcggcggtcccagataggattcaatgccacttcctcacctgccaatgtctttgccttcaactccttaggaacgatggtgtaaccacaacgcacaccggtgaatccggcagtcttcgaataactgtggaattctatcgctacctttctggctccacgaatctcgtagatagaatgaggaattgatgggtcggtgatatatgcctcgtaggctgcatcatagaggatgatgctctcgttcttgatagcatagtttacccattttctgagttcttctttcgagatgaccgtacccgtagggttgtttggataacagagataaatcatgtccacacggtggtctggaatctgagggatgaagtcatcgctctcatcgcaaggcatgtaggttacattgctccacttgccgttctcaaagactcccgctctacctatcatcacgttagagtctatataaaccggataaatcgggtcggtaacgccgatgttgttatcccatctcaaaatctcctggatatttcccgtatcgctcttggctccatcgtttacgaatacctcgttggcatcgagatgaatgccacgtggcaggaagtcgttcttgatgatagcctcgcggaggaagtcgtagcctcgctccggaccgtagcctctgaaagaagcctgctcggccatctcgtctacagccttgtgcatcgccttgatgacggcagggcagagaggctgggttacgtcaccgatgcccagactgattacacgctgctttggatgtgcaatcttgtaggcgttcaccttctttgcgatgtcggcaaacaagtagttgttggccaacttcaggaaatgttcattaactaatgccatattttgtttctccttttatttgtggtcattatcgaccatttgttatttaagtttgcgttctttctaattttaatgttgagtgttgaatgttgaatgttgacttggtgggtgcagctaaattcaacattcaacattccacattcaacactctagagactttgtggttacagctaaattcaacattcaacattccacattcaacactccctatattaacactccaactggatttctccttcaaaggcgaatgctgcaggccccgtcatgtaaacatgatcatcagcctcgctatattctatttccagcgttccgccatccatcacgatactgctttttctgccagtacgcttggtaagggccgcagctactaacgtagcacaggctcctgttccgcaagccattgttattccgcttcccctttcccaaactcgtgtccttatggcgtctgtgtcagttacttgtgcaaattctatgttgcatctctggggaaatgccttgtctctttccaggattttaccatagtgggcgatgtcgatggtgtcgatgtcatccacgaaggtaacgaaatgcggattacccatgcaaacataggtgccttcaaattttctgccgtcagcttcgagcaccgaagggcctatgaattgctcgggattttcaagtttgggttccagcatgtctactgttaccgattccacaacttctttattatcctgaagatgaagtttcaatatcttgatacccgaaagtgtttccagtcggatggtgtcctttcgggtcaatcctttttcgtaaagatacttaccgatgcatcggcttgcattgccgcacatcatcgcttctgaaccatcggcgttgaagatacgcatcgaataatctgctcttctgttgtcttgcggctttccgatgagaaccagtccgtcgcttcctatgcccgtgtgataagcactccaggcaatggcagccttctctgggtcagggatgtcgtattgttgggtatctacatatatataatcgttacccgctccctgcatctttgtaaaatgaactgtttctttcatctgcgttgttctttatgtttgaatactcttcttttatctctcatgtcttatctcttttgagatttgactttttgctagtctttcgaatatttcgatgactatttgtttgatttcggttgcaaaggtacgacgatttgttgaaatatgcaagaaaataaatgcagaaatcttgattatttttcgctatcttacaatttgtgttataaaaatgctttctgccttacaaattgtaaggagaataggataagcctcgataaatttaaaatattcgacaaaaagcaaaagcgaaatgtttttattttctttaaaatgctgacaaaatgtattaattttgcagccgaaaacgaacatagtgtaaaagaagggcttgatttgaatagcaaaccaatgaaggtccgttttcgaaaagagacaatcaatagaagtattaacacattattaattattaaaggattatgaagaagattgaggcaattatccgcaagtctagattcgaggatgtcaagaaggcgcttttagcagcagacatcgagtggttctcttattataatgtaagaggtgagggtaaaatgcgccaggctcgcatttaccgtggtgtgatgtacgataccagcagcatcgaacgtgtgcttctgaacatcgtggttcgtgacaagaatgtggaaccaaccatcgccgccattcagggggctgcccagaccggtgaagtaggagacggcagaatcttcgtgattcctgtactcgataccgttagaatcagaaccggcgaacgtggcgacattgcattgtataatgctgagaaagaggaataatttaaaatgttgaatgttaagtgttgaatgttgaattaggcattcttacttatctttaataaatattatttagtattctaatttaactataagatatttttatgagcagtttattattgacgacacttgatacgggtaacacagcgtggatgatcatggccaccatcttggtgcttttgatgtcaatcccgggtatagcacttttttatggtggtttggtgcgccagaagaatattctcagcatcctgatgcagacggttttcatcgtggcagtagtcagtctgatatgggtagccttcggttattcctgggctttctctacagaatatgccgattcgggcaatcctctggcttgcgtcatcggtggtttcgataaatgtttcctccacggcatcggcttggatgccatcatgccaacaggcattccggaactcacctttgcaatgttccagtgcatgttcgccctcattactccagccttgattctcggtgcttttgccgagcgcgtgaagttcagcggatatgtacttttcaccatcctctgggttatcatcgcttatcttcctatggctcactgggtatggggcggcggttttctgcaggagatgggagccatcgactttgcgggtggtaccgtagttcatatcaatgccggtgtagccgctctggtcatggcactctgtgtaggcaagcgtgatgattaccgtgcgggtcatcctatcacacctcacaacatcaccttcgtgttcatgggtatgtcattcctctggttgggatggttcggtttcaatgccggtagcggattggcagctgatggtctggcagccaacgccttcctcgtaactcatgtagccacagcagcggcagccactacctggatgctcatcgactggattgtgaacaagaagccaactacggtaggtgcttgtaccggtgctgtagccggactggtagccatcactcctgcagccggcagtaccgatattttaggtgccttctgcatcggtatcatttccaccatcgtctgcttcttcatggtagcggtagtaaaggagaagttcaagtatgatgatgctctcgatgcctttggtgttcatggtatgggtggtattttgggatctatcctcaccggtgtcttcgccactcagtatgtaacaggagccgaaggtgtgcagggtgccctctatggcgactggcatcagctttggattcaggttgtagccaccgtggtaagcatcatctacagcgttgtagttacctacattatcttcaaggtagtagataagagtgtaggtgtacgtgttgacaagcgagtagaagaggaaggtctcgacatctacgagcatggtgagagtgcttatagcaactaagatagagaatgaatatatgtataacaccttgactgtatgttttgtatggtcaaggtgttttctattataataatgtgtaaacctgattttgcctaaattcttcttgttattttatcatttgcctgctttttatgttaaatcttataaacacttagttacaaaatcgattctttttcttatatttgtcaacaaaataaagagtagacaattatgattaatgaatcattttctataagattgcgggaagcgcgacagatgatggggctcagcatggataaactcgtagagcgaaccaacggagccatcaccaagcagagcatctcccgatatgagaaaggcatcatgcgccctaagcgtgatgccctgcaagccatagccaaagccctcaatatcagcgaggaatatttcgaaggaaccaatctcaagatcgatatgcctatgctccgtaccacctccaatggcaagttgtccgaagacgagttgcaagcccttgaagcaaaactctctttttgggcagagcagtatctagccaaggagaaagaagcgggtttccctacccggttcaaaaatccgataaaaggtaccgggatatcaacgcaggaagatgccatccatgctgccgaccttcttcgtgaaaagtggcattgcggtgatggtcccatcgccagcattctgagactcttggaaagaaaaggtatcatgatacttgctgctaatcttccagagtatgtcttcggaatgagcacctgggcagataagaagcatccgctgatgattctcgattttaatccggaaaagagtagcgtagagaaacttcgtttcacggcagttcatgaactggctcatctgcttctcctcttcccggaagatagtccgctgaggctggagaagcgttgtgatctctttgccagtttcttccttcttcccaaattggcgcttatcgaagagttgggttccaggaaacgtgagaagattacgttggaggagatgatcgacatcaaggaactgtatggcgcatctctcgccgcatccatcattaccgccagagattacggcatcatcaccaccgagtataaacgggcatggtatgccgagcatatagagcctaatccccgtgaaatcggtaatggccactatgcatttcctgagacattgggaagggagaagagagtcaactcgatagtagattcgtgaatgttgaatgtcggtgtaaatgtcagcatttgatgatatttaaaataggaaatactaattcttaacagtattagatatgaaggaaaaaaataatgagcaaattttcttcgatatgttcgaagaggtagcaaccgaaagcatcgctgaggctcggaatgcatacacctatgaaaaaaatgatgggtgctatcaggaggcgaaagagatagctgatcttgcaaggaagaatttgctggagaaattgggaggtacataaaaaaataaatcccaccgaagcgggactataggttttacccttcggcatttctgccttattgtgataagatgtaggaaatcttattttctgctgcaaatataatataaaatatttgtttatccaataaaaaggttgtaattttacagaaaattaataattaagtataaaaaactatacaatatgactaaaatacttggaattgataccggaaccaatagtcacggatgggctattgtggaaaaacaggcagatgaatatcatttgcttgataaaggtgtggacatcttccaggaaggtgttttaaaaacagaaaaaggcaaagaatattctaaagctgctgagcgtacagctcataaagctgcaagagtaagaaactatcgtattaaattacgtaagatacgtttgcttcgtattttaagtgatgcacatttgtgtccaccactttctaaggtagaactttctgcctggagactcaagaaggagtatcctaagaatgaattgtttatgcaatggcaaagtactgatgatgaatcagaaaagacaccatacgcttatcgacacaaatgccttcatgaaagtttggacttcagtagtataactgataggcatattttgggtcgtgctttttatcacatgattcagcgacgtggctttttaagtaatcgtaaagatcagagtgctgatgatacaggaaaggtaaaagaaagcatcagtaaccttactcaagagatgcatgatgctggttatgagtatcttggtgattatttttactctctctataataaaggagagaagattcgtaatcattatactgcgcgcaatgagcattatctggcagagtttaaggccatttgtgagaagcaggatttagataagaatcttggtcctgaggtggtacgccaaatagaaaaagccattttcgaccagcgaccattaaagtcgcaaaagggacaagttggtaaatgcgtatttgagaagaacaagacaagatgtgcttcttcacatcctatgtatgaagagtttagaatgctctcttttatcaataatataaagattcagactccaaatgatgatgtattacgccctctgtcttcagaggagcgagcactcattatgcctttgttcttccgtaaatcaaagaagttgtttgactttgaagatatagcaaagaaattggcacccaaaaaacaatatggtttttacaagaagagttctgatgccgaaatgccatatcttttcaattaccctatggatacatctgtttctggttgtcctgtaactaccgctttaaaagatatctttggagataattggattgattctctttgcgaaacctatacgctagccgagggtaaaagtcgtttgaatgtagtcaatgatatttggcatgtattgttcttctatacagatgatacaaaacttgcagagtttgctaagaatcgtctgcaattgaatgatgaagaagcaaggaaattttgcaagatttctttgccgggtgattatgcgtctttaagtttgaaggctatctgtaagattcttccttatcttagaagaggtttgatttattctcatgccgtatttttgggtaacttatgtgaagtgatgccgcaatatgaatgggatatagaagaaatgcgtaatgctgctattgagcatattatccacgaaatgaatcagattgattctaaagacgaaagtactttagagaagcgtatcaaagaatatttgaaaaatcagtatcatgtttctgatgataagcttaaaaagttataccatccttctaagatggataaatatccaagagtattgcgtactaatgatcatggtgtttatcagcttggttcacctcgaattgatagtgtgcgtaatccaatggctatgcgttccatattcagattgcgtaaattggtaaatcgtttgttggaagaggggaagatagatcaaaatactgaaattcatatagagtttgctcgtgaattgaatgatgctaacaaacgtcatgctatagcagcatatacgaaagagaatcaaaaaacgaatgatgaggctcgcaagaaaataaaagaactctttaaagatgaaactggaaaagatatagaaccaaaggatgatgatgtcttgaaatatgtgctttgggaggagcagggacatatttgcttatatacaggtaggcagattgctatttctgactttgtaggaacaagtcaaaagtttgataaagagcatacgattccccgtagtgttggtggtgacagtacaagaatgaatttgacgctctgtgatagtcgcttcaatagagaaatcaagaaaaccaagttgccggcagaattgcctaaccatgatgaaattatggcacgtattaatgactggagagaaaagtatgagtctcttgataaacaaatacgtagacaaaagaaactttcaaagggggcaactactaaagatcaaaaggatgctatcatcagtaaacgtcattttttggaattgcaacgcgattattggcgaggtaagtatatgcgtttcactatggagagtgtacctgaaggatttagtcgtcgtcaaggtactgatatcagtgtgatttctaagtatgctcgtctttacttggaatctctttttacgcatgtctgtaccgttaatggtattgctacttctgattttagaaagatttggggtgttcaagatgtatatggtaagaaagagcgtgtaaatcatgttcatcattgtattgatgctatcgttgttgcatgtatcagccaagacgaatatgacaagttaagtgcatactatcataatgaagaaaatcataaatggtatggcatgtcaaaggcttattttaaaaagccatggcctacatttgttgaggatttaaagaatgtgcaagatgaaattttggtttatcattatactccagacaatatgcctaagcaaggacgtcgtaaaatacttcttgatgtagaagttgatggaatcaaaaagaaaaagaaggtcctttgtaagggtgatgcagcaagaggtttattgcatagcgatacatactatggtgctatagagaacgatggcgtggtaagatacgttaagcgtataaatttggcttctatgaagaaggtggccgatgttaaaaatatcgttgatgatgctgttagaggtattgtagaggctgctatcagagaaaagggctttaaagaagctatggctggaactatatggatgaatgaagaaaagcaaattcctattaaaaaagtaagatgctatacttcgataaaaaatccaatatctttcgataagaaaaaacaacgagatttgtcggataaagaatataaaagaaactattatgttaccactaagggtaattatatagttgcattatatgttggttctacaaaaactggcaaaagaaagacattttatgaatttgtgaatatgatggaagctgctggttattataagacgagtaatgataagtctgttgttggacataatatagttccacttgaaaaagatgattgccagttggcttttatcctaaaaaaaggaactatggttatcttttataaagaaacaaaagaggaggtatgggattattctcaaaaagagacagtcagaaacctttactacgtatccgagatagaatccgatggtagagtaacgtttaagtatcatcaagaagcgagactagacaaagaacttcctcgaaatgcttctgacacatcagatataaagcctaagataagagtcggtttggcttctgcaaagatactggttcaaggctatgatttcgatattaatgaattaggtgaaatcaaaagattaagataaaaatgattaagcagacattattcttttcaactcctgtgtgtctttcgctcaagaattgccagattgtaatctcttggaaagattgcgacgacaagataacacgccctatagaagatatagggtgtgtagtcttggaaaatcaaatgataagcattactttgccgcttcttaacgagttggtaaagaataatgttgctgttatcttatgtgataacaaaatgatgccaacatctatgttgcaaagcttaaatgctaatacaacgcaagctgaaagtttaagatttcagcttgctgttactgagccaatgaaaaagcaagcctggaaacagattattgagtcaaaaattgaaaatcaagccgcagtcttggctcttgctggtaagaataaagatattctcaaaccttattataataatgttaagagtggagattctgacaatagggagggattagcggcaaaggtatattggaacaaccttttaggtaacttttttaaaagagaaagagaaggatgtccacctaatgctcttctaaattatggctatgctgtattacgtgcagctgttgctcgtgctttgctaggttctggtttgctccctaatttgggcatctttcataaaagcagatataatgcttttcctttagctgatgatgtaatggaaccatatcgaccatttgttgatgaaatagtttttcgactttatggcaatggaattactgaactgaataaagaatcaaaggcagagataatgcgtgtgttgaattgtgatgtcaatataggaaaggttaagcgacctttgcagattgctttgaccataacaactgcctctcttgtgaaatattattctggagaaatcaaaaaactttcattacctattatgacatgacagaagatagactaaatgcttatcatataatgtggttatttgtatttttcgatttacctgttactacgaaaaaagagatgaaggcagcttctctcttccgcaagaacttggagaaagatggtttctccatgatgcaattttctgtctatatccgtcattgtgcatcaagggaaagtttggaagtgcatataaaacggataaaatctttgcttccggaggctggaaaagtaagtttgttaagtgtaacagataagcaatatggagatatctataacttctggggtaagcccaaaagtattaataagagtaaaatatcgaaaaaagttatcagtgaacctgttcaattggagtttttttagtacttttgcattagaaattatatcctactcaccatttcttattagatagagtggttgttatgtactgaaaatcagtatattcaaatctataggttgtggtttgatgtaggaatcaaaagatatacaacttgaaattgtctgcaaacggtctgagtacgttgtggtttgatgtaggaatcaaaagatatacaactaactgtttttcagaacgctttaccaatagttgtggtttgatgtaggaatcaaaagatatacaacaaagccatacgacttcacgatgcgccatttgttgtggtttgatgtaggaatcaaaagatatacaactcttcgatgagtttaacaatagcagttatgttgtggtttgatgtaggaatcaaaagatatacaacttaggcggttaactcttgttacgttttacagttgtggtttgatgtaggaatcaaaagatatacaacaaggagtttttcgattgcaaaggttcgttgttgtggtttgatgtaggaatcaaaagatatacaactgatcggtctaaagcaccgcagcatcttcagttgtggtttgatgtaggaatcaaaagatatacaacccttgcggtcagtagcagtaatgatgtgggttgtggtttgatgtaggaatcaaaagatatacaacaagcaaggacggaaagacaacagtaatcgagttgtggtttgatgtaggaatcaaaagatatacaactcgacatggtgccgagcacgatgaatggttgttgtggtttgatgtaggaatcaaaagatatacaacgaatcctgatggttcgcctatcaaccctaagttgtggtttgatgtaggaatcaaaagatatacaacttatttgtacatttgcaaccggttaggtagttgtggtttgatgtaggaatcaaaagatatacaacaccactgtcgttcttgcgagactgaatatggttgtggtttgatgtaggaatcaaaagatatacaactttctcatttatgccaaaaactgacttcagttgtggtttgatgtaggaatcaaaagatatacaacccattctcatccttgcgagtaagagagtagttgtggtttgatgtaggaatcaaaagatatacaacgcattcgctatctgcgatttggtccaatggttgtggtttgatgtaggaatcaaaagatatacaacgtttgatcctgcctatgatccggtaagaaagttgtggtttgatgtaggattcaaaatgtatattatacaacgagaatggcatagggggtacgcgcagtatcaggattcttggaacataggaaagaatatgccctctgtagatgaaataaagcttaacgttaaataggctctgggtggcaaagagcagttggttacagctgctatcgtagagaagtttgcaagaagtataggaaacatttttcttgtttaaatttacgaaaatctatgcctaatcccactcctatacaggtgaccccaaattgcacaattattcaataaaggttgtgctacgattagtgaacatatttccaatattttcaaagaaggagaattggaagaaaaagtggtctgtcggaaattccgacagaccactcaacatggtgctttagaggggaaaacgcagagcaaagatgtgaaatactacaatcttgatgttattatctctgtggggtatcgtgtaaaaaaacgattcaaaggttcatgttccgtctccttcggccatcggattcgtctccttcggccaccgcattcgactccttcagccaccgcagccgtctcattcggctaatgcattcgtctccttcagccactgcattcgactccttcagccaccgcagccgtatgtgtcaactcaatgaagtagatgaactcgtgaaatgaagtagatgaagtcgtgaaatgaagtggatgagttcgcataatgaagttcatgatttcggcacaattgccaatacatgcgaatggtaaagcaaaaagtggtttactcctacctttatgattcttatacgaaaatgtttttctattcttgttgccacatctgtcaccaatgccttaactctctgattataagtgaataatgcgtggcagtaagcggtatttctgttgccacctaatgccacgcattgccacactctttttatgagggaatgagatggaaagtgagtaggttatttcctaactaccagatactcagtaccaaatcttgttcttcggttcttcaaaccttcaatattctgaagttctctgcccaatttctgtatactcgaaacctggagagaagagccgaatttctgcttcaaaatgtcgaaaatggcggctgccattagatattcgccctcttccggggtacttgcaggctcgaaaacctgcagaaaacattgcttgataggggaaatctgttcaaattgtctgttatgttgcatgatgatggcggtttccttggcatcgaaataggatttttcgccacgctccaaagcttgcatcgcctgcgcataaagctgctcatagttcagtctgccactcacatcgataggtcccgtcagttctactcccaggaaacggcggttgccggatgggtcggaaagaatatcggtcatgttgctcgtggcgatgaaggaggctagacgagggaattcctgtacatgacttccgtatggcggcttgattttcaccgtaggcaactgcagcagattcttcagaaatccctgctgcacctgtggtgaaatctgattgaactcatcgagattgatgagcagaaatggtgacatcgcctgcaatacctgacgtttttctgacagaatcatattgtcggtaaagccccacgataattcggtagggatgagacggcggcagaaggtgctcttgttgtaaccttgcttggaaatgagcagcggcatagtactgttgccatattgacggcgatacataccgcgccactggtcaaccattccaagaaaccaggtgtaaaaccagtcttcccaatgaggattgttggtgggtacggttcgtgccagggcacggatgcggtccttgccgtcccattttcccagacagtcatagagataggactctattggactgtagtttctgatacggtctgactctagaaaattccttacatccttgatgcttacgtggatgtcggctatctgaacatccagcgtcatgcttttctgcacacgggcatccaccggtctgaaatcgccaacccatgaattgttcgggcggtattcggtatatttcatcacggtattgtaacggaactggtaccggctctccaggtatctgatcatctgcagaatttcggcacggccttttctgcctgaggctgatttctccgtcttcctgtctttggaatgggtatcgtaagcggtgcctactatctggcggagtttctcttctgtcacatgtccccagttgttgcggcggatatggatgaaagcttcttcttcgctgagacccatgttgcagagcttgatggcgatggctgagaaacaggcaaggaaccggtcttcatcgttctgccatgagatgttggcttttttcatctcttccttcgtctcttctgctgccttgcggtagaggaattcatagtcatcgtatgtcttcaaatcgtctacatttttaggggctgaggctaccttcttcatattttgggagatgcgcatcgccacagccttgctgttataataaggagaggcatccagcgtaagcatgaagttggatgccaatgatggcttttcgggtttgatggcagcctgtacctgcgactgatagagcgtctttacctgttcgtaggcagactggtagagtaagtcggcgtcggcttcttttgtcgggatttttccttcttcgttgcagatgcttacgagcacgatgaggcttctgccgtcggctccttcgaaggcagcaaaggtcatcggcagtagactgaccgtcttcttgacggcatctttttcctggtctgacatgaggttgatgaagtggagcatcaccagtccgtttgatttctggaagacgagattgccgctttcatccttgttgaattctgcggctggataaacgtgctgccattccttgatgcctttgtagtactggtagtcggcctccatgagcggcacactcattctgaaattggtgacactcagcttggcatcatctttagcgatgcgctccagaaaccgttctacggttttcgaactgaccatcaacttgttctgcttgttgattcttgtaatagtaaacttcatatttctgctaatttgttgatagggtgatacttaggattgccgacggttttgcccagctttgcccaaggcgttgggcaaatgtgcccggctacgccggtcattcgtgaccttcgtgtcggtcatccgtgctcatcgtgttggtcgtccgtacccgtgtacatgggtacggatactcatgtacacgggtacgagtgaccatgtacgtgggttaaaatctttatcggcgtgcggttgttaatagttgacctcttctgcatatcggtcgaacctcatgtcggtgtatccatgttgctggcaccatttcagcacgtactgctgctgttcaggcacgagtcctgtctgtcctaatttatagcgatagtatgaagtcttgcttccgaagtaggaagtcatgtgtactctgaaactggcttcgtctttacgcttcagttcttcaagaatattcataaagccgtatgccattttcatcatctgcagctgcaggaaatgttcgcacttgttgtcgtggtaggcatcgggatagatggcgtagcctttggtctgttccggttttttgtaggttacggacagatagtgtgcacattcctgagccagtggacattgctggttgaagcaatagtcccatgagttgtaagcactttctttgttgaagtagagtctgactaaatctgcttgtgtcataggtttttggaattaaaattatataaaaagtggtttcacaggagtcgtaagcttctaggtggaatcggcaggaatttttcctgttggttgcaaaaatacaaaaaatgttcgaaaccgcaagcctttttctccactttttaaatgtttttcgtcgaaaacaataagtatttttctgctttttcgctgagaatcccccgtttttcgcccgagtgtggcaataggtggcaataggtgataataggaaatgcccttgttgcaacgcttaaatagctaaaaatcaattggttaacttgaagtgtggcaatagtggcaatagttttagaaaaacgttatacatgagagagcttaaatatctacatcttttcttttagaatgtgaagtttgatgatagtttaactttcgggtcctatttattaagttgcaaggaataatctactttcgtaatccccaaagcgtaagtttttctcattttatttgtttagatgaaattttttccgtacctttacacccaaataagagaaaataaaaatggcaataaaatatgattcaagtgtaaatgtcttggggagtattcccgattattcgtcgatgatggatttcatctgcgaatacatggggcgtatgcccgatggacagggaagtttttctttccgtacccacaagacattcacccgattcctggctgccatcaaaacggcgatcctgacttttgccaacgacaggcataagcagcttttcctggatgctttgtcttcaaaagaattctcctatcgggagaaactgatggtgctttattggcaaatcgtatatggcaacctgctcttccggagaatttcagaagaagtgtttatgcaggctgtttatcaggggcgaaccacattgtcggctctcgatgtcctagccttgctccatcacataaaggaaacggaaaagggagagttcaattggtcggaagccactttgaagatatgtgcgtctaaatatctcaccatcttgaagaaactggggttggcagatggagctatccgaaagcaaatcctttatccgccgatgacttcgcaactgtttgcttatttcataagaatggcaatggcggtgtatcctgcccaaaacagtctggataatccgatgatggtgtttagcttctatgataaaacttctctcatcgctaaactgaagcgcatagagttcatgcctttctggaatattacccagataggagatgaggtgaagatagaagtaagggagaaagagtaaagaacagagaattcaattgtgaaatgataatatgacaatgatgcagactttcgatatagagcacaatcgcctttttaatgagctgacagcaacgctcaaggaagacattgtgaaaatagcaggcaaatgtaatggtggaaagagcatactttttgtttatccacccagagacgaggatgcctatgtggctaaggcccgtgaggaattgactgatggatatagcttcattgatgtgcgtgaaagtttcagactgtttttggatgaagcaggcatagacacctttgaatccaattacaaggatttcggccaggaagtattcttcagtcagaattttgaagaaggtactttcttttacgcactcattgagcagattaagcaggtgtttgctgaagaaaaagtgccggtacttgtacatacgggtgctctttatggcatgaatttctcgaatatcaacatcatggagcattcggcggtgatggactcacacattccgctggtggtgttctatcctgccactatcgaaggcgaccaaatcatgttcctcggcaagcagcctgcctctaagtatcgttgcattgtcatcaaataacaaactaacaataaagatgaaaatcaaagatattctgtccatccagttggacaatgacatcaagaatgtaatcgacctcaatttgcagagcgaggatgaagtaaaggaagaactcgatggttttatccttaccgagagtcttgctacccacttgtccgatttcctcgacaagtttacttctgatatgaaggaaacgggtgtttggctcagtggtttctatggttcgggtaagtcttactttgccaagatgttgggcttcctgatagaaaacccgtctattcaaggtaccagtttccgggagagattttcccataagctggtgggactcaagaatgaggactttattaggaatcagatagattctcttgccaagtcgaaataccaggtagtattgtttgactctgcaaaggtagataacaagcaaggaatagctcacatggcgatgagccagttcctgctctcgcttggtctgatggccaactggattggtttcatggaatatcatcttttgttgggtggtcaatatgcagccttcctccagaaggtagaagagcagaacaatggtaagaaatggcagaatcttcgccgcaatatgatgaccactgtgcctgttttcaagaaggcgattagtgccatcattggcgatgaaaacttcttggaaaccaaggccatggtggaagaacgtatcagttcatacgatgccgataaactgaaggaggatctttccctctatctggataagcatcctcaggaaaagattgttttcttcatcgacgaggtgagcgaggccatcacacagaagaaaatcaacctgcttgacctggaaggtctctctgaatcactttcagccctgggcaaccgtgtctggacggtgggtatcgcccagcaggctttcagtgatgtgctcaatgcggctgggttgaacctgcatctgctcaacaaggtagaagcccgattcaagacccgtatccctattgctgccgaagaaatcgataagattatccgcaagcgactgctcgacaaaaccgatgcaggcaagcaggaactccagaaatatttcaccaagaacagtggtatgattcaggcggttacaaatatttccggactcgccctgagtgctaccaaggatggcgaaacttatgctgattactatcctttctttgagcaccagtttaccatgttgcagtatttcctctttggctctcgcgatacggtgaccagccagattggtacccgtggtatgctgatgtcggtgttcgatgtcttgaagaaggaatcaatgaccgaggaggaggtttatacccatgtatcggctgtggaactctgtaatcaggcaatggataatgttcctgtgtcactcggcatccgttacaagcaggctgaagaccatatccaggctgatggcagttttaaaatcgtgaaaggcaagcaactcttgcaggtcatctatttccttgccaagtcggatgcccgtaccacggtagagaatatcaccagttcgtatgcccgccgcccggaacagtattatgagattctggacgaggtgaagcgtgccgtagctctgttggtagagaataatgtgcttcttcagactgccgaccagtatcgcatcaccagtcagatagagcagcagattatcgacgatatgagcaagtacgagataccagtctatcgtcagaaggctgaaattatcagccgcatgaagcagttgcgtctggtgaaggcggcacagggctttacgctggatggggtgaagtacagcttctgtgtggaaaccagcaatggcgagaactttgccaaccagacagagcgctatatgaaggtggtgctctatgatgttttctatgaggatagggaacaggtgattgcacaggtcaagcaggatactcaagacgagaaaggcgtgatgtcgataattccgacgaatacctacgccaagcagattctcgatttggcagcagaactcttgcgcatagactatatc

SEQ ID NO: 4207 - DNA, 19493 bp, synthetic construct
  source 1..19493: mol_type = other DNA
  misc_feature 1..19493: note = Synthetic
aacttgattcggatgccgatgttggggcgcacgttgagtttctgcgacacttcgtagatggtgttcagctcgttgagtttctccaccacaaggaagatgcgtttgcccatcttttgtgccagcaaggccatttcgatgtagctgtggtctttgtatccgttgcagatgacgggcgaggaggagtcggtgttggcggcgatgacggcgtggagttccggtttggaaccggcctcaagccccaggttgaatttctttccgtggttgacgacttcttccaccacgggacgtatctggttcaccttgatggggtagatgatgaagttctcccccttgtagccgtattccttggcggctttggtgaagcagttgcttgtcttttcgatgcggttgtccagaatgtcggggaagcgcaccagcacgggggcggtgacgtccctcacggccagttcgtccatcaggtctctcaggtctacttgcacgctgtctttccgtggcgtcacatagacatgccccttgtcgttgatcccaaaatagttgactccccatccgttgatgttgtacagttcctcggagtcttcaatgcgccattttctcattgcgtatttataagtttaaaagttcacgaagcatgcggacggtgtcctttattttatcgtagttgtccagcagggtcacgtccagtgtgtagcgtgcctggctgtagaaaggttctcgggtggacaaggagtcccggatgtattgtttcatttcgtcttctgtcttgtccttcagtagcgggcgttccactttgcccattttcaggtggcggaagaggatgtcgggcgaggctttcaggtacacggtctgtgcctgccggttcatgtattccatgttgtcgaagaagcacggcgtgcccccgccgcaggagatgaccacgtcttcgaactcagccacttcgtgcaagatgttccgttcgatgtcgcggaatcccttttcgcctttttccgcgaagatttgggcgatggtccggcggtgccgttcctcgatataccagtccaagtcgtagaaagggaggcccagggcttgcgacaaagctttccccacggtggttttcccggcccccatgtaaccgattaatatgatgcgtgtcatttctttctggtgtacgtgcgtttgcgtgccgtttgcggcttttctgcctgttccttgatgacgtccatgcactcttccctcgtgaggtctttggccctttcggccagtgctttgggcaagcggtagttgctgcctttgtaggtgatgtaggggccataccgcccgttgagcacttcaagctcggggtcgtcgtcgaaggctttcaggtggcgtttctcttcggcctgccgtttctcgaggatgagtttgatggcttcctgaagcgtgatggtcatggggtcggcgttcttggggagcgatacgtatttcttgtcgtgcagcacgtaggggccgaagcgtcctgtgccgatggtcaccttgatgccttcgaacgtgcccaggtcgcgcggcagtttgaacagctccaaggcttcctgcagcgtgatggtctccaggctctggttggccttcatttgtgcaaaccgcggtttttccgtgtcgtccgccgtgccgatctgcaccaccgggccgaagcggcctatcttgaccgacacgggtttgccgctttgcgggtcggtgcccagcaggcgttcgcccactttgtgctccgatttggcatgcagggtcttttccacttccggttcaaagtcgccgtagaagtccttcatcatctgtgtccattcggtctttccctccgcgatgtcgtcgaatttcttctccacttcggcggtgaagttatagtccatgatttctgggaaatactggagcaggaagtcgttcaccaccgtcccgatgtcggtgggaatcagttttccccgttccgcgcccaccacgatgcgtttgttttgcgggttgatgtcgttgcctttcagcgtgagggtgagctgttcccgctcttccccttccttgtcgcctttggtcacgtattcgcgttgctgtatggtgctgatggtgggggcgtaggtcgaaggccgtccgatgcccagttcttccagtttcttcaccaggctggcctcgttgtagcgcggcgggtgctggctgaagcgttgcgtggcctgtatttccttgcgtgccagttgttgtccggcttccatgggcggtagcaggttgctctccgccggttcgttttcctggtcgtcgtcgaagctttcccggtacactttcaggaaaccgtcgaatttgatgacttcgcccgtggccacgaaagcggcttcctgtccgctcacgctgatgacggcggtggtcttttcgatttccgcgtcggccatctgcgaggcgatggtgcgtttccatatcaggtcgtagagccgtcgttcctgcggcgtgccctcgatttccgtctggtccatgtaggtggggcggatggcctcgtgcgcctcctgtgcccctttggtcttggtgtggaactggcggctcttcacgtagcgttcgcccatcagttccttgatggccgccatgctggcgttgatgcagagcgaggagaggttcacggagtcggtacgcatgtacgtgatgcgtcccgattcatacagccgctgggccaccatcatggtctgtgccacggtgaagcccagtttgtgggcggcttcctgctgcagggtcgatgtggtgaacggggctgccggcgtgcgcttttgcgggcgggtagtgatttcccctatggtgaacgtggcgtccttgcagttttccaggaagcgcatggcctcctccttgctcttgaagcgctggttcagttcggccttgatttcgttgccgcctttgtcggccggcaaggtgaacacggccgtcacgcggtagctttcctcgctcttgaactgttggatttcccgttcgcgttccacgatgaggcgcacggccacgctctgcacccgtccggccgagagcgcgggtttcacttttttccacaacacgggcgagagcttgaagcccacgatgcggtccagcacgcggcgggcctgctgggcgttcaccaggttgaggtcgatgtcgcgcgggtgctgtatggcttgcaggatggcaggtttggtgatttcgtggaacacgatgcgcttggtgtgttccggcgtgagtcccagcacctcatacaagtgccacgagatggcttctccctcgcggtcctcatcggaagccagccacacggtctccgccttgtgggcctcggccttcagctcgttcaccagtttggctttctctgtcgggatttcatattgcggggtgaagctcgtcgtgtctatgctgaactctttcttcttcaggtcacggatatgcccgtaactggataataccttgtagtcgccccccaagaacttctctatggtcttggctttggcgggagactccacgatcaccaaatttttctgcatgctttgtccttttataaatttggcagcaaaagtaggaaaaaaagatagattacaccttatatataacactttttttgaaaaagcgccgtgcggtcgttgtctttttccttgctgtgtacgcttacaggagttcggccagtcgcttgatgccccttctcacggagtccatcccgaactcttcggggcgtagctccgcgagcggcagccacatcagctcggccgcgtcgtccatggcccgggccggtcgccagtcggccaccgtgcaacggaagaagatgtcgacggtgtgcaccaggaagccggagtagaggtaggtgttgggctgcgagaacaggaactcggtgcgcgtcacgtccagtccggtttcttccttcacctcgcgggccatgccttcctcgctgctttcaaagcagtcgcagaagccgcccggcaggtcgagggtgcctttgcccggatccttcccccggcggcacaccagcagctcgcgccggtcgttcaggatgacggccaccgtggccgcgctgggattgaaatagtacgtgaagccgcagtcctcacaatgtttcgatttacagttgtgctccacgaagcgcgccgcggcaggggccggggcctggccgagctgggagccgcacttggggcagaagtggaattgtgcgaaaggatgttcgtgtgccatagatcttgttggtttttacggatgcaaaactacgaataaaatttggaaaatcctccggaaatccgtatctttgaataaccatttgattaatgactgaagcatgaaaaaacatttcttttgtatggcgttggcttccttgtgcatttgtggggcggccgcttatgagactcccacgatgggatggagttcgtggaacacgtatggggtgcagatcagtgaggacttgatcaaggcgcagaccgatgccatggtggaaaagggactgaaagacgccggttatatttatatgaatatagatgacggtttcttcggcggacgggacagcgagggccatctgctaatccatcccacccgtttcccgaacgggatgcagaccgtggtggactacatccattccaagggactgaaggccggcatttattccgatgcgggcgagaacacttgcgcgtcctacttcggcggcgacctgattggcaagggcgtggggctttacgggcacgaccaggaggacattgacttgtatttcaaggaactcggattcgatttcatcaaggtggacttctgcggcggcgaaccgggctacaatgaggacaacctggagctgtcggagcaggagcggtacacggccatccaccaggcgattgtcaacactgggcggacggacgtgcggatgaacgtgtgccgctgggcttttcccggcacttgggtgcacgacgtggccacttcatggcgcgtgacgggcgacatctatctgggatggaattccgtgaagggcatcatcggggagaacctctatttgtcagcgtatgccacggagggcaagttcaacgacatggacatgctggaggtggggcgcggcttgtccacggaggaggacaagacgcacttcggcatgtggtgcatcatgagttcacccttgcttatcgggtgtgacatgaccacgatttcaccaaccgccctcgacctgttgacgaacggggaactcatcgccctgaaccaggacccgctggcattgcaggcctatgtggtgaagcgggaaagcggggcttacgtgctggtgaaggacgtggagacactccacggcacgaagagggccgtggctttctataacccgaccgacaaccaagtctccctctcggtggatttcctggaactggagctgggcggaaaggtgctggtgcgcgacttgttccagaaggaagacgtgggagagtttgagggagacatgacggtggagcttccggcccatggcacgcggatctacaagctgcaggccgagaagcgctatgagcgggtgaagtatgaggccgagacggcatggctggacgcctatcaggaactgacgaacaaccaggcggcggagacgggaatctacgaggaggcggatttctgctctggcggcgcgaaggccggctggctgggacggagcgagaagaacgacctgcagtggaggaacgtctacagcgaggaaggcggggagtatgagctgacgctgacctatatctgtggcgaggaacggaaactgtatctgagtgtgaacggcggcgagggcgaggaactctcgttgaattccggcggttgggacaagccggcccggcggacggtgaaggtgacgctacagaagggcgacaacctcgtccgcctgtataatgcggcggaatggatgccggacatcgactgcatggagctggcgaaggcgaattccttggacgtgtacaggcagcagctggagagtgccgtcggcaaggcccatgccgctttgcagaaggacttgccggacaatgtgcggaaggcggtagaggacgcgctggccgcggcggaacaggtggaagagacccgcgaagggtatgagcaggccaccggggcgttgctggcggcggtggagagcgccctgcaggttcaggccgcatacggacgtttcaccgcattgctggagcagtgccgggagaacatgaaaaaatcggaggccggcgaggcactggaagcgttcacggctcaggtggagcaggctgcacggcaggccggggaggccgccacggagaaagaggtggacgcggccatggcttccttgagtgaagccgcagccggtttcttcacgtcggatgaggcttggcccaaggaaggggagagatgggagctgacgttgctgatggacaatccttctttcaatccggacgagagtggatggagcgacatgccgacacgggggagcggcgtggcggagttctacaaccgtaacttcaatatgtctcagacgctcaccggcctgaaaaacgggaagtataccattcaggtaaacgctttgtaccggacgggggagaacgatggcggggaagcctacaaaagcgggacggaggcgatcccggccactttgttcgccaaccaggagtcgcagcccatcgtttccctctatgcttttccttatgaagaggagaatccggatttcggagacttggacttgaaaaacggctatatcaacagtatgtatgcggccagcgtatgttttgcgcaggggtggtatgtcaacacgatggacgtgaatgtggatgacgggcggttgcgtataggattgttgaacaacgggcagaaattcgactgttggtgctgtttcgatgacttcaggctctactacgaggctccggagaagggagacgacgtggcggaggtcctggcgcaggaaagccgggcggatgtctacacgattgacggggtccggttgaaggcggatgtgccggagggcgaggcactggacgggttgcggaaggggacgtatatcgtcaacggaaagaaaatcgtcaaggattaggattgcattccggcaacttgtgatacattccggtacgaaacggcagacaggtttgttaagcagctgtgagttttccgtttcgtaccggatttcttttttcttgaccatggcctgccaccgtgcgacggcggcaggtacaatccgtttgaagttcatgcttttttgtttttctcgtcgcaaatatgcgacataaagacgctttcgacaaattttcgcctgaaacatgccgacaaccatcttatctattgctatttagctatgtcttgtgaagggccgttgcggccgtatggtgaaccctcgtgtgaaccctctgccggcagagggttcaccgcaaacgtctgtggcacagcccgtctgaaccctgcgaacccttttcctttaaaagttcctgaagcggggtgaaagtccgcgtcgccagtcccgtttcccgccctgtccgcatgtcggatttccgccgaccgctttccgttcgctctccttccgcaaggcgcgatgcgcttgtgcgcacgacgcggtcggaagtttttaggttgatgggcaaaatgggagctgctttgtctgtggaagatgggcaatctgatgttcgggtctgaaacagatgaagggttaagaaggctgatgtgtaacgaatatgaatagtcaacatattacttaattcggataaattacgtatatttgcaacattgtaacgtggtgttttatggaaaataagcatatattatccgatcaggatgtagacgaacttttgcaactttcagatgacgttgtacaagaacgtttaaggaagtatatgttctttcttttaatttccgatggactcacttacatccggaatcattcagaaaacaaagttccatacacaataaatgtctttgaaaggtataattcagatgagcctactacaagttgggctatggctgaaatcctaaaattccatgatggaggggcgtatccactgcttaatttgttcatagagaacttccttgttccaattggctttagtcttgaatggatagataatccaaccattacggcagaaaaagataaaatagatatttgtgttaaggataagaagtatgctataatatttgaaaataaggtgaaaggcgcaggttaccaacccaatcagattgcccgatatattcataagctcaataatatgccaggcaaacaatatgggaaagacaatatctttattgtcttaatgccgttctatcgcgatgatgattatgttcaaaatatgtcaaggtctgtatggcggcttcctatagatcaccataaggctaagcatgaacagcgatgtgttgctgaacacgattcttgttggtgtgattataatcagtcggattgggagaaacaatgggatgttgctttctgcaaatcctgcattaagacgtttaaacaggactatgaaccgcatactattgttttgcaacatgaactttctgaatggttaatcaatgattgtttaaagtttgttcctgctaaggaaaccatactcaaatcatttattcttcagtttgcagattttcttaatctgcaatatgggacaagggaaaatcaaaaattgaaatgtgaaatggagaaatatttaagggaaaaactgttcgataagaaaaagtccaatattgataattggaatgtcatcaatgataagcttagtgagattaggaagttggaagaagaggtcgggtttcttcttgaatcgatctcacgtgatgttattgacgattggtatcatgaattgctgcctgcttggaaatgttatggattaaaacacgaagaacgcaaaagttttggcatctgtgtacaaggtgtttggattggatgttgggatggtagagacacggatgagtataaacaatattggggattttattcagagaaagagtttacttcaaagcaacataaaatgatcaaggatattctggataaaacgaatataagtgattctcgtcaagaaaggaataggtggtattggaattatacttgcaatggcgctgagcgttgcaatgatttttataatgctgctattgaattaggatatttagggctattcagtaaatagcccgtaaacgccgccttccatgacgtcaagttcttcagccctattccggattgaaaaaggaagttgacaatggtggttatatccatgcgttttgaccgcatgcgttcacaacgcttcgtcggtagcatgtttgtgcaaccgatgtcatccagtaaatccggcatatttatgcggctgttccgtttttttgtagcttctcttcttgccttctctcacgttctgccaggatggatttggacaataagggaaatcatgaatcataaaaagcataaaaaactcccaccgaagcgggagtataggttttacccttcggcccgaaggcctttattgtgataagatgtagaaatcttatgcagcaaagataaatcttttttcttatatttgcaaacaataatcggaatatttgaattttaactataatactataatgaagaaacgaattttagggatagataccggcacaaatagtataggatgggctatagtagattgtgatgatgaagtatcggaaaacagatatgctttgatagataggggcggaaatatctttcaagaaggcgtgaagatagaaaaaggtatagaatcgtcaaaagcatctgaacgtaccgggtacaggcaccaacgtgtcggttactggcgcaggaaaacgcgaaaaataaggttgcttaaaattcttgtgaagaaccagttgtgtcctccgttgtccatggaagaactgaaacagtggcgttcacagaaaaaatatcctcaggaagaagcgtttatggcttggcaacgtactgatgataacacaggcgataatccttattatttccgtcatctctgtcttacccaaaagctggacctttcaagtttaaggaatcgttatatcgtaggccgtgccctctatcatctgaatcaaagacgaggttttttaagcaaccgcaaggagaataccgaggaaagcgacgggaaagtcaaacaagatatagaaaaattgtcacaatccatgcgggattgtgaaacagagtatttgggggaatatttttatcggttgtatcagaaaggtgagaaaatacggacgcattataccagtcggatggactgtgaaaaagaactgcttgctatttgcaggaaacagggtttgtctgaagaactgacccaagaacttcgccagacaattatcacgcaacgccccctaaagtcacaaaaacacacggtggggagatgtgtttatgagccttccaagtccagatgcccgatatctcatccgctgtatgagcagtatcgtatgtatgcttttatcaacaatattagaatgcaaggacccgctgacgatgaactgagggcactgaccgagaaagaaatacagaccatagttcctttgttcctgaggaaatccaagaaagagttcaagtttgaggaaatagcgaagaaactttcaaacagtaaaaagaacttctgttattacaaagaccggacagagtgtgcgtaccgcttcaattattatatggataccttggtcggcggttgtccggttattgcccaattgtctgaagcatttgatgtaaaaaatcaaatagatgaatggttggaaagggcttgcgaaatctatacacgcggttctggggaaaaccgttatgaaatcatgaacgacgtttggcatgtattgttcttttttgatagcgaggacaaactaaaagagtttgcccgagagaagctacaaatggatgaggaacatgcttgtttattcagcaagatacatctgccatcgggctacgcatcgctttccttgaaagccatcaggaagattcttccttacatgaagacgtatggcatgatttattcccatgccgtgttcctggccaatcttcccggtgtagtttcctgtaaagtggataaagatgccttgctaccaatgttgccgcgtgaagacgcggatgacattgtgaaggcgttctacgactacgaccctgccacgtccgccatccgtacccaagaagagtatgtgaagcgatacatcgcctataaatacaaccttgatgaaaaggaggaacgtaagctgaagaagctttaccacccatcaatggtagaaacttttcccaaagtgcgtcaacagaccaccggaggttattatcaattaggttcgcctcgaaccagcagtatgcgcaatccgatggcgatgcattcgttgttccgccttcgccacgttgtaaatgcgttgttaaaagatgggaagattgatgaaaatactaccatacgtattgagtttgcacgcgaactcaatgattctaacaaacgtgcggcgatacgtcagtggcagaatgaacgcaacaaacagcgcaaggcggctgcagaaagaattaaggaatatttcggcagcaattatgagccttcatcggttgatgtgctcaaatatttgctatgggaagaacaggggcatcattgcctttatacggggaagcctatagacctcgcggatctttttgatgccaataaatacgatatagaacatactgttccccggagtgtaggcggtgattctacagacgagaacctgacggtctgcaacagccgttataaccgcgaggtcaaacgggcacaacttccgtcgcaattggccgaccatgaacagattatggaacgaatagccgattggaaagaaaaaagagagaaactggaaaaggaaatacgcaagattaatacacggggcatcagtgataaagaagtaaaagaccgtatgattcagaaacgtcatcgcctcatattggaatgcaactattggaaaggaaaatatagccggtttaccatgaccgaagttcccgaaggtttttcccgccgtcaaggagtggatataagcgtcatctcaaaatatgcgcggtcatacttgaagtctgtgtttagaaatgtttatgtggttaagggcatcgcgacctcggatttccggaaaatatggggaattcaggaggaatatgagaaaaaacagcgtgtgaatcattgccatcatgtgatagatgccattaccattgcatgtatcggtaaagctgagtatgacagattggcccagtattatcatgatgaagagcgttgggaatggggaatggacaaacggcgtgcagaattccccaaaccatggagcacgtttacggaggatatgaaacatcttgatgaagcattacttattagccattataccgctgataatttgggtaaacaaactcgtaagaaactgcgtaagaacggaaaaatcaccggccaatatatgcaaggcgatacagctcgtgggtcgttgcatcaagatacctattatggagctatagaacgtgacggagaaatcagatacgtagttcgtaagcccttggacctgttggatgaaaagaacgtaaggaatattgtggacgataccgttcgtgaaaaagtggaagaggccataaagcaatatggcaatctgaaaaaagccgtagaagccggcatttggatgaatcaagacaaacgggtcgctattcgtaaagtaagagtctatgccccgcaaatccagcgcccgttacacatccgcttgcagcgtgacctttcgtctaaagaatataaacataaattccatgtggccaacgattcaaactacatgatgggtatttatgtggggaaaaacaaaagtggcaaggagaagcgggacttcgaattggttaaccgcctggatgccgtcggatattataacagcggggtatcggcacaaggcattgatatattgcgtccggaaagcgacaatggctatccgctaagatggacactcaaaataggaacgatggtgctgttgtatgacgaaagcccagaagagatatacgaactgggcgaagcggaattgtgcaagcggctttataaaataacaggaatgtcttccatgacagtgcatggatctaattatggtacgctttctttgttgttccatcaggaagcccgttcttcaacagatgtcaaggcgaagaatggggcatttaaaaacggtgaaccgacaagggcggctatcgtcttgcttcacactcaatttaaggccttggtgcaaggtcgtgactttgaaatggatgatttgggaaaaattaaattcaagaaccgatgataaagcaaaccttgttttttacgactccagtattgctgtccttgaaatataaccaaatagaaatacggtataaagacgttgaagaggttataacaaggccgatagaagatgtgggtgttgtcatcgtggagagccagttggtgcagttcacagtcccattgttgaatgccttggccgacaataatgttgccgtggtattctgcaatgcgcaatgcatgcccaacacgatgttgatgcctttggagtcgaatgccgtccagcaagaagtgtaccggcttcagacagaggtttccttgcctacgaaaaagagaatatggaaagaaatcatagagcataagatacgcaatcaggccgtattgctcgacctgttaggccgcgatgggaatcttttaaagccatattatatgaatgtgctgtcgggcgacagtgataaccgtgaagggctggctgccaaaatctattggcagcagatgtatggacggtcattcaaccgtagccgcaatggcgagtctcccaattcatggttgaactatgggtatgccattcttcgtgcggcggtagcccgtgcgttgttggggtccggactgttccctgcttttggtttgtttcaccgtaatcgttacaatgcgttcccattggccgatgatgtcatggagccttatcgcccgtttgtggactatgccgtatatcagctcttcgaagattcgccagaggcttgtttagataaggaggtcaaacagcaacttgtgagggtgctgtttacagacgtgaaaatgaaaggtcaaatacgtcctcttcaagttgctttgtccatgacgacggcatctcttgtccgtgcgttgaaagataaaaaggaaagtatcatttatccttcgtttgtatgagtgaatgtcgtttgaatgcttatcatatcatgtggctgtttgtgttctttgacttacctgtaacaacaaaacgagaaaggaagattgcttccgattttagaaaggatttattaaaggatggatttgtaatgatgcagttttctgtgtatatccgtcattgcgcatcatacgaaagccttgttgtacataaaaagcgcgtaaagggtgtaatgcctatcaccggaaaagtaagcatgcttgcagtcacagacaagcagtatggagaaattgaaaccgtatttggcaaagctgcaaaaaaagagataaaagcacccatccaactggaatttttttagtatttttgtggtgtcttctatgtcggtatagccacttcttgttgtcaatatgcgcatatgaaacttatttccaatcgcttaaaaggctcatgttgtggtttgatgtagaaaagaacggatatacaaccagcgtacggtgtacgctacaatggctatgttgtggtttgatgtagaaaagaacggatatacaacaaacattcttaacacgccaaaggtaaaaaagttgtggtttgatgtagaaaagaacggatatacaacacgctcgctcgcatccgctcgctcggcttcgttgtggtttgatgtagaaaagaacggatatacaactgatggtcttgctctgctcctccatgagggttgtggtttgatgtagaaaagaacggatatacaaccgtattatcgtgcttaacaagttcataaagttgtggtttgatgtagaaaagaacggatatacaacaaaggaggatattaagaaaatcatacgtgacgttgtggtttgatgtagaaaagaacggatatacaaccaggcggaaacgataaacagccttttggaagttgtggtttgatgtagaaaagaacggatatacaacctgatgagacgtttaaggctcgtgttaaagttgtggtttgatgtagaaaagaacggatatacaacattatacgtccacggagcagcgtcttcccagttgtggtttgatgtagaaaagaacggatatacaactcgatacctttcgaagcaccatcaaagccagttgtggtttgatgtagaaaagaacggatatacaacgcataccgttaagaaggtctttatccagaggttgtggtttgatgtagaaaagaacggatatacaacttctgatatgcaagaagaggccacggagagttgtggtttgatgtagaaaagaacggatatacaacctcagatatatcttatggataggggcgaggttgtggtttgatgtagaaaagaacggatatacaacttatattttttgttttggaggtcagttttagttgtggtttgatgtagaaaagaacggatatacaacattcaggatacggtcagcataacccatatagttgtggtttgatgtagaaaagaacggatatacaaccaaatgcctcgacgcggggaagccattcaggttgtggtttgatgtagaaaagaacggatatacaacagaaccgaacacggaatatccttgatacacgttgtggtttgatgtagaaaagaacggatatacaacagcggactgaatgtcattctcaacagcgcgttgtggtttgatgtagaaaagaacggatatacaacctccgcagaagtagaaagcggcctataatagttgtggtttgatgtagaaaagaacggatatacaacaggtatctttcgaagacattcactttgtggttgtggtttgatgtagaaaagaacggatatacaaccttacctaaaagatttatataagattttgggttgtggtttgatgtagaaaagaacggatatacaacaagccgtgcttcaagttccatatcgcgcggttgtggtttgatgtagaaaagaacggatatacaacaatctcttttatcacagaacccatgtgaggttgtggtttgatgtagaaaagaacggatatacaacaatcgactgcctcacaaggagaagagaggagttgtggtttgatgtagaaaagaacggatatacaacaaaacatgcaaatctcatccatctatcagttgtggtttgatgtagaaaagaacggatatacaactaattcgctgttgattgaacaacacgccgagttgtggtttgatgtagaaaagaacggatatacaactctcctcaaaaccttttggataggtatttcgttgtggtttgatgtagaaaagaacggatatacaacagcatctttcccccgtatggacaccagcaggttgtggtttgatgtagaaaagaacggatatacaaccatcaggatataagtccacaatggtatatgttgtggtttgatgtagaaaagaacggatatacaacaatatcccgatgttggtcgatgagattaagttgtggtttgatgtagaataaaacggatttcattgaaatacctcccggctctccccattctccttgatgcaccagaactgcacgccttgagcattggcgaaatccttcatccgccaggcggactcaaaaccgctggctacgaagtgcatgggaacgaggcagtccacttggaactgttcgatgaactggcgggcaccacgggtgtagccattgccgatgcggccgtccacgggaaacatggccacgtcgaaatgggaggtgattttgcggatgtccttcaattcgcccagatagcgcttttcttccttttccgggtcgatgcggagcccgaattccgggctgtaggcttgtttgctttgtccgctttcgttgaggaaccgggcataccaattgttcaggtcgccggcgtggaatatgatgcgtccttctgtttccacaatccatgacacgccgctgtcgttgcttccggcggcacagacatggataaggctgtcctgccatgtcgctcctttggccaaccaggcgtcggcttcttctttttttgcccgccggtgtttcagaatgtctttggagagaatgaaggagatgttcgttttcttgagtttccatgaaaagatgtcacggttgaagtggtcctcatggaagtggctggaaaatacgtacatcggtttgggggattccaataaattcggcacgacgtgggccggatccatccaatagtcgaatatcaggatgcatctttgtgtctcaagggcaaaaccactatggaaaatgtacgtcagtttcatgaactctttctttgcattgttcccatccatattgcaaagtaacaaaaaagagttattaaatggaagagtggactgacaaaagaacgcgatttcggcgaataatcggataaaagtggctatctttgctcttgatttatgttatacgtataatattaagcaaatttagaagattatgttgtcagtagaagaattgaatgaccgtttgatagatttggcctttgccgaggacattggcgacggcgaccataccacgttgtgctgcattcccaaggatgcgatggggaagtcgaaactgctcatcaaggaggaaggcatcttggcgggtgtggaaatagcgaaagaggtgttccgccgcttcgaccccgagatgcaggtggaagtgtttttgcaggacggggcgcacgtgaagcccggcgacgtggccatggtggtgacgggacgggtgcagagccttctgcagacggagcggttgatgctgaacatcatgcagcgcatgagcggcatcgctaccatgacgcacaagtatgtggagcgcctggaggggacgaaaacccgggtgctggatacccgcaagaccactccggggatgcgcatgctggaaaaggcggccgtgaaaatcgggggcggggtgaatcaccgcatcggtctcttcgacatgattttgttgaaggacaaccacgtggactttgccggaggcatagccaatgccatcaaccgttgccatgcttacctgaaagaaaaaggcaaggacttgaagatagaaatcgaggtgcgcaacctggacgaactgcggcaggtgttggacattggtggcgtggaccgcgtcatgttcgacaatttctctttggaggacacacggaagggcgtggagatggttgccggccggatagagacagagtcgagtggcggcattacttttgacacgattcgcgattatgccgagtgcggcgtggacttcatatccgtgggagcgctgacccattcggtcaaggggctcgatatgagtttcaaggcttgctgatgcgtatggacaggcgttggctggcattatgcgccgcttgcgtgctggcctttccggccggtgcgcaggaggcgcgtttccactctccggtggatattccgttcctgatgtcgggcagtttcggcgaaccgcgcccgaaccatttccattgcggcatcgatgtgaagacgcaaggcgtgacgggcaaacgagtgttggccgtgtgcgacggttacgtgtcgcggctcaccgtggggtacgacggtttcggcaatgccgcgtatgtgacgcatcccaacgggctggtatcggtgtattgccatctggaccggtttgtgcccgaactgcaagagcgggttcgccgacagcagtatgaagaggagtcggagcgggtagacgtggcgttggctcccggggatttccccgtaaaagccggagaactgattgcttacagcggcaataccggtgcttcgctcgccccgcatttgcacctggaactgcaccgggtttcagacggtgctttggtcgacccattgccttatttccgccatctggccaaagacacgatgaatcccgtggtacacggcgtgaagctctatccttgtcccggtcttggattggtgaacgggacggggcgtgccaccacgtttactgtcacggccgatgcttccgcccgggtggtgaaggcttgggggcgggtaggcgccgcggtctggacagacgaccgcatggacgacacgtacaataagttcggcctttggcgcatcgcgttgaaggtggacgggcggcaggtgttccaaagcgtgatggacgagttcttgccggacgaaaaccccttggtgaacttttggggcgactatgcgcatttccggaaaaccaagcattggtatctgaagtcgttcatcgaccccggcaattcgttgcaaatcctttcggcggatgaaaaccgcggctgggtggacatcaacgaggagcgggattaccagtttgaatataccttggaggacttgaaaggcaaccgccgggtgtgccgttttacggtgcgcggcgtccggaacgaggcggctctggctgaagaggccgaacgtgagcggcaacgcgcggaggcaggttcgcgcctggtgtacgatcgtcctaacgtggtgcaggggccgggcatggaactccgcattcccgtcggtgcattggtccgggacgaggttgtgaacgtgcggatcgaagcgcaggaagagggcatttccaaccgttacaccctgcacgacgatttcttgcccttggccaaacgggccacactgatgctggcgccac

SEQ ID NO: 4208 - DNA, 18894 bp, synthetic construct
  source 1..18894: mol_type = other DNA
  misc_feature 1..18894: note = Synthetic
tggataagcaacaccgccactgccgctatgatgtttccgatagccttaggcctgctcgaggcgattagggaaatgatggcggccaacggcaagaccataaatctgcgcacgtataaatatgccacggggctgatgctgatgacagcctacgcatgctctatcggcggcgtgctcacccctatcggaacccctccaaacatcataatgctgggtttcctgagcgagctgtgcgaaatccacatttcattcttccagtggatggtgtggggctttgtcgccatggtgttctatttcataataacctactttctgctttacaaaatgttcccctcagatgttgagcacatagagggcgcacaagagtttatcggcgagaaggtaaggtcgctcgggcgttggacaagagcgcagaaaaacacgctttttgcctttatcgtcgccgtattgctgtgggtgactcctggtttcctcagtatcatactcggcacagagagcgagactctgaacacatacaacaagctgtttcccgaggccattgccgccatgatcggcgcattgctgctgttcttccttcctgtagacttgaagcgccacaaaatgactcttgagtggaaagacgctgtcgccggcgtagaatggggcacgctgctcctgtttggcggcggcctggccatgggcggcatgatgtacagcaccgggctttcaggatggataggcggccagattatcgccatgcttggcggcgagccatcggagctgcttctcgtcgccgtattctgcgtaatgtcgctgctgctgtctgagcttacatcccatacggcagccaccaacatgataggcccgctggcaatcggcgcagccctgtcagcaggtttcagtccaattcccgtagccgtgggcgtagctttgtcagcctctctgggcttcatgctcccagtctccacaccgccaaacgccattgtctacgcaagcggatatatcccgattactaaaatgatcaagacgggcgttattatcgacatcataggcattgccgccattacaattcctatcgtaatgctgctcgtcaacctgattgtataggcatccggcggcagcagccatatatgtggagaaatgtcagagcctgaagattattcggctctgacatttctcatatattccccgtaactgatgtaccgcccgcccatagatttaagatgcggtgtctcaaactggcagtctatcaccattccgccccgctcctccatcagccgcgcaagatagatcaaagccaatttactggcacccggcacaagcgagaacatactctcgccgaagaaacaccgccctatcgccacgccatagagacctccgacaagcttttcaccgctgtcccatacctccacgctcgccgcaaatccctggcggtgcagctctttgtaagccgccaccatatcctcgccgagccacgccccctcctcgtcgtagcgcaaacgtgagcaagcctcaatcacttcgttgaagcctacggaatactgccggcggttcataagattgcgcattgagtgcgagacgtgtatctccggcggaaatataacaaagcggcgcatggggcaataccacattatctcgggacggtcacggaacgaataccacggaaaaatgccgttgctgtaggcaagcagcagcctgtcggccgacaaatcgcctcccacggctatcagtccgtcctcgtcgccatacctcggatctgggaacgcaagctccttccctattctaaaaaccatactcttctttattccggtggaaatttatatgtcattctaagcctgccgcaacaacgcagcgggcaaacgctgcaaatttcggcattttgccacaaacagcaaagttttcccatacaatattttgcatccttacctttttttcctacttttgcaacaacaaaaccatagcatatatgaaaaaaactgttctgaccctcggactggcactgctgatgtcaatccccacattctcacaaggatactacacacagtactatgccgacaagaccctgacggcgaaagccaaggcaaagttctatctgtcaagcccaaaggagtttttcctgtttttcccccgcgactggcacatcgcaaaaatcaacaacggcctcaagaatctggagacaggagaggaaataagggttgtagtggtaaaaatagactatgttgactaaccagactaacagagacacattatggctgtaggaaaatggattggcggatttctcggcttcatgaccggaggtccgctcggagccctcgcaggctttgtattgggctcaatattcgacaatggcatcgacagtgtaaaccagccttacgacggcagcagcactttcgacggcgacggcagctacgggcgcggctcatcgcaggagcagcagtaccgggcacaccagcagcaggtgtacgagggacagcgtaactcgttcagattctcagtgcttgtactggcatcgtacataataaaagccgacggaaaggtgatgcactccgaaatggagtgcgtgcgccgtacgctgcgcgcgaatttcggcgagcaggcagtccatgagggcgagcagattttgctcaagctcttcgagaagcagaaagagatgggcccccggcaataccgcagcgtcatagagagcgcggcaaggcagattgccgccaacacagactatgcggcaaggctgcagctgctcaactttctcgtaataatagcgcaggccgacggcaaagtgcatccgtcagaaatccaggctctcagagaaatcaccattgccctcgggctatccctgccggatctcgagtcaatgctcagcctctccagcggcagcaccgacctcggggcagcctacagggtgttgggcatctctcccgacgcctctgaccaggaggtgaaggcggcataccggaaactcgcactgcagcaccatcccgaccgcgtggcaaccctgggcgaggacgtgagaagagccgccgagaagaaattcaaggagataaacgacgcgaaagaccggatatacaaggcaagaggactataaacggcaaaaccacaaacaacaaaaacggcaaggcatatccgtatgtgccttgccgtttttgttgtttatacggtttctgaaaactattcctcctccttcttagtcttctttatggcgcgcttgcgcttcggcttctcctcagccacggcgctctgcacgccagccagctcggggtcgataagaatgcggccgcaatactcgcagactatgattttcttgtgcatctttatgtcgagctgtctctgtggcggaatcttgttgaagcagccgccgcatgcgtcgcgctgaacataaactatgcccaggccgttgcgggcattcttccttatgcgcttgaagctcgacagcagacgcggctcaatcttcgtctccagctcgtgagccttggccttcagcctctcctcctcctcgcgggtctcctgcataatctcgtcaagctcctccctcttctgcctcagagccacattcctgtcgtccacaagctccttggcgtgagcaaggtcacggccgcgctcctctatcctgacgagagcgtccttaatcttcttcctgcaaagctcaatctccagagtctggaactctatctccttggtaagagtgtcgtactcacggttgttcttcacctcgtcgagctgcctgcggtacctctccacgcccgcctcggcgtcggcgatttcgccattcttctgcgacaccgcggcctgaaactcggccacctcggcctcaatcttctccatacgggtgttcaggcccacaatctcgtcctcaagatcctgcacctcaagaggcagctcacccctgagcgcgcggttctcgtcgatggccgacaacgtggtctgcaactggtagagagtgctcagcttctcctcctcagtcaattctaaagcttctttctttgccataatatatagatattataaattctcacatttttatacataaaatatcgggttggtgtttgtctctgttatctcgcaccgaacaccaggacactccctgccgataatctctctcagcagctccggcgtatattgctcgctctggtaatggcctatcacggcaatctgaatttcctgcccgtggccgaaatactggtgataccccatctctcccgtcacaaacgcgtcggccccgcagcgtatggcctcgccgagcataaatccgccggcaccgccacacagcgccacccgtctcaccggccggcgcagcagcccgtttgcctgcacgcagtctgcggcgaacacgcttttcagcatcgccaaaaaatccgcagcagccatctccgcaggcagcgagcctatcacggcctcgccgccctccaccccgccggcgctccgcctgccgccaatcagggctacgtcgcacaggccaatcttctcggccatcttgaagtttacgccgcccgcggcgctgtcgagatttgtgtgcatggcaaccacagccacgccgctcttaatggccctcatcaccgtgcgccccacatagtcgtcgcccgttatgctgcccagcttacggaatatcagcggatggtgggccactatcaggttgcaccccttggccacggcctcgtccaccacgtcctccgtaacgtcgagacacaacaatgcccctgacacttccgcccccgtcagtccaatctgcacgccggcattgtcgtagtcagcctgcagaggcagaggcgcgaatttctcaagggcacaaaccacttcctttattctcacgtctgtatatactgtgttttttttaggatgcaaagttacaaaaacgccggggaataagagcactgacacgcaaacaattaatgttttttaattgttccgggggctcacggcgcagaataatcaccaccaaagcgcccccgctttctctcgctatttttaatccgccacaatattttatagcgtaaaaacttgcctgtgtgagataaatcacctatctttgcgggaaacctaaatcttttattatgagattcaaacttaaacaagcctttgttgccgggtgtacagacttagcctgtatagaaaaaactcccaccgaagcgggagtataggtttaacaccttcggcatatagccttattgtgataagatgtaggaaatcttattctctgtgtgcaaaattatataaaataatttgtttttccaaataaatattcctatttttgtaagtattaacaaaataagaactaagaacctaaatttatggaaaaaatattaggcatcgacactggcaccaatagtttgggatgggctattgtcgaaaagtcagatgagggcaagaagttgcttgacaaaggtgttcacatctttcaagaaggtgtgaagatagaaaaaggcatagagtcatcaaaggcggcagacaggacggggcatagagctacccgcgtgagatattacagaataagaatacgtaaaatgcagctgttgaaaattcttattgaaaatcatctatgtccaccgctttctaaggatgatttgaaaaactggaagttgaagaagatatatcccaagaatgagttgttcatgcattggcaacgaacaaatgataatgagggtaagaatccatacgctgaccgccataagtgtttacatgaaaaacttgaccttaacaacctgatgaatcgctatacacttgggcgtgcgctttatcattttgtacagcgccgtggctttctgagcaacagaaaggaacagggtggagatgacacaggtgcggtaaaggaaggtattagtgcgttgtctgaggaaatgctgaattccggttttgaatatcttggtgattatttttattccttatataataaaggtgagaagatacgagaccattacactgcccgtaatgaacattatctaaaagagttcaaggcaatatgtgagaaacaggagcttgacagtagattaggctctgatgttgttaaagcgatagaaaaggctatattctatcagcgtccgctaaaatcacaaaagggacaggtgggaaaatgtgtgtttgagaagaataaggcaaagtgtccagcatcgcatcctctttttgaggaattcagaatgttgtcgttcctcaataatgttaagatacagacgccaaaggatgatgccctgcgtcctctcaataatgatgagcgtgaaaaggttatgcaactgttcttccgaaaattgaaaaactcgaaaggaaaatttgactttgaggatatagccaagaaacttgctccaaagaaaatgtatgccttctataaggaaaatccagatatgccatatctgtttaattaccctatggatgtatcggtttcgggttgtgttgtgaccgcttatctgagagatatctttggtgaagactggcttaccggtgtttgtgaagtatatactttggctgaaggaaagacacgtatgcagattctcaatgatgtgtggcatgcgctgttcttttattcaaacaaagagaaattggaaggatatgctaaggaacgtttgcagttgagtgacgatgatgcgaagaagttcagtgaaataccgataccttcggaatacgcctcgttgagtttgaaagctataagtaagattcttccatatcttcgtagaggaatgatttattcccgtgccgttttccttggcaatttgtgcgagattatgccacgatatgaatggggaattacggaaatgcgtgaggtggcgattgagaagatagtcaatgagatggataattacaatccgagtattgacaacaggacacttgaggtgtgtataaaagattatctcaaatctgaatatggagtgactgatgaggacttgaaaaaactttatcacccttcgatgatggaaacctatccgcgtgtgcgtccaaataatgatggagtttatcagttggggtcaccgcgaataaatagtgtgcggaatccaatggctatgcgctcgatgttccgtttgcgtaagttaataaacaggttgttgcaagaaggcaagatagataagaatacaaccataaacatagaatttgcccgtgagttaaatgacgcaaacaaacgcaaggcaatagctgataatgtgagggaaaaccagaagcagcgtgatgatgccagaaagaaaatatgtgagttgtataaggcagagacaggtaaggacattgagccaaatgatgatgatattctgaagtatattttgtgggaagaacaggagcatgtatgtctctacacaggcaaacagataggtatagccgactttattggagcagaccctaagtatgacatagaacataccgttccacagagtgtgggtggtgacagtacaagaatgaatcttaccttatgtgacagccactataatagagaggttaaaagggcactgcttccgtcagaactttccaatcatgatgaaatattgaaacgtatagaaccatggaaaaaaaaatatgaggatttagacaagcaaatacgccgacagcgtacaagtggtgccagtaccaaggatgcaaaggacaagattatacagcgcaggcatctgttgcagttgaaacgcgattattggagaggcaaatacgagcgtttcacaatgacagaagtaccagagggcttcagtcgtcgacaaggtactgacatcagtgtcatttcaaagtatgcccgtctttatttgaagtcagtttttgataaggtatatacagtaaaaggtattgccacttcagacttccgcaagatatggggaatacaagatgtttatgtatcaaaggaacgtgtaaaccatgtacatcattgtatcgatgccatagttatagcatgtattggcaaggctgagtatgacaaacttgctcagtattatcatgataaggaaaatcatgcgtggtatggttattctaaagccgattttgttaagccatgggcaacatttgttgaggatataaagaatgtacaaaacgagattcttgtgtcgcattacaccccagacaatatggctaagcagggacgtaaatatactatagtcaatggcaagaaagtattaagtaagggcgattctgcgagaggctcattgcataatgatacgtattatggagcaatagagcgtgatggggatatcaagtatgtcgtaagacgtgaacttgcgtctttgggtgagaaggatattaagaatattgttgatgatacggttcgcggtatcgttgaaacggctattgccgagaaaggatttaaggaggctatggcggggccaatatggatgaatgaagaaaagcagataccaattaaaaaggttaggtgctatacaccatctgtgacgaatccgctcaatatccgcaagcatcgagatgagtcggaaaaagaatataaacgacaatttcatgtggcaaatgacagtaactatgcgttggcaatgtatataggcaaggatactaaaggaaaagaaaaacgtgactttgaacttgtcaatatgatagatgctgtagggttctataaaacgagcaataataaagaagtggttggcggcagtatggtgccaatcaagagtaagcatgattatcctttagcatatatgttgaaaatcggaacaatggttttactgtatgaaaagagtcccgaagaaatttgggaagggaatgcggcagaacgatgcaaaaggttatataaagttgttggattgagttctatgcgagtgtctggctgttcttatggtgttataatattgagatatcatgaggaagcaagaccagctacagagataaaggcaaaaaatggtgtctatattcataatgaagatttacgtcctggggtaaagatgcttcatactcagttaaaagccttagttcaaggctatgattttgatataaacgagttaggtgaaattaaacggttaagatgatatgataaagcaaacattattcttctcaactccagtgtgtctttcattaaagaactgtcagttggtgatttcatggaaagacagtgacgaaaaagttacacgtcccattgaggatatagggtgtgtggtattggaaaatcagatgataagcatcacaatgccattgcttaatgagttggtgaagaataatgttgctgtcattatatgtgacaataagcagatgcctacatctatgcttatgggacttgacaccaactctacacaagcggaaagtctgaaatttcagataggcgtaagtgagccgcaaaagaagcaggcatggaaacagattgttgaggcaaagattcgcaatcaggcgcttctgcttgataaatatggattaggcagtgagggactaaaacctttatatatgaatgtaaagagtggtgatgccgacaatcgcgagggacttgcggcaagaatatattggaaccggctgtttggagatggctttaagcgtgatagggacggctctcctcctaatgccatgctcaactatggttattccattcttagagcagccacggccagagcgttgttaggttctggattattgcctaactttggtatctttcataaaagtcgatataatgcttttcctttggcagatgatgtgatggagccttatcgcccattcgttgacgacattgtttttgaactttattctaaaggttgtgtggaactgactaaggatacaaaaatggatattatgcggctgatgacttgtgatgtttctatagggcaggtgaggcgcccattgcagattgcgcttactatgacaacagcctcacttgtgaaatactatggtggcaaaataaagaaactctctttacctgtgtttgtatgacggaataccgactaaactcttatcatattatgtggttatttgttttctttgaccttcccgtaacgacaaagaaggaaatgaaagcggcacagctgttccgaaagaatctggaaaaggatggctttgctatgatgcagttttctgtttatatccgtcattgtgcatcacgggagagtcttgaagtgcatgtgaaaagagtaaagtcgttgcttcctgaatctggacgggtcagtttgctgagtgtaacagacaaacaatatggtgatatgtataatttctggggacaatctaaaagtatgaaaaaaagtgaaatagggaaaaaagttataagagaaccgattcaattggaattattttagtatatttgcacagaatttaaagcctacataccatttcttgtgtacattaacatcagaaataaattgagtgatagaatgttagatgttataggttgtggtttgatgtaggaaaagaacgatatacaacgaacaatgccgaatgtatcgactgctacgagttgtggtttgatgtaggaaaagaacgatatacaactgagagaagccacagagccgtgtacccctggttgtggtttgatgtaggaaaagaacgatatacaactctgagccgtaacggcaattatctccgtgagttgtggtttgatgtaggaaaagaacgatatacaaccctgcctctgtaaattgacgtacctcggaggttgtggtttgatgtaggaaaagaacgatatacaacttcacgatttgtaagagcatcataaagaggttgtggtttgatgtaggaaaagaacgatatacaacgtgcttcgatgccgtgtatctgatacagaagttgtggtttgatgtaggaaaagaacgatatacaacctaacaaagaagatgcaccgcttgcaataggttgtggtttgatgtaggaaaagaacgatatacaaccttcttgttgacgttgatatagaccgtgctgttgtggtttgatgtaggaaaagaacgatatacaacgacccactggatgaggtaggaacggaaacagttgtggtttgatgtaggaaaagaacgatatacaacacagcgagcaacaacccgacaagtacgaccgttgtggtttgatgtaggaaaagaacgatatacaacatttctgtgccattcttgtcttcatctacagttgtggtttgatgtaggaaaagaacgatatacaacacgtccattctgatacgccccacctcgatagttgtggtttgatgtaggaaaagaacgatatacaacggcatgacgagcgtgcgtgagtttgtggagttgtggtttgatgtaggaaaagaacgatatacaaccatgagaatgattgatgagagctatcccgagttgtggtttgatgtaggaaaagaacgatatacaactctatataaaaaaaatagcccgcttggtagttgtggtttgatgtaggaaaagaacgatatacaacgcagacgttaaggcatcacgtaaaactatagttgtggtttgatgtaggaaaagaacgatatacaacacagaaaaatataggtttctcaatgagcagttgtggtttgatgtaggaaaagaacgatatacaacaatgtatgtacatggctatttgagtatgggttgtggtttgatgtaggaaaagaacgatatacaactgttccagaacgaacccgcacaaacactgagttgtggtttgatgtaggaaaagaacgatatacaactgattagcgatgctgaggtagccgcgagggttgtggtttgatgtaggaaaagaacgatatacaacaaaacataataactttgcaaacgtaaacggttgtggtttgatgtaggaaaagaacgatatacaaccttcaaaaaaaatcaaaaatcaaagttttgttgtggtttgatgtaggaaaagaacgatatacaaccaattacgatttgtgtgttaacgtcacgtagttgtggtttgatgtaggaaaagaacgatatacaactacgtgaagtggggtaaggaacttgtattggttgtggtttgatgtaggaaaagaacgatatacaactttagtgaattaatataatgtttccgtctggttgtggtttgatgtaggaaaagaacgatatacaacacacgttccgtcactataatgacgataggttgtggtttgatgtaggaaaagaacgatatacaacaataacagaaccagcaagtttacctaaaggttgtggtttgatgtaggaaaagaacgatatacaacgagtgcatcggattcatggaacgagactatgttgtggtttgatgtaggaaaagaacgatatacaactaagaaaaaaacgggacggtaaccactctgttgtggtttgatgtaggaaaagaacgatatacaaccaattgtacgctttctgttgcggtctcaagttgtggtttgatgtaggaaaagaacgatatacaactaatagaaactctttttgccataatttcagttgtggtttgatgtaggaaaagaacgataccctgtaagggcaaaagcgtaaacaaaccaatgtatctatctgataattaatgcgtttgcccttgcagggcgcatttctcacaccttaattgcgaacccagggtgccgcttcgctctgccctgggctaagtgtctcataccccttcagggcgcgctgcttgagatttccacataaaatatagcagacctatattaatttacctccagtatttttctactgagtccgatattgcctttcccattcacagatttatcagattataagaatttaattccgtcaacgggttagtttcttgtaaaatcttacttttaattgtacctaaatggaattgagacttcagaggtaaagagattatttagcctacattattcatagagtaccaaagaataagtcagtgatacggcgggaagcaaaaccgcacaaacgtattttttctcgacaaagaaaaaaacaagaaagagttttatccaagcgtcaagtcctttgccccggcaagcagttcggccagtttgtctttcccgacaacgtgcactctgagagccttggagacaggaaaggagttgaagtagggttcgtctgtccagaccagtcttacggagctgacctccgctgccctggccacgcctgccgtatatgcgccgatgctctgcctcaccctcggcagcaccttgaaccccgtgcggccgtcgctgaactccacaacggccacgacgtgccattttctgctctccgcagcagcggcgggcggggcggcggctcctctgtggcttatagagacgtggcggccgtagcgggcgttgatgtccgacattatctggcggaagactttaccgtgggcggaggtgtctttgatgccgctgtagagtatatagtagtgtatcatctcgtggatgacggtgtcctcgatctctgcctcgggcagatcgtagcttgtgcttatgcggaggctgaaattactgtactctgccctgcccgacagtttgcgccgccgtgaatatacgcattttccgagaaaggtcctggcacgggtggcatgaatgggtatcgggggcagctgtccgctgaaaatcagggcgttgaactcgccgaacttgcgctcggcatattctcttgtgggtatcatagggacggggtctgctttatgtcggcccgcaaggactggtagtcgtcggaacaatatctgcgggcaactgccagggccacgacaagcgacaggactgacgccgacatcgccgctacagccagcaccacactgacggccacggcctgccatattcccactccgcccatgagcagcccccacaccaatgcgggcgacgcgcttgccatggcgtatgccatgacacgggcacagggaactatgtttgcctcgagcgcgcggcgcacgaagtagctcacggcctgccggtgtgtggctccgttgcccaaaaggtagtcgtacagctggcggtggttctcaagccccacatagtaggcatgcagggccttggcgtcgcacacggccatggctcctgtcagcacgccggccacaggcatagacaagcttgccgccagaggcgagtccgcacccagaacaaggaacagcacgtagaggcctgtgagcagggttgacgtaaccatgcctgcggcgacgggaatatagaaacgccggaggctaagacgcgagcgcctgacggcatacagggctccggcaagcggcactgccaccatagtcaaggcgttgagccacaaggcgccgcagctgacgacgagatacagcaaaccgccaactgtgcccatcgtaacggccattctgacaaacgacgctaacacaatgtccattatcctgagacggaacttgaacatcacatacagcggcaatgccaacagcagcaagcccaacacgaggcctgatattgtaatctttatcatttccggatattctaatataattctacttttttatcgcagcccacgtagtcgccacgctctgtaacgacgactgcccaacctttcagggccattgtccgcaacgctgccgacatgcggtcgtcggcctcgtctacaggagagtctacaaccaacagccttccgcccatagccgcacagactgccatcagaaccaccctgagcaaaaccttatcagcggctgaggtgtcactgtcaagaaaaaactcgtctacaccaagagcagccatctcgtcagctacattcttgcgcgtgcatgcctttcccctcgactctgatatctcgatcatggcatttacaatgtccgacactttcttcaaagggaagtctacgttttgcggaacgtatcccgccatctttctgaaataaggcgcggagcctgccgtgacgggctcgccgtctatggtgacgtagcccttgctgacaggctgcctgccgaggacggcgttgacaagcatcgtctttcccgagcccccggctccaatcacggccaatatctcgcccggcctgaccacaaacgacagcggctgtctgccgccggatatgacaacgttcttgaattccagcatcctaatactataaatcgttaattatcctgtttattgtatcaagcatcattggtaacttatgctttaccacatcaaaaacaatggcttcgtctatgtcgaaataatgatgagctataatatcacgaatgcccataacgcctctccagtctacttctggatatttgaccaacaactgtttattagtcattttatctataccttttatgctctctccgatagctaaaagcaacatacaggtactctccagacgctctgtccccgcagtgttcaacagataacagtctgaattttctatagttttagaattaccaattattctctctatggtagcagcgatccgccttaaagaataatacaacaattcctcatcaagcatagacaccatcctttctaatttgttttaaaagcacaggattcatatttgcccgaatacggacaatatctacggtaattcccaaaagagcctgtaagtcttccttaatatgcaccatagagaacatatccggatgagtcatctctatgcaaatatccacatcactgtcttctgtatgttctccacgagccacagagccgaagatgcctatctttgtcagtccatacttctgggctgacgaattcttataatcagacaacagacttaatatttctgacgtagatttcatatcttatactttaattctgagggcaaatatagaaaaactttcccacaccaccaaacatcaactgtaaaaacttgtcatttatttctacaggcagacggtttctttctcctgccgatgtgttatctcgtatttttattgtaaatttgcacccgttaaaaaatatataacctcaagacctgtaaaatatatggacaacaactatatcctgccggcagaatgggaacagcaagactgcgtacagctgacgtggccgcatgccggtacagactggaagccttatctggccgacatcgacagaatgtttgtggaaatggccgccgcaatagctgaacgtgagagacttatcatagccacgccacatccagaggatgtaaaaaccaggcttcagaaccgtttgtcggaacagggcatggcaaacacaacaatagcccggtgcgactcaaacgacacatgggcgcgcgaccatgcccccataactttgaggaacaccaacgacggcagcctgctgatgctcgactttaagttcaacggatggggcgggaagtttgaggcggcaaaagacaacgagataggcagaaaactgcatgaggctggagtgctgagggccgacattgaggacaatctcgacttcgtgctcgaaggcggagctatagagagcgacggaaagggaactgttttcacaacatcccaatgcctgcttgcgccaaaccgtaatcagccgcttgaccgacagggaatagaaaaagagctgttgagaagactcagggctaaaagaatagtctggatagaccacggcaacctcatcggagacgataccgacgggcatattgacacaattgtacgtgtggcacccgacgacactctgctatatgtcggatgcaacgacagcagcgatgaacagtacgacgacctgaaggccttggaaagccagcttcagacgctgagaaccgggagcggaaaaccttaccgcctacttgagctgccctcgcctgccccaatatatgacgacggcgagaggctgcccgcaacatacgccaactttctgataatcaacggtgccgttatattcccgacatatcagcaaccggataacgacacaaaggcagaggacgttatcaaagaggctttccccggatatgacaccgtcggcattgatgcccgcacagccatacggcagcatggctccatacactgcctgaccatgcaataccctaaagggctttagaataattataaaaacactactataatgaaagaactgaaaatcggatttctgcaacagcacaacatcgcagaccagagaacaaacataaccaggcttgccgagggcatagcggacttggcaaaaagaggagcacagctgattgtactgcaggagctgcacaacggattatatttctgccagacagaaaacgtcagtttgttcgaccttgccgagcctatacccggcccctctaccgacttctatggtgagcttgcccgaatgtacggtgtggtgatagtgacatcgcttttcgagcggcgcgcggcaggactataccacaacacggctgtcgtaatagagaaagacggaaccattgccggcaaataccggaaaatgcacatacccgacgaccccgcatactacgagaaattctactttactcccggcgacttaggcttccaccctatcaatacaagcgtgggcaaacttggcgtacttgtttgttgggaccagtggtaccccgaggctgcccggctgatggccttgcaaggggcggaaatgcttatctatcccacagccataggctacgagagcagcgacacaccagaggagcagcagcggcagcgtgaggcatggacaaccgtgcagagaggacatgccgtagcgaacggactgcctgtcgtctccgtaaaccgtgtgggatatgagccagacccgagcggacaaaccaacggcatacaattttggggaagcagcatggttgtagggccacagggcgaactgctgtacagggcatcggagaacgaggaggaaagcgtaatcatgagcgttgaccttgagcacagcgagcatgtaagacgatggtggcctttcctgcgcgaccgccgtaccgacgcatacggcgatatcacccgcagatttatagattaaaacaactttattgtagggcagttacacgtaacggccctacaaatgtttcttcataacgctgtcaaacagtccctgacaggcatcctcaagaagctcaattacaagctcaaaaccacggtcgccaccataatatggatctgggacaacataatgtccgggatgcgatgtggcaaaatctgtcatcatgcagactttatccttgtcactctctgcaggagccatgcctgtcacctcgtaatagttttccctgtccataacaacgatatagtcgaaatcggcaaaatcttttttgcatatctgccgtgcacgggtagagaaatcatagccatggtcggcaccgtggctcctcatcctcctgtcaggcagctcgcccacatgccacggccctatgcctgccgagtctatgcggaacatgcggctggcattattgcagtcaacgatatgctgcattatgccctctgcagccggagagcggcaaatgtttccgagacacacgaacaatattgatgtcggcttgttttctgagttttgtttattcatcgtttacttatatttagatatgcaaaggtagcaattaaatcaaaaatactcacagcttttagcaaattttcccatcgcccgacatattaaatttatcacaaaagttgcaaaaccggaaaaaaacatttatatttgcaggcagatttgaacatttttattcaacgatttgaacatttagaatacaacttttgaacatttcacaaaatcatgtttgtacgtgctgaatatcaagaagttaaagacagacttgaagaaccaagaatgtttattcaagtaatatcaggacctcgacaagtaggaaaatctacattggtagaacaaatattggacaagacaaccttgcctttcaatagttattctgccgatgcagaactcaatgtgagccaatcgtggataagtaatgtttgggatgcagcaagaaacgaaatggattatcgccaggaatcagaacgaatcctggttatagacgagatacagaagattggcaactggagtgaagtagtgaagaaagaatgggatcgtgacacaaaggagaaaagaaacctcaaagtcctgttattgggatcatcaagactccttcttcaacaaggattgacggaatctttggctggcagatttgaattgataagaatgggacattggagctaccgtgagatgaaagaagcttttgggtggacactcgaccaatatatatattacggtggttatccaggcaccgctccattagtgtcaaacgaaataagatggaa

SEQ ID NO: 4209 - DNA, 18801 bp, synthetic construct
  source 1..18801: mol_type = other DNA
  misc_feature 1..18801: note = Synthetic
tgaacaagacggagttcatcaaggttagatgcaccttagaggaaaagctgcgtatcaaatcaagggcggaaagcgcagggcggaagttctctgattactgccgtaagatactcctaaatggagaggtggcagccgttcccaagatgaccgccaatgagagagaagccattgccattcttgggcagatagcaaagtcctatgcacagatttccaacctcatcaaggtcaaggatgaaagatgggtacatataacaaagaacctttctctatgtgcaaaggaagcatttaagcgattttacgacccccactttcgtgtggacgatgaaatatataaggtcttaaatatgagaagagatgataggtaaatgcaaggcgatagcacacggcagtacggctttggactatatattcagggaagggaaactcggacaacatcttgtttccaatcatctctacggaactacaccgaaggagatttgcggggaaatgaagatggtcagcgattacaacacaaggtgcagaaacaagttcctgcgtattgaaatcggtattgcaccgaaagacgagaaaaggctgagcctcgaatcagtccgcaaccttgcatcgaactttaccagacagatgggacttgaaaatcatcagtgggtggcagtaacgcacaaggataccgacaatatgcatatccacatcattgccaaccgcatcagcctatacggagaggtctatgataccacctttgtgagcaacagggcggcaagggtggcagaggaactcagccgaaagtatggtatgactatcgcaaaggaggtcaagacagacagaaaacaccaaaaggaaaaatctaacccaacgagagagcaaacaaagaaagaggtgcgacaaatctgttatgccctgcttgacaagtacagaggtacaggtattaccgggcattccatgttcctttacgagttgaacaagaacggcattaccatagagcgcatgaagaacaagcagggcaagatctatggcctgaaattctcatacgcaggacaatccttcaaggcttccgagataggcagggagttcggctaccgttccctgcagaagaactttgaactaactaataatgaagaactaaagaaaccacatcacacggcacaagaaccaaccgaaaggaaagaactgcatgctacaggctatcaacttgtccctccaagccgttcctctatctcacgagacaatgacactccacaagtgcagaatcccattggtgcagtgacagacaccatcgttagcgcagccgatgaagttgtggaaaagttaggcgatttgattacaccaaccacgcaaggcaatgactatgccgaagctgtatgacagcgcaaattgagaagccaagccaacagaaagaagaaaagaggaagaggtatataacccacagcaaacagccaatcaaaagtgcagaaataggaatatttcatcaaaaacgcttgttattcggtaacaaagtattatctttgcagacagaataacaagcgttctttgctaggcagaaaacagcgaagccaagtagcttgctcgtttccaaatcgttacctatttagtcgtgccaacgaggtaacttctttattttcaataagttgtattttaagaattatcttgcactgcaatcgcaaaccaccgtcaaacattttctccttcaacaagggcgggcattgccacatgcgagaacacaatcggccgatacctttcgggaaagcgttttcttacggcacgttcctccaaccgaaagataaaaaatatagaaattgttggattattattctgtattgttgggtataatccttatctttgcatgacgaaaactaaaatgtaacagctgtgtttttatcatatattttggcaatctttctatcgctctcgccgctttcccaacaacagcgaggagacgtgatgcaacagaatgacgggtatgtctggcccacggagcaacacgtgctcaataaactaagcaagtggcaggatcttaagtttggcgtgctcctccattggggcctctattccgttcccggtatcgtggagagctggagcatctgcgatgaagactggatcacgcgcgataccacgcagacctatcagcaatacaaagactggtattggggactggctaagcagttgaaccccacacgcttcgacccgacgcagtgggcgcgcgtgatgaaagacgcagggatgaagtacatgatcttcaccacgaagcatcacgacggattctgcatgttcgacagcaagtatgatgatttctccatcgcccgttacgctttcaaggacaatcctaagcgcgacgtgctgaaatctgtgctgcaggcgttccgggaccagggcttcatgctcggtacctatttctccaagcccgactggcattcgcaggactactggtgggatgtctatcctacgaagcgggggcgcaatgtcaactatgacatcaagaaatggccgtggcgctggaacaggtataagcagtttgtctacaatcagatgtgcgagattaccgatccgcagcgttatggcaacgtcgacatcctctggctcgacggcggctgggtgtgcaaagagaacaatcagaacattgacatgcctcatatcgccgagggcgtgcgccgcaaccaacccggcctgctcattgttgaccgtacgatcggcgggccttatgagaactaccagacaccggagcgcaccgttcccgagaagcagatcccgcacccttgggagagctgcatcccgctgagcgacgactggggctgggtaccgcgccctcactggaagaccccggagaaggtcatctcaaccctgatggaggttgtcgccaaaggcggaaacctggtcttgggagttggtccaacccctgaaggcctgatacagcctgaggccgtagtgcgtcttgaggctatcggcaggtggctgcgtgccaacgggctggcaatctataacacggtgccaacaaagaactaccattccggcagcctgtggttcacggcatcgaaggacggccggacgctctatgcgctctatccttcacagccgggcaacgacgcgccacagatgctctcctggtcaggcaatgtgcctaaaggcaaggtggtgctcatcggcaaagatctgaagctcaagacctcggttcaaggagagaacgtgaccgtcacattgccgcagggcagtgtgaaagccggggagccgtttgcgctccgcttcgcagcttctaagaaatagtctttttgtcgttgctgtgattgagaaggtctcattgaaataatcttatttgaaataataacgaaaacaataataatatgaaattcaaacgcattttgtctgctgctcttctcttcagtctgacgcttggcgctcaggcgggggagtatacccaatatgtcaataccgctatcggtacgggcggtcatggtcacgtcttctatggtgccaatgtgccattcgggctcgtgcagctcggtcccacgatgcatacgcgtggctgggactggtgttcgggctattacgtcagtgacaacatcatcatcggcttcggccacacccatctcagcggcacgggcatcggcgatctgggcgacgtggcgctgctgcccgtggtcagcaacacggaaacagagacgaccatcgaccgcagtacggagcagtgtgtgccgggtttctacaccgtcgtcacgggcgatggggtcaaggcagaactgacggctacctcgcatgccggtctgcaccgttacacgttccccgcaggcaagacgccgttgctccggctcgacctcaagcaaggcatcggatgggacaagatgtacgactgtcgtttcacgcagctctcgccgacggtggtctcgggctaccggttctctacgggctgggcaaaggatcagcgggtctatttctacgcggagttcagccggcctgtctccttcgaccgtcaggaaggcgactccgtggcttatctgcgagtagctgacaatggcaccgggtcaacggtcctggcgcgtgtgggcatctccgccacgtcggtcgacgaagccaaagccaatctgcatcaggagctgacaagctgggatgttgagaccgtcaaggcgcaggctgacaaggcttgggacaaggagctcggacgggtcaagattgaatcggacaatgccgatgaccgcacgatcttctatacagcgctctaccacacgatgaccgccccgtcggagatcagcgatgccgatgcggctgcgaaacgctacacgaccttctcgctctgggatacctaccgtgcgcagatgccgctcttcaccctgatccatcgtgaccgctgcgccgacatcggaaagacgttcatgagcatcttcgccacgcagggcaagctcccggtctggcatctgtgggacaacgagaccgactgcatggtcggaaaccccggcgtgcccgtcttagccgacctcgtgctcaagggcctctatgccgacaaggaaggagccttcacggccttgaagacctccatgttgcgggatgagcgcgggctgaagcagttgcgtgaatatggctatctgcccttcgacaaggacacgacgaacgagaccgtggccaagggcctcgagtatgcgttagccgactggagcacggcgcaggtggccaagaagctcggaaagaccgatgattacaactatttcctcaatcgcagcaagagctacagccattacttcgacaaaagagtgaatttcatgcggggcgtgaacagcaaaggccagttccgctcaccgttcaatccgttccactctgtccatcgcttcgacgacttcaccgagggcaacgcctggcagtacacatggctcgtgccccacgatgtccatggactcgtcggtctcttcggcagtgagaagaagtttacgaagaagctcgactccctctttgtcgtgcacggtgatcttggcaaggaagcctcaccggatatcagcggactcatcggacagtatgcgcatggcaacgagccgagccaccacattatatatatgttcaactatgtgggccagccttggaaggctgcttcgctcctgcgccgcgtctatcgggagatgtaccggaacgcgcccgacggactctgcggcaatgaggatgtcggtcagatgtcggcatggtatgtcatctctgcctgcggcctctatcaggtggagcccgccggcggcaagttcatcatcggctccccgttgttccgaaaggccgaactgaatgtcggagagggcaagacctttaccgtcattgccaagggcaacagcgacaagaacatctatgtgcagaaggctgtgctcaacggcaagccttatacaaagagctacatctcctatgatgacatcgtcggcggaagcacgctcgaactggtcatggggcctaaaccgtcgaagtgggggacagccaaggctgaccggccctgatgacgcgataagcaaattgaaggagtttcgtttatgattatgaggcgaatgaatatcttgatggctttgttggccgtcacgctcttctcttccgcgcgtcaaaaggacacgttgccttatcgggatgcctctcttcctgtggagcagcgtgtcagtgacctgctctcgcgtatgaccttgcaggagaagatcgggcagttgcgctgcaccttggcgtggaactactatgatattataggccggaagcacgtcgtgccgtcggcctctttcaagaaagacatggctgaagggcatgtcggcatgctttgggctacttatcgggctgatccctggacgaggaagacactcgacaacggcctcaatccccggctcgcggcgctctgtggcaacgccctgcagaaatatgtgatggaacacacgcgtctcggtattccgctctttctcgcagaggaggcaccgcatggacacatggccatcggcacgacagtcttccccacggggctgggccttgccgcgactttcgaccgtgaggttgcgcgcaaggttgggagcgtcattgcccgggaggtgcgtctgcagggtgcccacatcagttacggcccggtcattgacctctgccgcgaaccgcgctggagccgtgtagaggagaatatgggggaggatcccgtgctcaccggaagcatggcagcagcagagattgaaggcttaggcggtggcgaccttgcgaaaccgtttgccacgattcccacgctgaagcattttatcggctacggcaccacggagggcgggcataacggcgcgccgacctatctcggcaaacgggagatcaggcagttcttcctcccgcctttccgtcaggctatccgggccggagcgctgtcggtcatgacgagctacaacagtcttgacggcattccttcttcgatggacgattattatctccaaggcgtgctacggaaagaatggggcttccggggcttcacggtctctgacctgtacagcatcgacggcatccagtcgacgcatcatgtggcacgcgacctcgctgaggcggcagccgacgcgctcaatgccggtgtcgacgtggatcttggcggacgctcctatgccatgttgcaaacggctttggaccgtggactcaccacccaggcagctatcgatacggcttgtgcccgcgtgttgcgcatgaaatttgaaatgggactttttgaacatccgtttgtcgatcccgacaaggcggctaaaggggtgcggtcggcagagaatagggaagtagcgcacgtggcggcacagaaagtcatcacgctgctgaagaacgacggtgtgcttccgctcagcaaggacgtgaaggtcgctcttgtcggaccgaatgccgacaacgtgtataacatgcttggcgactacaccgctccgcaggaacagggcaatgtcaagacggtgctcgacggtgtgcggcaatatctgcccgacagccggataagctatgtgaaaggctgtgccatccgcgacacgacagcgaacgacattgccgcggcggtggaggctgccaagcggtcggatgtcgtcattgcctgtgtcggcggtagcagcgcgcgcgacttcaagaccagttacaaggagacgggagcggctgaggccaacaccaacactgtgagcgacatggagtcgggagagggctacgaccgcgctaccttgggactgttggggctgcaggaccgtttgctcagtgctctgaagcggacgggcaagccgcttgtcgtcgtctatatcgaaggccgtccgttgctgaaaaactgggcagcggagcatgccgatgccttgctgacggcttattatcccggtcaggaaggcggcagcgccattgccgatgtgctctttggggcctataaccctgcgggaaggctgccggtcagtgtgccgagggccgtgggacagttgcccgtgtattacaacaagaaagccgtgccgcaaaactatgtcgagatgacggccaagccgctttatgcctttggttatggactgagctacacctcgttcaagtattcgaacctgcgcatcgacaggaaggatgccacgcattttaccgtcgcgtttgacgtgaccaacattggccgctgcgacggtgatgaggtgccgcagctgtacctgcgcgacgaggtggcttcggttgcacagccggtcatgcagctcagggcgttcgaccgaaagtttatcagggccggagagacctgccacttctcgtttgacctgggaccggaagcgctctgtatcgtcgaccgcaatatgaaggaggtcgtggagcccggcgacttcacggtgatggtcggatcaagcagtgacaatattctgctcaagggcaccttgacggcagagtagggggcataaaaaacttgccgtttttgcttctgtttcaatatattgtcgtacttttgcgcttgtttagtaagagagacaatattatgactggaatcttttcagcagacggctggctgaacacgcttgtcagcggcatcaataacattctgtggacctatatcctcgtggcggtcctcatcatctgtgcagtggtcttcaccattaggacccgcggcgtacagttccgcatgatcggcgagatgatacgcctgttgggcgactccacgaagaagacgcacgagaagcacgtctcgtcgtttgaggctttcgccgtgtccatcgcctcgcgcgtcggcacgggcaacctcgccggggttgccaccgccattgctgtgggtggccccggcgctgtcttctggatgtggatcatcgcgctcctcggctccgccacggctttcgtggagtcgacgctcgcccagctctataagcgcaagaccacgggcagttatatcggcggaccggcttattacatgatgttcggactgaagaaacggtggatggcgcgcctctatgccgtcctcatgacggccacgttctgcatggcttatatctccatccagagcaacactatctgcggcgccatgcaggaagccttcggaatacagccctggctcatgggcatcctcttagtcatcttctctaccctctgtatctttggcggcatcaaccgcattgccaagatcagtagcatcttcgtgccggtgatggcagtgctctatgtgttgttggcggtcgtcatcatcatcatgaacatcgggctgctgccttccgtcttccgcatcatcctggagaacgctttcggctttcagcagtttgccggcggcaccttcggcgcgatgatgatgacgggcatcaagcgcggcctgttctccaatgaggcgggcgaaggctcggcagcctgcgcggcgagcatcgccgatgtgagccatcccgtgaagcaggggctggtacaggcgttgagcgtcttcaccgacacgttgctaatctgcagctgcacggctttcatcatcctcctcagtggggtctatacgaaccatgacctcaacggcatccagctcacgcagaacgcgctgctcagtgaggtggggaaggtcggctccgcctttgtcgccctggccatcttcatgtttgccttctcgtcgatcatcggcaactacacctatggcgagatgaatgtgaagttcctcacgaaggaccgtcgctggctgttcttcgtgcgggtgatgaacggcatcgtgatggtgatgttcggagccctggcgagcctcgacctggtatggagcttgggcgatttcttcatgggttgcatcacactctgtaacctctacgccatcgtcagcctccatccccgtgccgtctggcttctgaaagattatgtgaggcagaaacgtgccggcatcaagagccccacgttccacaaagagcagatgccggagatagaagacgagatcgacgcgtggtaggatggggaaggttctccccccctgacttcgtcacttttatattgagccccaatgctgcccttgattatcagacttttcacgcagatccgcagagcttattgagccgcagagaggatacatgtcagaggctaagatcgctgagaggccttcggccttatgaggagagagcagagagaccttcggtctatgtggagcgtatgtggagcgtacgaggagcgtatgagcagttatactgcaagaacagtgttggtgcatctctgtgaactcccctcaagaccgaaggtctctctgcgtcctctcattctcagaagcaataactccgtggctcaataaactccgtggctcgatgatctccgcggctcgattatctcggcggctccgcgagaaaatttatacgccgctgcgagaatcgacttgcatcatagcaaggatttcatggtgttgggtcagaatagactgccgaacagattaaatttgggtgacgcattgacgaagtcaggaggagaaaaaactcccaccgaagcgggagtataggataacatccttcggcaattactgccttattgcgataagatgtaggaaaatatcttattctggtagcaaaattagcaaaaatatttgttacttccaaaataaatctctaattttacagaaaattaaaaactaatttattttatggaaaagattttaggtatagatacgggtactaatagccttggttgggcgattgtcgaaaaattcgaagacggctacaaactcttggataaaggggttaatatctttcaagaaggcgtgaaattggaaaaaggcattgaatcatccaaggctgcagacagaacctctcaccgatcaacccgggtgcggtattatcgtataaaactgcgtaagatccgattgcttaaagtccttagcgataatcatctgtgtcctcctgtctctactgaagaactcaagttatggcgattgaagaatatctatcccaataatgaactgttgcgtcaatgggagcaaacagacgacatggctgataagaatccctatacttatagatatcggtgccttacggaaaagttagatttaacggatctaacacaacgttatgttcttggcagagcgttgtaccacataaaccaacgtagaggcttccttagcaaccgtaaaagtgatggaggcgatgaagaaggaaaagttaagacagctattagcaacctgtcggaagaaatgaaggaggctggttgtcaatatcttggtgaatacttctataagctttatcatagaggggaaaggattcgctgtcattatacggctcgtaatgagcattacttcaatgaatttaaggccatttgcaagaagcaatgcttgggagacgatcttgtcaaagcgcttaaagatgtgatcttcttccaacgtcctttgaagtcgcagaaaggagttgtcggacattgcgttttcgagcctaaaaaaccgaaatgtccagcatcacatcctttgtttgaggaatttagaatgctctgttttctaaacaatatcaagattcagacgccaaaagataaagatttgcgccctttgacagaagaggagcgaaagaaagtaatgcctaaattttataggaaatcgaagccttcgttcaactttgaggatattgcaaaagaattatcaggaaaagggaaatacgcctattataaggctcccaaagggaagccttaccttttcaattatcatatggacacctctgttgctggttgtccagtgacctcaggtttgagagatgtctttggtgaagattgggtagacgccctctgcgaagtgtacgataaagccttaggcaagactcgcttacagattatcaacgatatatggcatgtgctatttgacttttctgacgaatacaaactcattgaatttggaaagacgcacctccagctctctgatgaagatgcgaagaagttcagtcaaattaaggtttgctctgactatgcctcgttgagtttgaatgctatatgcaagattcttccttaccttcgtcgtggcatgatttactcgctctctacattctttgcaaatatgggcgcagtcgttcctgctaacatttggaaagaaaaggctaatagagacaagattgtcaaagagattatcagcgcaatagctgataaagaaaataatgcagcagatagcagaacaacagagagggttattaaagactatctaatttcgcgttatggcgtttcagaagaggaaacggacaagctctaccatccttctatggtagagtcttacccgcatgtgccggaaaacgaaaataagcttggatccccaagaatcgacagtgtccgcaaccctatggctatgcgttctcttttccgcttgcggcatgttgttaatacattgttggcagaagggaaaatagaccgcgacaccactatacatattgagttcgcccgcgacttgaacgatgcgaacaagcgacaggctttgtaccggtttgttaaagaaaacgagaatgaaaggaagaaaataaaagcggagatactacaactctataaagacgaaacgggtctaacgatcgaaccgactgacactgacattcttaaatatcaattgtgggaggaacagaatcatcgatgcatctatacagatgagcagatcagcatcactgacttcctgggtgataatcctaagtatgacattgaacacacaattcctcggagtgctggtggagacagtacaaagatgaatcttacactctgtaacagtaaattcaacagggagattaagcaaactcttcttccttctcaacttgccaactataaggatattctgcttcgaattcaaggctggaaagacaactacgaagaattggataagcgtattcggaagatacgaacgtcaagtagtatgtctaaggagcagaaggacagcttgatacagaagcgtaaccttcttaaattgcgacgggattactggtatggaaagtatcaacgcttccttatgacagaggttccggaaggatttagtcgtcgtcagggaaccgatattagcgtcatctcaaaatacggccgtttgtacttgaagtcgttctttaacagagtctttgttgtgaagggattggcgacaagcgatttccgaaagatatggggaatccaagacatctattcaaagaaggaacgtgttaaccatgttcatcattgcatagatgccattgtgattgcatgtctcggtcctggagagtatggtaagttggcagagtactatcgtgatgaagaaaatcacgagtggtatggtgcttccaaaggtcacatagctgcaccatggcagacgttccaagaggatatgcgcaagattcagaaagagattgttgtgtcccactatacatcagataacattggaaagactgggcggcaccggatattgctcaatggtaagaaagtatgggcagacggtgattctgctcgtgcttctctgcacaatgatacctattacggtgccattgaaaggaacggaaaggtaaaatatgtggttcgtaagcctttggacaataactttaaagattccgatgtcgacaaaattgtggatgatatggttaagacgcatgtcaaagaggctatccaacaatatggtagcttaaaggatgctatctctcatggcatctggatgaacaaagagaaaggaataccaatccgcaaggtaagatgcttcaccccttctgtaacgcgtcctttggaaatccgccatcatcgtgatgtctctacaaaagtatataagcagcagttccatgtgacaagtgacacaaactatgccatggccatatatgtaggtcaagataagaaaggtaaggagaaaagaagttttgaacttatcagcaacttggacgcatgtaactactataggaagagcaatgataaggaaatcgttgacaacaatctggttccattggcgaagaatgactttcctttgacctacgtacttaagaaaggtacgatggtgctgctttatgagaatacgccagatgaaataagagaatgtagtactgaggaactggtcaaacggttatacaaggtgaccggattgtcgtcaatggtcgtatctggtcatgaatatggaaccatcgtcttgcttcactcacaagaggcgcgacccagtggcgagctgaaagcaaagaatggggcttataagcagaatgaggaatttagaagttgcataatacttctgcatactcagtttaaagcgcttgttgctgggtacgattttcaaatcaatgatgtcggtgaaatcgagtggttaagataatgctgaaacagacactattcttttctcatccggctagactctctttaaaggacaatcagctggtgataaccttgaaggacagtaatgagatgattactcgtcctatagaggatattggctttatggtcatcgaaaaccagcaaataatatttacgattccccttctgaatgaattagtacataacaatgtcagtgtcatcctttgcgacgcaaagggtatgccgtcttctatgcttatggggctgaacaataatgcgacacaggcagagagtttaaaatatcaacttaatgtatcagagcccatgcggaagcaggcatggaagcagatcgtagaacagaaaataagaaatcaagcagcagtattagataagttagggatagagcatcacaatttgaaggcctgctatagctcagtgcttagtggcgatacgtctaatcgtgaggggatagctgcacgacagtattggactcaattatttggaaaagattttcgaagagagcgtgaaggactccctccaaataatctcttgaattatgggtatgcaatacttagagcagcaacagccagagccctgataggctccggcttattgccagctttgggcttgttccatagaaacaggtataatgcttttccacttgcagatgacgtcatggagccttataggccttatgtagacgaaatggcttttggagcgacagaagaggggatgcttgaattagacaaagagacaaaagttagattattgaatttgctggttactgatgtaaggattggaaagatgactcgtcctttgtcacttgctctaacaacaacatcagcctcgttattgaaatattataaaggtgaaacaaaaaaagtgacgttgcctgttttctcatgaccttagttcgacttaatgcataccatatcatgtggctgtttgtattctttgatttgcctgtgactacaaagaaggaaagacacgactcagctctctttcggaaaaatttggagaaagacggcttctctatgatgcagttttctgtttacgttaggcattgtggatcatatgaaagtcttgatgttcatcttaatagagtaaagagttttgtaccaaagtatggcatggtaagcattttgtcagttacggataagcaatatagtaatattcataattttcgaggagagcctaaaaatagcaagtcaggcaaaaagaaaaaagtcattagtgaacccatacaacttgaacttttttagtaactttgcaaagaaattgtagcctgcatggtcgtttttttattactcaaataaaatcttcctccttatatacaagaggttatgagtataaagttgcggtttgatgtaggaataagaagatatacaacaaattctttctgaatgtggaatccttgtagttgcggtttgatgtaggaataagaagatatacaactcgaaaaaggcaagttcaagaaaggacagttgcggtttgatgtaggaataagaagatatacaactcactgaaagtggttgataacgcaccactgttgcggtttgatgtaggaataagaagatatacaacaccttgcttgaatacaaggcaaaggaacagttgcggtttgatgtaggaataagaagatatacaactaacaactgaggcagacaacgctgacagagttgcggtttgatgtaggaataagaagatatacaactgcctgcataccgaaagcaataggcgtgtgttgcggtttgatgtaggaataagaagatatacaacggcatacgtaatagggatagttacggatagttgcggtttgatgtaggaataagaagatatacaacacctataaatgtatcatcataacgagcttgttgcggtttgatgtaggaataagaagatatacaacctctcacgagcagcacgccttcacgcttagttgcggtttgatgtaggaataagaagatatacaacagatccgctcgaaggcagagaagcgcacggttgcggtttgatgtaggaataagaagatatacaacgccgtgaagaagctccaggagcagggcgagttgcggtttgatgtaggaataagaagatatacaacacttcatctgaagttaacgagactatgaatgttgcggtttgatgtaggaataagaagatatacaacgaaagcgtgatagaagaggcaaagaaacagttgcggtttgatgtaggaataagaagatatacaacaaggagaacagagactgggctacctttaagttgcggtttgatgtaggaataagaagatatacaactcacatctggattaaaaaagacatgggacgttgcggtttgatgtaggaataagaagatatacaacgtgaatcgaccctcacgggcagagcactgggttgcggtttgatgtaggaataagaagatatacaaccccttcggggtgtatgctgccatttcgcagttgcggtttgatgtaggaataagaagatatacaacttgatgggtcttgcagcacgttaaaagactgttgcggtttgatgtaggaataagaagatatacaacaacaatcagaaaaagacaaagtaacataggttgcggtttgatgtaggaataagaagatatacaaccttggcttgcaggtagacggtaggccgagcgttgcggtttgatgtaggaataagaagatatacaacctgcgaatgatttgttttacctatttccggttgcggtttgatgtaggaataagaagatatacaacatcagaaataagttcaaccgagccttcgggttgcggtttgatgtaggaataagaagatatacaactatttgcaatcgtttaacaaaaccaacaaagttgcggtttgatgtaggaataagaagatatacaacggtattgcgtcatgatggacggcgcgaaggttgcggtttgatgtaggaataagaagatatacaacaagcaaatgcacatacttgtcgctgtcgagttgcggtttgatgtaggaataagaagatatacaacatgcccacaatcaacaaagaagtggctcggttgcggtttgatgtaggaataagaagatatacaactaataattaggatctcacatttccgactagttgcggtttgatgtaggaataagaagatatacaacgaatgcaatagcggtaataatgggcaatagttgcggtttgatgtaggaataagaagatatacaacataatgttggtgtttttgcttctcaacaagttgcggtttgatgtaggaataagaagatatacaacacgcgtcaggaactggaacgtgcactggcagttgcggtttgatgtaggaataagaagatatacaactctctgcctggtagagaatctgatactcgcgttgcggtttgatgtaggaataagaagatatacaactcaatcgaccctcacgggcagagcacgaatgttgcggtttgatgtaggaataagaagatatacaactagcgacctctaactctttcccgcttgcgagttgcggtttgatgtaggaataagaagatatacaacttcaaaacataacatgtttaactatctattgttgcggtttgatgtaggaataagaagatatacaacccctgaccggcagttgttcctccgctgagggttgcggtttgatgtaggaataagaagatatacaactgctggctgagcgtctggatgagattgctcgttgcggtttgatgtaggaataagaagatatacaactcaacgccataacatctaaagagggcatcagttgcggtttgatgtaggaataagaagatatacaactggccatcaacatgataaccaacagacttggttgcggtttgatgtaggaataagaagatatacaacgagacctaacaagtgatgtgaagttgaaagttgcggtttgatgtaggaataagaagatatacaacacagcacgctatagggcagcttgggatgggttgcggtttgatgtaggaataagaagatatacaacatatcctcagttggcttaataccaaaatggttgcggtttgatgtaggaataagaagatatacaacgtctccacccatatgaacgtgagctgcatcgttgcggtttgatgtaggaataagaagatatacaaccatcaagcagagcccggttagtaatggtagttgcggtttgatgtaggaataagaagatatacaaccaacttttttagtgatgatgcactcattgcgttgcggtttgatgtaggaataagaagatatacaacatgacggaggcctttgccgaatataacgaggtttcggtttgatgtaggaataagaagatatacaactttttatcaaggacaaagatctcgttcccgttgcggtttgatgtaggaataagaagatatacaacaaaacactgtacacttatgaattatcgagtgttgcggtttgatgtaggaataagaagatatacaactcgcttacttggtcatcggttttcttagtgttgcggtttgatgtaggaataaggagatatacaacagggatttaaaactaaaaattatgccatagttgcggtttgatgtaggaataaggagatatacaactcactaaaggtttggaagccataaattgtgttgcggtttgatgtagggataagaagatatacagctaatgcaatcacgcattgcttaactcaaaagttgcggtttgatataggaataaaaagagtaactattcattcccaccgtagggcgggttttccccgccctattgtgtatacccctgctttattgttgcaagcgttagtcccacgatgctacggctgacatattccatctttttcaacaaaaacctataaaaccctttgcgtcagcgccaagggctatggccctctgccatttgcgggaagggcttgtgagaggctttgcctctccccgcccccatcccgcaaatggcagatcctccttcgtcggttcttggcgctgacacaaagaaaaaccttgaaaacaagctggcgcggtaactcttaactcctaactattaactcctatcgcgtcagcctgttttcaaggtttttcttgctgtgatgcaagcctgaggaacgaaggctgtttcttcttcggctccggcttgccgaagcttgcttcggggcaaggcggagccgaagaagaaacaaagggcgcagcccttgcatcacagcaagggttttatttgtttttgtta

SEQ ID NO: 4210 - DNA, 18270 bp, synthetic construct
  source 1..18270: mol_type = other DNA
  misc_feature 1..18270: note = Synthetic
ttgtccacatcggagatacccaccacattcagtttcaatcgtcttgactgcatgaggaactgctgctgggtacgaatctgttcgagcagcataccccctacagtaccgataccacagataaagatgttcagtaccttatattctgacaggaagaatgagtcgtgcagtacgttgagtgacttgcgcaggaacttgccgtccacaacgaatgagatattcgtctcagaggcaccctgagcacaagcaattacactgataccagaacgtccgagggtaccgaagagtttaccagcgatacctggtgtctgtttcatattctcacccacgatagcgatggtagcaagaccgctctccacctgcatggggaacatggcacccgtctcaatctccttggcgaactcagcgttgagtacttctgctgcggcagtagcatcctcgtcacgcacaccaatagaggtggagttctcagaagaagcctgtgataccataaacacagagattcctttgttggcgagggtggtgaagatacggcggttcacaccgatgacacccaccattgacagaccagtgacagtaatcaaagaagtccccttgatactggagatacccttgataggtttctggtcgtcgtcaatctttgccttgataagtgttcccggatgctcgggattgaaagtgttcttgaccctgatagggatattcttgacacagacagggtatatcgtcgggggatagatgaccttcgcaccgaagttacaaagctccatcgcctcgatataagaaagctcattgatggtataggcagtcttgatgactttcgggtcggcagtcatgaaaccgtccacatccgtccatatctccagacattccgcattcaatacagcggctatgatagaggcggtatagtctgagccaccacgtcccaggtttgttgtctcatgggtgtcacggtcgcgggcaatgaagccaggtaccacatacaccttgtttgttgtggcagagtcgctacctactgaactgaaaatctcttttaccagttgtgtggtcaggtcagcgtcaatcacgtgtttgccctgtttacgctctgtacggatgaagtcacgggcattcatacggataccgttcttcaccatggcggcgacaatgtgtgacgacagacgctcaccatacgatacgatggtgtcttctgtcttctttgacaggtcgtgaatgagatacacaccatagtagatactcttcaactggtcgaagagctggtctacattgttgaataagtctacgcgctttttgtcatcagagatgatggcatcaatcatctggtggtggcgtgtcaccatcgcgtcgaattcctcacgatagcggtcgtcgccctgttttgccatctgtgatgtggcgatcagtttgtcggtgatgccgtcaagtgcacttactactactacgacaggttgcgtccgagcctctgtctccacaattttcttcaagctaagaatgctttttacggaacctacggacgttccgccgaatttcattactttcatatctctatgcaatttatcttgccagacggtaccctttaacaagcagggcttactccattggcggtgcaaaggtaatgaaaaatgtaaaaatgtaaaaatgtaataatgtaaaaaatgtaaaaatgcgagtttccccgcatttttccttattaattattacattttataattttatgatttttacattctaactatacaggaaacgtttgatactacgcttgggggtcttagcgaactcctccgtgcggatctctatttccgtaatcttctcatatgcaggcaactgttcgttcagttgctgacggttctgttccatgatattcttgatatcctcctcgttgaagttcatgttcttcgcctcgtcatagtcgggatataccagtccgacaagtttcgtgtcacgctgtaccacaacactctcgacgaccagtgtcagagagttcagcttatcctcaatctcctccgggtagatattctgtccattaggacctaacagcatgttcttcgaacgtccgttgatatacacatttccgtcatagtccatcgtaccgaggtcgccagtatggtaccagccttcctcgtcgagcgtctccttggtggcttcctcgttcttatagtaacccagcatcacattaagtcccttggcgagaatctcaccaggtttatgggcagggtcgctggagttaatcttcacctccatgtggtaggcagcctgtccacaggagccctgtgcgaaggtctgccagtcacggtaacagataatcggggcacactctgtggcgccatagccgacagtataggggaactcgattttcttcaggaaagactccacctcctggttgaaggcagctccaccgatgatcacctcatagagctcgccgccgaaagccttcaccacctctttgcagatcatctgtcgtaccttcttcgagatgacaggcatcgacagcagcagtctcatgcggttattctgtatcttggggaataccttcttacggataatcttctcgatgaccagtggtacagcgatgataatcttcggtttgatctccgcaaaagcctgtgcgatgatggcaggtgaggggatgcggttgagataatatacatgacagccatgcaggaactcaaagataaactcgaaagccataccgtacatgtgtgccatcgggaggatggagatgatacggtctcccttgtcgataatcttgcctaacacatactccgcgaagtcgtagtttgaccagagggcacgatagggtaccatgacacccttcgagaaacctgttgtgccggaggtgtagttgatcattgccagttcctcgccactctcctctatataataatgtacgtgttccttacggaaatatttggggaatttcttgccgtacaactcattcagatgctcccgggcataggtcagcttgtccgtgcgtgacagcatcagcgagtagtcggggttgttgatgataccctccagattcggcatctgggtagggtcaatctgtgtcgctacatgatcacctacgaagagcagcttggaatccgagtggttgacgatattatgaatctggtctgccatgaactcatggaggataggtacggcgatagctccgtaggtcagggtggcaaggaaagccacagcccactgactggagttacgtccacagagggctatcttgtcgccctttaccacaccacagttctcaaacaggatgtgcagtttctctatcttacgtgccacgtcatggaattgcaaggtggctcctttgtagtcagtcagtgcatcgaggtcccaattgtcgatgatgctctgctgtataagttgattaaaactgggtacgttttccatatcgattacggttatttgtataagtaacgtttaatgctcttcttcggtgttttctcgaactcctcctcacggagctcaatcatgttgagacgactgtatggtggcagtatctcattgagttgctgacggttctgttccatcacgttaagcaagtcctcgtcgttgagtcccatctcctttgcctcgtccatgtcaggatagaccagtccgacgagatggtcaccacgctgtacgatgatacactcactgaccagtgtcatggaaccgagtttgtcctctatctcctcaggatagacattctgtccgttggcacctaataacatattctttgagcgtccacggatgaacacatgaccatcccacgacatcgtggcaaggtcgccggtatgataccagccgtcctcgtcgagtgccttacgggtagcctcttcgttcttgtaatagcccagcatcacgttggtgcctcgcgtcacaatctccccggcaatctcctgtgggttgctggacaggatcttcacctccatatggtctactgctgatccacaggagccagacacaaagtcatggtagtcgctataggtaatcagtggtgcacattctgtggtgccatagccgacagtgataggaaactcgatgtccatcatgaatttctcgatctcctggttcagaggagcaccacccacgataacctcataagcctcaccaccaaaggcggcatatacctcctgacagatacgctccttcactttcttggagacgacgggcatctgcagcaggatcttcacggcattgctttgtatctttgggaatacccgtttgcggataatcttctcgatgatcaagggaacggcaaccaccagatggggtcttaccgtcttgaaagcctctgcgataatagctggggagggtagacgagtcaggaaaaacaggtggtaacctgagcagaaggggaagaggaactcaatagcctgtccgtacatgtgtgccatgggcaggatactcagcatacgactgtatttcggtatctgcattcctaagcgtttgatacagaaatccacgttaccccatagggcgcgatagggtatcatcacacccttcgagaaccctgtcgtaccactcgtatagttgagcatacacaactcctccgggtcgtcgacgtaccagttgatatgctcagcacggaacgccatggggtatttctcaccgaacaacaggttgaggtgctcacgggcatccatcagtttctcgttcctgcaggtgtgcagggagaagtcaggaaggttgaagattccctccagttctggcatctccttcgggtcaatgaggttgaccacatagtcgcctacgaataacaacttggattcggagtggttgacgatattatgtatctgctctccattgaactcatggaggataggcacgatgatggcgccataggtgagggtggcgagataggctacagcccaatgggcggagttacgtccacaaacggcgatgcggtcacctttctctattcccgcagcctccatcatgatatgcagtttctctatcttgcgggctacgtcgtgatactgcaacgtagaacctttatagtctgtcagcgcgtcgagcagccagttctccttaatcgtcttaacgatataggagttgaaacttggtatgtcgttcattgcacaatcttcaaaattttgtgcaaaggtaatatctttcctgcacattcgcaaaaattttgtgcagttttttgaaggttcaggtaaaaatattacaaaaaaggtaaaatgggacaaataatcctcacaatcgtatgacctcgtcgcataattcactaactgttttgcgatgggtgataaacaacatggtcttctccttgcagttagtgaagagtcgtttgtatagctcttgttccgtaggtccgtcgagactgctgctgatctcgtcaagcaacaggatattaccgggacacagcagtccacgggcaatggcgatgcgttgggcttgtccctcactgagtcccttgccccgttctcccagctcggtactgagtccgtgtggcaggtcattgatgaaatcagcgcaagcggtatggagcacagccaacagctcatcgtctgtggcattgggcttggcgagttggagattatagcggatgctgccgctcatcaaggtgtttccttgtggtacaaagacgaagttaggacgtgtctggatacctatcatgtgctccctgtcgttggtatacaaggtgatactcccttctgtgggcttgatgaaaccgagcaacagtctgaagagtgttgtcttgccgatgcctgtctctcccatgatagcggtcttgctgcctgctttgaagtcatgactgaaatgatcgaccaccagacggtcgccgtcagcatagtggaatgacgtattgttaaaacggatacctggtacttctttctctggtgtgcgcccctcagtggtaaactcctgctctgtctggtccagttcctccagcctgtcgatacttgctgtggcgtggatgatgccaggaaccatgttcagcatctgcaggataggatgttgtatcatacccaccaactgcaggaaggaggtcatcacaccaaaggtgatggtaccgtttcgcagtccgatacctccccatacgaaagccatcaggtagcccagtccgaagacacagcccatgatcagtcgggtgatgacggtgaaacgggtccgtcgcatcacattaccttgcagacgttgctgcatcgtgtccagacgctctgtcacccattgctcactgcccagggaacgtaacacggcattatgctccatggtctcctgcacctgcatctgtatcttactctcgtcttgtctgatgtcgagagtcatcttccgtaatttcctggcgatgagctttccgaagatgatggcaacgggggtgagtatgagcaaagcccatgcgagacgggcgtcaaaccatcgcatcatcaggaaggcaccacagagctgtatcatggtgacactcatctggggtatggagtctgttgtcacagagctcaccgtgtcaatgtccttggcaagtcgtgaggtgatatccccggagtgcatggtcttgtcaccaaagagctgacggtggaagagtctgctgaatatcctgaggcgcagcatattggtctgacgcacattggcggtggtcgtcatgtagtaatatacctgtcgtaataccacaccgcctaccaccgttatgaccagccataataccatttgcatgacatcctcggcgctcccggaacggatggtcttgtcaataaacacacggctgagccataccatcatcagtccgagtcctacttgcccgataccgatgatgacacgcatcgctgtgttccagcggatgcccctcatgttaagccacagccatgtgacgtatttcatagattaattaggaattagtaattaataattagtaattagattactctataactccttctttttgccattgattgatgatggtggcaacatcttgcagtgccgtatcttttgtcacctcgtactcttcgcagagcttgtcggcaagttgctcgacggtgaagtcgcccatggcgtctgcctgcttccacaaccatgccgccgtctcattgagggcaagcagtctgccgaagttgacagcggcaagtccttcaccagtgatgacgtgctcaccacaaacctcacgtagtacaaattcttttttgattctcataatcttctgtatattgctaatatatatcttctaataggtcgcagataccaccagagcctggtggcacgcatgcgccatttgctgtataagtcatgtcgcttgccgtcagcacttaccacatgagtggctatcgcacagatgtcgtcaatcttacagtgttctgtgccgatgatgttgccatcacccatcagtaccacgtcatgaccgtcaatcttgatgatgcggtgtaccacataacgacagttctccacccaggcgagtaccacatcacccaccttgggatgatctggtttctggaggatgacactctccttgccaccaataataaaaggaagcatgctgttgcctttgacgggtaacgtcacactcagcccctcttttgccaatcgggtcgcctcctctaatatctcatgatcactaatcatctgtcaactctcaactgtcaactgtcatctgtcaactgtcatctctcaactctcaactgcctcctggcaaaccttagccgcttcctcatcgggcagacactcaagatggaagacgggtgtcgtcatggcaagggcattctctgtctgatgcagtccgtcagcaacatgctggtcccaccgcttaccactaatactgggtactaatgatgcgtaggcctcgatacctttcagacggcgtatcttgttatagggtgcctgactgagcagcacgataccacccaacgggtaacagacatttcgataacagggggtcttgccgctccaaggactgccatagaccgttgcgccatcatgctggatgcgtaccacagggttgtcgtcgtttaccaatgccgtcccctcaatatatttcagccatagacgggcatgggtgctcttccccgtaccgctcttacctaaaaacatataagccttttctttgtgactcacgacagcggcatggaataatacggtgtcatgcggtgctgtggcaagagcgtataacaccatcagcgcattgtcaatggcgagcttgcgatatttacctgtcattaccaacagtccttcgtggtagtcgtcaggacataccagccagccggctgtctcgtattgccaacggaactcaaataccgacttgccatcggctgtcttgccacagaagatttcctgaccttcctcttcctgacgcagctcctcggtatagtcgatacgctcaccgtcctcgatggtcagaatgaataatgctgtgtttttgtcacaacagaacggctcatagttccgcatcagcgcaaagtcctcaacagctgtttgtatgccaaacacatggtcagcaactttgtaatatctggtcgttatcattgtcatcatcactgctgcacgatgtctgcatacttgcgccgtaaatcatgaggatggcggctatcgtccaaaactttatttctctcataatgtttacaaacacgctttttatgcgcttttaggtcgcaaaggtacgaaatatttgtgagaacatcaaaaaatagagtaactttatgacattcgacttgtaagcaaagataaaccctttggcgttttacaaattactggatgcaatatttcttcgtccgcacttccttgccaccagttgagggaatcttttacactactaaatagaatagagaaaaaataaataaagcttctttttcccttcccctcaacagggagaggtcaggagagggtctcccacattttagtcttctctgaagccttgaagagatactttcgctcgaaagtaaaaataaaaaagttccccttttattttgtactttactcgcttatttgtatctttgccaatggaaacatcaagttctgcctatgagtacacagctaatgacagagaaaatcgcagagtacttcaagactcagcccgtcttgagagcatggctgtttggttctttcgctcgtggtgaagagactccggatagtgatgtggatatattggttgagtttgatcatagttcaccaattggtctttttgcatatgctcgaatgcatcgtgagttagaagaacatttaagacgaaaagttgatttggtagaagaaggttctttgagacctgcagttctaaatcacgcattacatgacattaagattatctatgagagaagcaattagagacatagacagactctgtcatatagacgagtccataaagcatgtgatggattttcttaaaggtaaaacatacgaagagactgagacagaaattacacatatactaacgaggaagcgacatgcttcctcgtttgctttatccctccccctcaatgaatcattcagtcatcgacgaagtcgcttgccagagcaagaaacccagctttcttgtcataaaatagatcaagagacgtactcctaatccatttagggcagcatcgcgaattgcgatggtgcttatgagacccgagccatcatcattgttttccaagtgagacaggtaccagtccctgagtgtcttctcctaatccatttagggcagcatcgcgaattgcgatggtgcttatgagacccgagccatcatcattgttttccaagtgagacaggtaccagtccctgagtgtcttctgaccaagctcttcgaccttgcagagaaagtcaccaccaagttcgatgattcctctaaggatcctgtcaccaaatgtgaagccccgcatgatccccccaggaccaccatccgcttcacgaaagagcatcagatggtggaaggggacttgttttaaataaaaagctcccaccgaagcgggagcataggttttacccttcggccattatggccttattgtgataagatgtaggaaatcttattgagcgcaaaagtagtgaattattttgtgatttcaaaattaattcgtaactttacggcatattttaacatattattactactatggaaagaatactaggaattgacacaggaacaaatagccttggatgggcaatagtagacaaagaggatggcgtgactcaattggtggctaaaggtaccaatatcttctctgaaggtgttaaaatagagaaaggtattgaatcttcaaaagctgcagaacggacagaacatcgttcagtccgtaaacattattggcgacgcaagataagaaagatacgtttactaacgatattgagtgataatcatttatgccctcctttggataaatcaagtttacggcaatggagattaaagaaaatttaccctgacagtgaactctttatggagtggcaacgtacggaagataaagcaaatgtcaatccatataaattcagatatgtttgtctgacacaaaagttggatttgacagacataacccaacgttatattcttggtcgtgctttatatcatttgaatcaacgtcgtggtttcctcagcaatagaaaggaaacgacaaaagagtcggaaggaaaggtaaaagaaggtattagtgacttgtcagatgaaatgaaatctgcaggctgtgaatatttaggagaatatttctatcggctctatcaagatggaaagaaaatacgaaatcactatacggctcgtaaagaacattatttgaaagagttccatgctatctgtgataagcaagaactggatgcagaattggtgaagaaactggaaaaggctatttttgatcaacgcccattgaagtcacaaaaaggtcaggttggtacatgtacttttgagaaaggcaaacctcgttgcccattatcccatcctttatatgaggactttagaatgtatgcattcataaacaatattaaggtgcagattcatacgctatatgagaatacagaaagaggactgtcagaagaagaaaagaaacaggtgatatctttattcaaacgtaagtcaaagcgtactttcccgtttgaggatatagcaaagaaattggctggcaaaaacaactattgctattataaaagtgatgaggataagccatatcggtttaattatcagttggacacgcaggtatcaggaagtcctgtaaatgctcagttggaagaaatttttggagaagattgggtgactagtgtatgtgaggtttatacacttgcaaaggataagtcgcgttttcagattgagaatgatatttggcatgccctgttcttctatgatgatgaagacaaactgagagtatttgccaagaaccgattacagttagatgatgaacaggcagagaagttcagtaagatatccatgcctaacgactacgcagcattgagtttaaaggctatccgaaagatacttccttatatgcgtgattatggtttgatatattcagaggcagtattccttgcaaatcttgtggaggttttacctcaacatatctggggtatcaaggaaacacgtgaggctgctattgagaatgtcatagaggttatgcattcttatgataaaaaaaatgttgatagtgtcactttggaacaatgtgtgaaaggattcttaaaggacagatataacattagtgatgatgatttgaagagattatatcatccttcaatgatggaactttatcctcgtcagcgtcctaatgatgatggcatttatcagttgggatcacctcgtattagcagtgtcaagaatcctatggctatgcattctttgtttagattacgcaaagttgttaatctgttattaaaggaaggaatgattactcctgaaacaaaaatacatattgagttttctcgtgatttgaatgatgcaaacaaaagaaaagctcttcagacactgcaacgtcagaatgaaaaagacagggaagagtgtagaaagaaaatcgctgagcatattgacaatcctacggatgatgatatcctcaaatatcaattatgggaagagcaaaatcataaatgtatttatacaggcgaggaaatccggataactgatttcttaggggataatccgaaatatgacatagagcatactatccctcgcagtgcaggaggtgacagtacaaaaatgaacttgacgctttgtagtaatcggtttaatcgtgatgtgaagaaaacaaagcttccttctcaattgtctaaccatgacgatattcttgaaagaatagcagggtggaaggataagtatgaagaactggataaacaaataaggaaaattaataccaaaaatgttacatctaaagaagataaagacagactaattcagcgtaaacatctgttgaaagaacaatgcaaatattggaaaggtaagtatgaccgttttttgatgacagaagtaccagaaggattctctcgtcgtcagggaacagacattagtgtcatatctcgttatgcacgattgtatctaaagtcagtttttaaacatgtttatattgtaaaaggtattgtaacgtctgaatttagagagttatggggattacagaatgagtataccaagaaaaaacgtgataatcatgtgcatcattgcattgatgctatcacaatagcatgtgttgataaagcagcttatgataagttggcacaataccatcatcagcaagatgagtataagtatgataagggtagtagacctgattttgaaaaaccttggccttcgtttgtcaatgatgttaagcatattcaagacgaattgttaattgcgcattattctaaagacaatatgcctaagcaggcaaaacgatatgtgcgagatagtaaaggtaataaggttttgacgcaaggtgatacagctcgggcttcattacataatgatacctattatggagcaatagaggtagatggagatgtgaagtatgtcgtacgcaaaagtcttgatacattagaagaaaaggatattaagaatattgttgatgctgaggttcgttctaaggtagagaatgccatattactacatggttcgttgaaaaaggcattggaagaaaccatatggatgaacgaggataagcaaataccgattaaaaaggttcgcattttcacaggctcagtaacccgtccaatcaatattcgtcaacaacgtgaccaatcaaagcatgagtataaacgacaatatcatgtacagaacgatcgtaactatatgatggcgatttatgtaggacgagataagaaaggtaaagagaagcgagagttcgaattggtgaacaacattacggcagctaatttctatcgtaggagcaatgatcgtgtaccaacagataatcagttggtgccattgtatagcaagaatggttacgaactacgatacaagctgaaaattggtacattggtactattatatgagaattctccagaggagatatgggaattggatagaatgaatttgcaaaagagactgtataagataacaggtatgtcatcaatggttctcagagagaaagattactatggtacaattgagatggtacatcatcagaatgcgaagccaagttccgaaataaaaaaagtaaatggtaaatatgtgtctaatgaagactttcgctctggtattaaaatgctccatacccaatttaaggctctcgtccaaggtgtagattttgaattaaatgatttaggtgagataaggagattgatatgataaagcaaacattaatgtttacatcgccagtatcattatctttgaaagatcagcaaatggtcgtgactttcaaagacaatcaagataccgtgacacgtccgatagaggatataggctttgtgattattgaaaatccgatggtaagtattactgtacctttgctcaacgaattggcagataataatgtctctgtcattttctgtgataaaaaacaaatgccaaggactatgttaatgacgcttgagggtaatactactcagcaagagagttacaaatatcagatagatgcttctgctcctacaaagaaaaacatttggaagcaattggtagagagtaaaattaagaatcaagccctattattaaataaggtggggaagaatggtgatgtattgaaacaatactatatgaatgtaaagtctggagatacagataaccgtgaaggtgctgctgctcgtgagtattggtgccgtatctttgatgaagggttcagaagagaacgtgaaggactgccacctaataatttactgaattatggatatacgatacttcgagctgcagtcgcacgagcgttgataggctcaggtctatatcctgcatttggagtttttcatcgcaatcgttataatgcttttcctttggcagatgacttgatggaaccttatcgcccatttgttgatgagactgtctatcatcttttttatgatgaagctattacagaattgacaaatccgtcgaaaggaaagttgatgagagtgttgttttcggatgtgaaaatgggaaaggtgatgcgtcctttggaaaatgctttatcattaactacagcatcattgcttaaggtttataaaggagaaacggataaattgtcattgcctgtgataacatgagtgaaaatagattaaatgcatatcatattatgtggctgtttgtcttttttgatttgccagtagtgacaaagaaagagcgtaagactgcgtcactatttcggaaaaacttgatgaaagacggctttgtgatgttacaatattctgtatatattcgacattgtgcttcttatgaaagtcaaacggttcacataaaacgagttaaagcgatcgttccagaaacggggatggtaagtatcttgagtgtgacagataaacaatacggagatattgttaacttctggggaaaagaaaagaagaaaaaagttccaatagaaccattgcagttggaatttttttagtacttttgcaatcaaatatccacatcgaaagccacttcttaggcacaaactactatatatgtgtctgttatacagagcaatagcatacttaggttgtggtttgatgtaggaatagatagataaacaaccggaatgtttaagaagatttcgccaagtgggttgtggtttgatgtaggaatagatagataaacaacgactttgcgaggtcaccgttggcatcggcagttgtggtttgatgtaggaatagatagataaacaactaaaacatagaaattatgaagactacagcagttgtggtttgatgtaggaatagatagataaacaactgtgaaacactattgtttcacggtgcaaagttgtggtttgatgtaggaatagatagataaacaacacggcataggagaaggagcataaacagtaggttgtggtttgatgtaggaatagatagataaacaacacaatctgaaaataatctttatacttgccagttgtggtttgatgtaggaatagatagataaacaacttgttgacggttacgtgccgtacctgatggttgtggtttgatgtaggaatagatagataaacaacagcaccgccgaaggtcatgcccgtctcggtgttgtggtttgatgtaggaatagatagataaacaacaaccatatccttttcagccatagccttagagttgtggtttgatgtaggaatagatagataaacaacactatttacaccaccaacagcaatctcaggttgtggtttgatgtaggaatagatagataaacaactttcggcatacgagcctgataatcaggcatgttgtggtttgatgtaggaatagatagataaacaaccccatataggtcatgatatggtttctatgtgttgtggtttgatgtaggaatagatagataaacaacctttgcaagatagagtagcagcactcgaaagttgtggtttgatgtaggaatagatagataaacaacgcaaaggttcatggaagccaacgacccgagttgtggtttgatgtaggaatagatagataaacaacgagaacgctttccaagtcgaaagcatgtacgttgtggtttgatgtaggaatagatagataaacaacatgaccgccaccgacatgtggcgactggtagttgtggtttgatgtaggaatagatagataaacaacaggagggcgagaattaggggtaggttttacgttgtggtttgatgtaggaatagatagataaacaactaacggacaggcttacagaatatgcccgagagttgtggtttgatgtaggaatagatagataaacaactaatgtgcgaaccatcaggataccaaatctgttgtggtttgatgtaggaatagatagataaacaacttttggtacactttcgcgaaattttctaccgttgtggtttgatgtaggaatagatagataaacaacccgtttaagattcttcctaactacggcaaggttgtggtttgatgtaggaatagatagataaacaacaccagtcctgagtcggtcatgatgcgccacgttgtggtttgatgtaggaatagatagataaacaacgcaagcatgcgcagccgtcggtaccgctccgttgtggtttgatgtaggaatagatagataaacaacgttatttggttgcggttgcttagagcgacgttgtggtttgatgtaggaatagatagataaacaacggggacggtgcataagaatagggacccaaggttgtggtttgatgtaggaatagatagataaacaactaaccacaaggacggagtgaagggtattgcgttgtggtttgatgtaggaatagatagataaacaacaggcaggatgcacacagtcgggcatcagcgttgtggtttgatgtaggaatagatagataaacaacaaggacgaggtggctcgtgcaatcatagagttgtggtttgatgtaggaatagatagataaacaacgcatccaattgtcataatatatataacccagttgtggtttgatgtaggaatagatagataaacaacaatcaacaaacaaaaagacatcagggactggtacctgtttcacaatgactaaagtccacaatatttacaaactatcaaaacgactggcagagcatcgtttctgccagtcgttttactatctccataacacaaaaaccaaataatcctgctatccctgctacaatgtgattgaaatgccgataaataaagggtggagcctgtagcacgattgggatttatcctgctacaatggtgctacaatcctgctaccatcctacacctagacagcgactgttttttgagtgatttgaaaacggctataggcgttcagttgattggctggagccgtttagtcgtttggctatagccgaacggttgaaagggcgtaccttactccctcgaaggtaggcactaataccccgtcaccagtaactttttacctgtacggcaagcatttcagattacagattacagtttgcataacagttaacaaataacagttccgattttctgattcggttggcaatgattgatttcagatttcagtaagtcaaaacgttgaatgctatgacaaatgacagttagtgaaagtcaacgtttctagtaaaagcgtcaacgattcccagggtagggtgtcaaccttttccgtatagatcatggcagtctcaaatctcaaatctcagtaagcaaacgcaaacaaacaaacagtaaacagtttgttgagtcatactaaaaaagttgaccactatttttattatatatatattatatataatatatatataataatatataatatatttattttgtgtagtcatcattcattttcgcttactgtttactgtttgtttgtttgtttgaaaatccggtgaaaatgataaactgtcaactgtcaactgtcaaaacgcttactgaaatctgaaatctgaaattcgctaactgtaatccgtaatctgtaatgcgagagattccagtatctgcgatagcttgttccagtatctccttcaccttgttccagtatctgttatgggggtgttccaggcattggaatagggggatgggagatactggaatgagggataggaagtatcaagttatagtaattgtattgttacattaaaaaaaaggggcatccggtagtggatgccccctttgaatatggatagggattagtcctcccagttctcctgagtcttacgaacatagctcttgtaacggagctgtgccatcttctgagcctcggcgaagagctcttctgcctcgttaggataagccttcttcactgacaggtagcgaacctcacccaacaggaagtcgtggaagttctcccagttcggctccttagagtcgagagagaacggattcttgccttcctcagcaagtgctgggttgaagcgccacaggtgccagtaaccgca

SEQ ID NO: 4211 - DNA, 17850 bp, synthetic construct
  misc_feature 1..17850: note = Synthetic
  source 1..17850: mol_type = other DNA
cgacctgccgctggagttgaaataccttcccgtcatcgagtccgccctcaatcctcaggctgtctcccgtgtgggtgctgtaggcctttggcagtttatgatcacaacggccaagcgcaatgacctcaccgtcaactcgctcgttgatgagcgtcgtgacctttacaaggcgtcttatgctgccgcacattatctgagcgacctctataagaaattgggcgactggaatctcgttatcgctgcttacaactgtggggctgacaagatcaataaagcgatccgccgttctcatggcgagcgtgactactggaaaatctatccgcgtctgcccaaggaaacacgcggatatgttccggcattcatcgctgccaactatatcatgaactattattgcgatcacaatatctgtccattaaagacgacacttccagaaaagaccgatacggtgatggtcgaccgtgacgtgcatttcgagcagatcgcccatgtgctggggatggacattgacgagattcgtgatctcaatcctcagtatcgccgtgacatcgtcaacggcaacagcggacaggcttcgctcagactgccggaagcgatgattaataagttcatcgacaatgaggactctgtctacgcctatgccccgacagactatcagcccaaacgtaccgaggttgaggctgagggcggacactatgtggtgaacaagaatcaggtttctctcgtgtcaaggtcctccggcaagaagaaagcagagggtagcaaggccgaggataccggagctactgcaaccaattctcaagacgattctacctcaagcaaagaagtagagcagacgactgttgacgagagcgacaacgacgataacaatgaaagcggacagagcaagcgctcttcacgcaagcgcagttctcattctcgtaagaaccaggacagtagttccaagagcaagagtagtaagaaaagcaaaaaacaaaaaagcaaagataaaggacagcagtccaagagtgtaaccgtcaagaacggggataccctcagtgagattgcagaaagaaaccataccacggtgaagaaactccgtaagttgaatggtatctcgggaagtacgattcagaaaggaaagaagattaaagtcaaataaccttgtggcgtatggacgaattagagcagaaaaacaaggagcgtgaagtcgctgacaacaaaatgatcaatgatgcctttcagcatctgttggatacttatctcgcttcgccccatcgaaaaaaggtggacatcatcactaaagcgtttaacttcgcccgccaggctcataaaggcgtgcgacggctgtcgggcgagccctatatcatgcatcctatcgccgtggcgcagattgcctgcgaggagatggggctgggctctacgagcatttgcgccgctttgcttcatgatgttgtggaggacacggactatactaccgaagacattgagaatatctttggagagaagatagccaagatcgtcgatggactcacaaagatcagtggcggtatctttggtgaccatgcctctgcacaggctgagaacttcaagaagctgttactcacgatgagcgatgacatccgtgtgatcctcatcaagatctgtgaccgactgcacaacatgcgtacgcttgcgtcacagcctgccaacaagcaatacaagatcgcgggagaaacgctctatatctatgcgcccattgccaaccgactgggactgaacaagatcaagacggaacttgaagatctgagttttcgctacgagcatcccgaggagtatgcctccattgtcaataagttgtctttcacagaggaacagcgcaacagagtctttgatgacttcacggcacctatccgtaaggctcttgatgacatgggcatcgaatacacaatcaaggccagggtcaagagtccttactccatctggtctaagatgcaaaacaagcatgtaaccttcgacgagatctacgacatcctcgccgtacgtatcatcttcaaaccatctgaccctaaggacgaaatcaacgagtgcttccgcatctatgttgccctcaaccaaatctataagagtcatcccgatcgcctgcgtgattgggtcaaccatcccaaggccaatggctatcaggctcttcacgccacgatgatgtcacgccagggtcagtggattgaggtgcagattcgttcccagcgcatggatgagatcgctgaacagggatttgccgcccattggaaatataaggaaggagaatactctcacgacgatgacgagctcaacaactggctgagtactattaaggaaatccttgatgatccacaaccagatgccatggacttcctcgactcggtgaaactcaatctattctcttccgagatctttgtctttactcccaaaggtgaggtgaagacattgcctgcgggctgtacagtcctcgactttgcctttctgatccataccttcttgggcagccattgtattggcgcaaaggtcaatcataagcttgtgccgttgagtcataaactccaaagtggtgaccaggtggagatccttacttccaactcccagcacgtgcaacctgcatggatcaatttcgtatccacggcaaaggcaaagggtaagattcaagcagtgctcaggcgagagagtagggagatacagaaaaagggcgagaaaacgctgaatgactggcttgccaaaaacgacgtggaactttctactgccgttgtagacaaactttcagacttccacgatattgctaaacatgaggacttcttcgaggctctgggcgagcgcaccatcatcctcagcgataaggatcttgatatcctccacggcaagaagaaagaaagcggttcgacaggttggcgcaagtttgtaccattcttgaacaaggggaagaagaagaaggaagacgacatgccgcaacttttggtcgttggaaaagacttcgataagaagaagccttgcattattacagaggagaccatcggcatgtatatctttcccaattgttgtcatccaataccaggcgatgatatcttgggattcattgacggcaagaaccgcatagagattcacaagcgttcctgtccggtggccagcaagctcaagacgagttttggaccgcgtatccttgatgctaagtgggatatgcacaagcaactcttctttgatgcaaccatcgaggtcaatggcatcgaccgtaagggtatgctgcgcgatgtctctgaggtcatctccaataagatgaacgtcaatatccgcaaggttgcttttactgccgatgagggcatcttcaaaggctccattgagattcgagtccatgatcgtgaagaagtgagggtgattatggggagactcaagaaaatccctgacttacaggaagtcaagcagatattatagagtagggcagaacactgctcatcgttactctaatcaagtctgacgatgggcctccaatgccacttgagacattcgaccgactttcaatatcgcaaaaaatataagggactgctctttcgggcagtcccttttttcatgtcttttgcggttctattctttacattcgattagtgaaaagcggtgttcttaccactaatagtcacgctgacctcctgacttccgctcgccatgaaagcaggattgtactcacattccgccttgatggttcctgcgtgatatttgcccggacggtcaaggaagtattctgtcatcaacgtgtagtcgcccttgggaaatgtctcaaagtagtagtcggtctgctcatccatctgtcggacatagcagcccagtcgccaatcatagtcggacagttggttgacgggcatcagacaggccggtcgatgatcggtgatacgtacgaagtcatagtcgcggtcggcgtgtaccttgatcacaacctttatccggtcgcctatgttgttggtcttccttgagctgtcagcaggcacgatcagacggctcacacggaagtctttgctttcatcgggaagagtagaagccgtagcctcgtgccagcctgtcaccacaggccaagccactctttgcggcatgggacctgtaaggaaggcggctacagcatcgattgttacgatgggcgtatcccatttctgcgttttcttttcctctaccagccaccgcttcatgcccaaaagcagggaggtgtcacttggagcaatcagcgatagggcgtggatggcggcagtcactgtaggaatcttatagttgcgccaactgtaataggcttttggcgtatcgaagtaagttccccggtcggaggttgtgacggcatactggctgaggctctctatcatgctccgtgcggacttggcccggtcgtctgtatgcagtgccgtagccacacgggctttaccgagaatcgtgaggtcggcaccatgctcctcggcatagtccaacaaggctttcctggctgtgtttgccttcactgcctgctgtgtaggtaggagtgacagcgcatagaggatatggtaggcctcctctaaatcgcaacttgcggcaccggctttctgcagttgtttggcatcgtcggcgagccaggtcgtcagctttgtcgttgtgggttgcagcaattgcaatatttcacggtgatctttgaccaagggtgtaagtatctcggctaccgtcaccgtgacgagacggcttgcaggcattcccggccaccaggagaatgaaccatcggcacactggagacgtcgcaagtttgtgaagggtgtgtcagcatcttggagaggcttcgattcattctcatcgtcgttcaactcgttgagcttataaccggcatatactttggccgccaatgacagcgcgtcgctgcctcttactgagtctatttcgcccaaagcctcgcggatggcatcggcagcagagaggctgaccatctttatctccggtacgcgctccttgtccgaagcgataggtatcgtcttctccattccgtcgccgtgcccttttgctgaggcttcggcccgcacagtgatgctttgcagcaagctgtcggcaggcacgtggagcgttgcggtgaaagccttagacgtggacggcttcaatccgaacttgtatttctcgtcaagcagtgactgtcccaagtgggtagcttgtacggtcaacgttcccttgagccgctcatctcccatattgctcacggtgagcggcagttgggcgtcgtcgccccgacggaggaagcgcggcaggttgtcggacaccatcagcgccatccgagtctgcactgtagtgtcgatggaggccacggcaccctcgcggtcgtgtacgagaccttgcagccgccatgtggtaacattgtcgggcatggtgaaagcaaacgaagcaaagccgttgtgatcagtcgccgtcgcgggagcccatagggcgagagtgcggaagttgcaccgcacgcgtgttctggaatttccatcagccaattttccttggttgtgcggagcgagattctttgtcttgttggtagcggcatagagtctgtcttcttcctttacctcaacgtctcttttgatgacgggtgccgagagcttatccaccggctccgcaacgcccaatgcgacaacctcctcaaggttgtcttcattgtcacccaatgagatgacgaccggctcaccactggtaacggtcactgttgccgactggagaccgacgtatgaggcggtgagctgcgccgtgccgcggacgggtatggagaacgtcccatcgacatccgtcacggcactcgccccttggttggttctcagcatggctcccatcagcacttcgcccgacgggtcatatacgatgccgtggcaatagccgggcttgcccttgcctttgctttccagcgtccatccgcctaaccgataggccactgaccgcgcgttggcttgaaggcggatgaggccgtcggcaaagattgcgggatggatgttgggtacgactaactgctttgaacgtcctgtctcacctttgatgagttcgtcgttgtcaagggtttgagtgtagctggttggcaggtcatcgttgaattcccagttgcttttccaagtgttgtcgttgataaggtcgagcgcgctgtcgtagagcgtcaccatggcctgggcatctgctggctgtcccgtaggatgacagacgcgcaaccgccactcttgctgtcgcccgggttcagtgacactgtccaattgatcccattgagcttgaagcgtctctgtcggttcctcgtagggtagctcgatgtcgtagcttttcatcttgccttgtccataggctgctactgagagggtaacaccgcctccgtaggtctccttataatataaggtgtgtgtgaggagggtgtcgctcagcgccattgagccacgctccaacaggctgtctgccgaccgcaactcgtaatagagtgtaagccctttctccgttgtgcccatctgtacgattacaggttgtccgttgcttctgaacgcgtcggccgatgccgttgcccagaagaaggtgggcttggaaaggtgacgtgctgccgggtcgatgacggaaatggtgttgctcagcgtgtcgtcctcgacccatatcttcagcatatgcagtccggcttccagagaatgcaggggaatgaaggcctggcggttggcggctatttctcctttcgtgccgtcgtcgagcagccatttcacgttgccctgtaccttgttgttctgagcatcgttgagcaagcagcgtacggcaagcagtgagtcgcggcagtagcctttggtactgttcagaaagacgctggtgatgtcgctggtgagaaaagctctttggttactgtagctcaagcgaacatagtctgtgcgttgctgtccgtctggcgctgtgatggtataagctttctcaaggtgagagagaaaatgattatcggcgtctttaggtactgcaatgcgatccgtgaacattccgttgttgtcagtgtataaggtagagtcgcccttggcctccactttggctctggctacgggagcaccactgagcagagagactcgtccgctcacggtcaccgtgtcgccgggcatgtagtgtgagggtgaggtacggaggctcacttgcagactacccaacttgtattcctcaaccctgaatgacagtccgttgacatcaacatcgatgtcgtctatttctttgcttaaagagtgactgatgagtcgctccaactttgctaaggctccatcggtcttccatctcagctccccatgaccattgtattcgttgccggtcacccatttcttggtaaggggaatatcggcatacgccgtgccgtagtcgtcggttgttacgtcgagggtgtcgatggggtggtcgtagtcccttgtgttgttgaattgcagttgcaatggcatgtggcttagtgccgtgcgccggtgccccggccgtcgcacaaaggccaccacagccacgtgagccgtgtcgcccggacggtagagggcgcggtcggagtaggcgtttgtgataatctggcaggggctggcgggctcgctctcgtccggatagaccatctctgattctcgccaatggtcatccgctgtgaacgggcgcacgtacattccacctctgctgtaaggcaccacggcttctccctgctcgtctgtggtgaatacgccatggacggaaggctctgatgaaatggaatccacttcggtgtcatcgaggtcatatacggccgtatcggcttcggcggtgtctacgtcaatggcagccgtgtcgctttctgcttcttcatactgattgcttccttcatcgccaatctcaatcttcgctcttggtaccggacggcccgtgcgggtatcgacgacgcgcatccgtacattcttccccgacatggggttgacggtcacgttgaggtcgctgacgatgaagccgaggatcactggcttcacgccttgtgccttggcaacgacttcataagagccgtagagtagtgggggcagttgcagactgtcttttgttattcgccaggccttgcctacggatagttgtctcgtagcgtgccatagaggggcaccgctccgtcggtcttttttcgtgccatacacagtcacatcgacctttgacagattggtggaaccgacatgcagccacggtctccctttggaatggacgtactttccttcgaggcggatgctcagggaaggtcccttggcttctgactcgatattgcgcagttggttgccatatcccgatgtgtcgccagcccatcgccgcagactgctgtcggcgatggctacacttgcggagtcgctgagctgacgggccttgacagcggtgacgagttggctctcctttaggtcgccatacttggcaagcagagagtcgcaccattgcacgatgcgacttttgttttccgatggtgccatccacaaatcggtgacgagcgctgcccgtcgattgcctacctgctcatagtagtcgtacgccttcttgtattgtccggtctgccatgcgatcgcactgagcaagtcgccgccaaacacctcactgccgggtatgagcaggggcgagaagtctgtggcttgggtgtgggccagcagtgctgggtcggccagtgcctcgtcctttagtcccaagacacaggcgtagatggcagccagagcaggatgtgtcgtcttggcctcacgcctcttttgctccaactgttgacggacggaggccagggagtcgtcgccataggtctgacacatcaatgacagacggagcaggtcggcggtgagcaactgaccatactggttctctttcaatgctttgtcgctgatacgctcaagaacgtttatctcattcttgggcttgtcggccttggcctgacgatagacgtctgcccaaagctgttgatagtcttgttgtgcatctgttggtaaaatggcgcacaacagcaaaagcaagatgctgtagattgtcctcatatgctgataactttacttcgtttctcgtcgtttcttgtcgttgagatccgctcacgatcttgattgtgagacaaactcgtcaatttatgtagcaaaaataagcataatattcgatattctccaccttttgggaatacttttttatgatgagccaacaacttttagcacaacagcgatagaagtcgctctaagtttcaattacacaaggaaacgatgacgtctcggcgtaaagcttacgtctgcttgctgtcttttaaagcgggtgcattcaaagacactcgtgtatagaatgaatctgttcttcattcctttatatatatagaccattgtaactctgtctcctaactttgttcgtttttctgacaaaaaacgacctctgagaatcgattcttttccacgaagacctactttgctctgattttcgcgaaaaatcgtgtgtttttgtaaattgttgataattagagcgttgtatacatagactctttttgtgaatatcaaacagaccttctctcgcaaaattctctagagaattttgggtcagaaaggtactttgacctcatcagaaaggtactttgacctggtcatctaagtactttgacactgtcattcaagcgtgatgacagcatcaaagtacctttctatactcctcgcaacgcaaaaattggagagagaagtcaattttgtctgagtttaaggatagaacggtgatcctgctttctctggattgcaagtgaaagtggaagatgttttgtaaagaaataaacagatgtcttatatgaactatcatatttgatggaatctggaaatagctgctttattattagggattgtacaattatgccctactatggctttggcttttagagtgagtattgaatagttttagttggtgaaaagacaaaaaactcccaccgaagcgggagtataggataacatccttcggcaattactgcctttttgcgataagatgtaggaattatcttattctttttgcaaaaatatgagaattgtttggtatttccaaataaaaatattaattttacggaaatttaataactgagcctatggcagaaaaaattttaggaattgatacaggtaccaatagccttggctgggctattgtcgaaaagcatgacgatggttatcgccttgtggataaaggggtgaatatattccaagagggtgtgaagatagaaaagggcatagaatcatcgaaagccgcagacagaacttctcatcgctctactcgtgtgcggtattatcgtattaaggttcgtaaaattcgcttacttaaagttctaagtgacaatcacctgtgtccaccggtctcttctgacgaattgaaactttggcgcttgaaagacatttatcctaataatgagttgttacgtcaatgggagcaaacagatgataaaaccgacaagaatccttatacttacaggtataagtgccttacggaaaagttggaccttacggattttactcaacgttacattcttggaagagctttctatcacatcaatcagcgtagaggttttcttagcaaccgaaaaggtgagggcagtgaagaagatggagtcgtaaagtcaggaattagcgacttaaccaaagaaatagaaagttccggctgtcattatcttggtgagttcttttatatgctctaccacagaggtgacagaattcgcaatcattatactgctcgcaatgagcattatctaagtgaattcatagcgatttgtgagaagcaacatttagatgataaactggtaaaatcgcttaaagatgttattttctcccaacgtccattgaaatctcagaaaggacaggttgggcattgcgtctttgaaactaagaagcccaagtgtccaacatcacatccgttgtatgaggaatttagaatgcttagctttctgaacaacattaagattcagacaccccaggatgatgctttacgccctttgacagaagaagagcgcaagaaggttatgcctaaattttatagaaagacgaagccttcgttctgttttgaagatattgcgaaagaattatctggtaaggggaaatatgcttattataagactcccaagggcaagccttaccttttcaattatcatatggactcttctgtatccggttgcccggttacatctggtttaagagatatcttgggggaagattgggtcaactctatatgtgaggtctacgataagactcagggaaaaactcgcttgcagattatcaacgatatttggcatgtgctttttgacttctctgatgtagaaaaactcgttgaatttggaaagaagcatttacaactcaatgatgaggatgctaagaaattcagtcaaataaaggtctgctctgagtacgcttctttgagtttgaaggctatatgtaagatccttccttatctacgtcgtggaatgacttattcactctcgacgttcttcgcaaatttgggatcagttgttcctgcagatatttggaaggacaacaccaataaagataagatcatcaaagatatactcgacgctatcgctgataaggacaacaatgcagctgatgacagaacgacagagaggtgcataaaagactatctgatttcacgttttgatattccaaaggaagatacggatagactttatcatccatctatgatagagtcctatcctcatgtccccgaacatgttaataagcttgggtctccaagaatcgatagtgttcgcaacccgatggcaatgcgctccctattccgtttacggcatgtcgtcaatacattgttggaagaggggaaaatagatcgtaatacaaccatacatatcgaattcgcccgcgagttgaacgatgccaataagcggcaggcattgttaaaattcatcaaggacaacgagactgatcgaaagaaaatcaaagcagagattatacaactctacaaagatgaaacaggtttggcaatagaaccaaccgatactgatatattgaaatatcagttatgggaagagcagaatcaccgttgtatctataccgatgaacagatcggtatagtagatttcttaggcgataatcctaagtatgacatagaacatacgattcctcgtagtgctggaggtgacagtacaaaaatgaatctcacactctgtagtagtaaatttaatagggagatcaagcaaacgcttcttccttctcaactcgctaatcatgaggctattcttcttagaatcgagaattggaaagcgaactacgaagaattagatcaacgcattcgaaagatgcgcacttctagtaatatgactaaggaacagagagataaattgatgcagaggcgaaatcttttgaaattacgtagagattactggtatggtaagtatcagcgcttccttatgaccgaagtgccggagggctttagccgtcgctagggtactgatatcagtgttatttcaaagtacggacgcttgtacttgaaggcattcttcaataaggtttttgttgttaaaggattggcaacttccgatttccgaaagatatggggcatccaggatatctatactaagaaagaacgtactaaccatgtacatcattgtattgatgctatagtgattgcatgtattggccccgatgagtacagtaaactggctgaatattatcgggatgaagaaaaccatgaatggtatggagcttccaaagggcattttgccgcaccgtggccgacatttcaagaagatatgaataagatccggaaagagatagtcgtgtcccatgatactgccgacaatattgggaagtctggaaggcatcggatacttcttaagggaaagaaggtctgggctaatggcgattctgcccgtgcgtctctccacaacgacacctattatggtgctatagagcgaaatggaaaggtgaaatatgtggtccggaaggctctggatgcaaaattcaaggatacagatgtcgacaatattgtggataataaagtaaaggagatcgtaaaagatgctatcttgcaaaatggtagtttaaaggaggctatagctaatggcatatggatgaataaggaaaaggggattgcaatacgtaaggtgagatgctttgcacctaatgttacacgaccgttggatatccgacatcatcgtgatttgtcaactaaagattataagcaacagttccatgtcaccaatgacaccaactatgctatggcgatatatgttgggcatgacaaaaaaggtaaggaaaagaagagcttcgaacttatcaacaatctcgatgcttgcaattattacaagaaaagcaatgataaagagattgtgggatacaatcttgttcctttgtcaaaagacgacagtcccttgacctatgtcctcaagaaaggctcaatggtcttgctctatgagaaaactccagacgagatcagagattgtggtgttgaggaattggtcaaacggctatataaggtaacaggcctttcgtcgatggtagtaagtggctgtgtatacggtactatagtcttgcttcattcccaggaggcgcgatcctgtggcgaattgaaagcgaagaatggagcttataagcagaatgaagaatttagaagttctataaaacttcttcatacacagtttaaggctcttgttgctgggtatgattttcttatcaatgacgttggtgaaatcaagtggttaagataatgttgaagcaaacacttttcttttcaaatcctgccaagctctccctcaaggataagcaactggttatatctataaaggacagtgatgatgttattactcgccctatagaagatatcggttatgtagtcattgaaaaccagcagatattactcaccatccctcttgtgaatgagttggtgagcaacaatgtctgtgtaatcttttgcgacgcaaagaatatgccttcctcaatgcttatgggattgaatactaacactacgcaagctgagagtctgaaattccagcttgatgtttctgaaccgtcccgaaaacaagcctggaaacaaatcgtggaacagaaaataaaaaaccaagcagcactattagacaaactgggcgtagaacatcataatctaaaggcttactataactcagtactgagtggagatacttctaatcgtgaaggaatagcagcacgattgtattggaaacatttgtttggtaaagattttcgaagagaacgggaagggcttcctcccaataatctgttgaactatggatatgcaatactcagagccgcggcagcaagagcgttgatcggttccggattgttaccagtgtttggcttgtttcacagaaacaggtataacgcattccctcttgccgatgacataatggagccttatcgaccctatgttgacgagattgtatacggcgcggcagaggagggacttctgaacttagataaagaagtgaaagtaagattgttgagattgctggttacagatgtaaaaatagggcagatgactcgacctttgtccattgctctgactacgacgtcagcatctctgttgagatattataagggggaaataaaaaaaatgtcattaccagtttttacatgactttagatcgccttaatgcataccatattatgtggttgtttgtattcttcgatttacctgtgacaacaaagaaggagagacatgatgctgctctgtttcggaaaaatttggagaaggacggtttctccatgatgcaattttctgtctacgtgaggcattgtggatcgtatgagagtcttgacgttcatgcaagacgcgtgaaaagttttgtaccaagatatggtatgataagtatattgtcagttactgataagcaatatagtaatatttataatttccgtggagagcctaaatgcacaaaatgtagtaagaaaagaaaatttgttggacaacctatacaattggaacttttttagtaactttgcaatgaaatatggacctacgcttccgttttttatttcttggatatagtgtattcccctttgtacaaaggagttcccagagactagttgcggtttgatgtaggaatataaggatatacagcggcattctgcaaaccttgcttttgaagtaagttgcggtttgatgtaggaatataaggatatacagcatacagcgcgtgcataacattcttatcaccgttgcggtttgatgtaggaatataaggatatacagcaccgacatcattgccaaacaaactatgaatgttgcggtttgatgtaggaatataaggatatacagcctcaagctcaggaagcctaccatgtgtatgttgcggtttgatgtaggaatataaggatatacagcaacgccactcagaggaacaacagaagtgaggttgcggtttgatgtaggaatataaggatatacagcctcagagcagccattagaccggtgagcaagttgcggtttgatgtaggaatataaggatatacagcctgcgttgcacgcagcagactggtacaagagttgcggtttgatgtaggaatataaggatatacagcgagaccaaggaaaacgccagataatgccagttgcggtttgatgtaggaatataaggatatacagccagcacctacaccaatagccataatatatgttgcggtttgatgtaggaatataaggatatacagctctgaattttattaaatcttactttcattgttgcggtttgatgtaggaatataaggatatacagcaaaatagctatacctccacaatcatataggttgcggtttgatgtaggaatataaggatatacagctatctgcgttgcacgcagcagactgacacagttgcggtttgatgtaggaatataaggatatacagcatgatgtttcgattaatacggttgtttctagttgcggtttgatgtaggaatataaggatatacagcgtaacgataaggagggtgagattccctcccgttgcggtttgatgtaggaatataaggatatacagcgtattcgcacgaacggaatcaagcgaagcagttgcggtttgatgtaggaatataaggatatacagcgcatggagtgtggaggaagtgtctatagggttgcggtttgatgtaggaatataaggatatacagcccgcacgcacgcacactcacctcgctgcagttgcggtttgatgtaggaatataaggatatacagcacaacagagcggaagagccacggcacagcgttgcggtttgatgtaggaatataaggatatacagcagagctggtacaagatgactgaccccgtggttgcggtttgatgtaggaatataaggatatacagcttgtaattgctgaaccgtcatacctttcggttgcggtttgatgtaggaatataaggatatacagctcggtgaattattccgtggatatgaccctgttgcggtttgatgtaggaatataaggatatacagcccatgtatcgagaggataagtgaagcccctgttgcggtttgatgtaggaatataaggatatacagcgtaagacattgcgaaagcaggagcaggcggttgcggtttgatgtaggaatataaggatatacagcccccaaaaatggaatgatggcctccgcaaggttgcggtttgatgtaggaatataaggatatacagcatcacttgctaagataaacagcacgtatggttgcggtttgatgtaggaatataaggatatacagctttcagaaacattacaaattagataattatgttgcggtttgatgtaggaatataaggatatacagcggaagagctgaaccgggcgatgaacgttggttgcggtttgatgtaggaatataaggatatacagcaaactaccttacaatgttatgcctgtaatgttgcggtttgatgtaggaatataaggatatacagcaaaagaggaagttagcaggtcacaaagttggttgcggtttgatgtaggaatataaggatatacagctttctcattcatggtcgcgtggcttagggggttgcggtttgatgtaggaatataaggatatacagcggtcacgcccatcccatatactacctattgttgcggtttgatgtaggaatataaggatatacagcacaccacgtgaagaccatagtccctcacagttgcggtttgatgtaggaatataaggatatacagccttcgttgtcgaggatgccgcgcagatagggttgcggtttgatgtaggaatataaggatatacagcgggcgatgctcacgcactacccaccttgttgttgcggtttgatgtaggaatataaggatatacagcttgcgatatgctctctatgcgcagctgcccgttgcggtttgatgtaggaatataaggatatacagcttcgacaagatcgaccgcaacccctacgacgttgcggtttgatgtaggaatataaggatatacagcacaccgccataactatcaatttcagcgtcagttgcggtttgatgtaggaatataaggatatacagctgtaggtagaaagcaaggggatagtataggttgcggtttgatgtaggaatataaggatatacagcggaagccagcgaggagcaacggtcacgctggttgcggtttgatgtaggaatataaggatatacagccgggctttacgttcctccgcccatccgtggttgcggtttgatgtaggaatataaggatatacagcgcggtaacaacatgccaaaatattcagcagttgcggtttgatgtaggaatataaggatatacagcaacacggccacggtcaccatacttggtaagttgcggtttgatgtaggaatataaggatatacagcacgacgacccaatctacaagggcatcttcgttgcggtttgatgtaggaatataaggatatacagctttttttgaatagttcgttgtcagtgttggttgcggtttgatgtaggaatat

SEQ ID NO: 4212 - DNA, 17661 bp, synthetic construct
  misc_feature 1..17661: note = Synthetic
  source 1..17661: mol_type = other DNA
tgagaatcgcacgcagcgcatcatgcgcaacgggtcgtcggagaaggtgatgtcgggatcgagcggagtgcgtatgataccgtcttcaaggtcgtaaatgccgtcaaaggggtcgaccagttcgccgaagcggtcgtggttgaggcatacagccatggcattgatggtgaagtcgcggcggttctggtcgtcttccagagtgccgtcttcgactataggcttgcgcgacgagcggtcgtagctctcgcgacgagcaccaacaaactccacttcggtgtcgtgatacttcacctgcgccgtgccgaagttgcgatatacggcaagatgggcgcgccatctgcccgtcttcgggttcttgcctaatttgtgttgcagtgctgtagccacctcgatgccgctacccacaaccaccacgtcgatgtcgttggtggggcgttcgaggaagatgtcacgcacatatccgcctacgagatagcactcgactccaagttcgtcggcaacctcgcctatgcggtgaaaaatattcttgtcaaggatttgtgccagttcggcatcagtgtataatttcattctcttgtttggtttcgtattgcaaaattacacatttttacccgaaatttatctctaaccacctataattgtattattatgtacataattaggatatacgatacttaataattcgaaaattatgtctaattttgcaataacatttttttttaacaaacaaacaaatcaatgaaagccaacaaaatgactctcgtgatggctatcctcgccatcatgttcattgccccggccaaggccaaagcacaggtaaacgcacagctgttttatgatttcggcactgaccgcaagttcgcaaccctcacacttgagatgttcaagcaggacaagtggggtaacacctatttcttcatcgaccacgacttcaactacgaccagcacgtagcaggtcctaacttggctcctggtggtacatacttcgagatagcacgctgcctcaacttctggcagaactcagctatcaagaacctctcgcttcacgtagagtacaacggtggtatcactgcctcatatcctatcaacaacgcatggctcgtaggtgtcgactacttcatgcacagtaaggacttcaagaacaccctcaacctcaaggctctctacaagaacatcaagaagaaggactctgacgtgcctatgcagtttacagcagtatgggctatgaacgacctctttggtgtgaagggattgaagtttgacggatttgccgacttctggtgggaagaccacgctgttgacttccgcgaggacggttcatgcgacatgaagtcgaccgtgttcatcaccgagccacagctctggtataacgttggtcagcacttcggcgtagacaacctcagcctcggtacagagattgagctgtctaacaacttcggatctactggcggtttcaagtgccgtccttgccttggcgtaaagtgggacttctaagcctaaaaagtaaaaaggtaaagaagtaaaaaagtaaaaaggtaaaaaagtaaaagagtaaaaaggtttttaaaaacaataagactatgctttcaaaactctttggcttcgaccccaagaagcacaacatccgcactgagattatggctggtgtgaccacattcctcaccatggcatacattctcgctgtcaacccgagcatcttctccaaccttgcatcgcagggtatggacaccaatgccgtgttcacatcaacagccttggctgctatcgtcggtacactcgtaatgtcgatctacgccaagaagcctttcggacttgccccgggtatgggactgaacgccttcttcgtgtttactgtatgtctcactatgggctactcatggcagtttgcgctgaccgccatcctcattgagggattcctctttgtgctgatgaccgtaacgaagatacgtacactcatcgtagacgccattccggctacgctcaagcgtgccatcggtgctggtatcggattgttcatcgccttcatcggactcaagaacgccggcatcatcgttgagaactcagccacattcgtgaccatcggcaaactgacaggcggctctgcactactcggcatcattggcataatcctcacctcggtgctcgtaatcaagaaggtgccgggctcgttgctcatcggtattcttggcacagcgctcatcggtattcctatgggtatcaccaacttcaacggcatcattgacactccgccgtcgattgcgcctatattctgtaagttcgaattccaccatatctttactatcgatatgcttatcgtggtgttcacattcctcttcatcgacatgttcgacaccatgggtacgctcgtaggcgtatgcaccaaggcgggaatgatgcagaaggacggtcgcattcctggactgaacaaggcttttatggctgatgccattgccactatgaccggcgcttgcctcggtgccagcaccactacaacatacgtagagagtgcatcgggcgttgctcagggcggtcgtaccggattgacagccttcgctacagccatgtgctttgtcatagcgctgttcttcgctccgatattcctctctattccggctgcagccacaacaccggttcttgtaatcgtgggtctgttcatgctgtcgccaatcaaggatatcgatctcgacaactttgctgagtctatcccggcattcatcaccatcatcatgatgcctctgacttacagcatatctgacggtattctgtgcggtgttatctcttatgttgccatcaacgtaatctgcggcaacttcaagaaactcaacatcacgctgtatatattggcagtgctgtttgtgatgaagtacattttcatctaataaaaaaatagagaatctcaatagttgagagttgagagttgaaagttgagagttgaaagttgagaattgagagttatgattacctttttaaaacatcgtaatcacgatgatattgtatataacatatcataactctcaattctcaactttcaactctcaatttttaattaattgagcaattgctcaatttccttcaccatcggcgcagccaaagctcgcttgctggcgggcactgcttgcggtgtgaacttcttgaccattttgttcaacttctgcaactttgccttttgtccggtgcgtgtatattccttgcgcagctgaacaatcttctcgcaaatctgcagaccctctatcagtcgctcgaaacgaatgctcgaacgcggaccgggatagatgcaataggtgtcgccggctgcccatgagcggaaacgagagtcgcgcagcgggtcgcgtgtccaactgttgtacgaccaacgcaggtagccgtcgtagtcgccgcccaatgcgtgcacagccatccatgccgcttcggcaggtggcgagaaggtgaatgtattgggaaatccctcggtgcagcaagtgtagtaggtgctaatcttgccctcggcgcgacgacgggcgagcacatcctgcgggaaatcgtgaccgtaagctatacaataataatacaggtcgcgctcaatctcctcgtgatagatgccggcgagcgagattttgtagtccttgtcggcatcctttatcacctttatcgcagcctgcatgtccttcatcgggcgctcgtccatggctatgcaagtcttgtcaaaccatcccttctggcgcagatgcttggcaaagtcgcgcaggaacgtgccccagtattcggtgtaggcagcctcgccgggcttagccttgacaaactgtatgcgattggtagcctcgtcgtagtagtcgaagcgcaagtcccacggaatcattgtgtagcaggcgatgagccggttgatgccgacatcgttcatcatgaagtcgacatatcggtcgaagacggcataatcgaacgtccacgagccgtcgatgtgcttgatgcgtgtcaccatcgagtcgtaatggtcttcggtctgtccgttccacggcttgtgcatgatgctcgtggtgatgctgtactgtccggcatcggcaagcatcttcattatggggcgcatcgcgtcgaagtgttccttgctccacagcggcaccttatagtatcgggctacggcgtaggggttctgccagaggtcgaggttggtggtccactgctgcggtgagggcagcgtgcggttgatgacctgcaacttgagttgcaacgtctgcggcttcatgttcttgccgctcacggtaatctgtgcggtgtaattgccgggctttgcatcctgcggcacccacacgtttgcccatataggctgcgtggtgttgcggcgcacgggcaatgtcttgttgatgtcgagcacatcagccactaccgatgagtcccagtcggcaggattgcgatagccgcatccgctgccgtccttgttgagttcgtcggtcatgacgtagcgcacgaagttggtgcgtatggctgatgccgggatgacagccttgcccgagcgtaggtcggtgacagatatctgcacgtcgtcgagattgacattggtccagagcacagcttgggcgttgacacgttcgccacgccatgcctttaggctgactgccttctgcgtcttcaccttcggaatgtcgaggcggcggtagcgtgtgtcgattgatgcccagctcaattgtgtgggctgagcgagcttagcccatgcagcatcggagtcgtgcggcttggtgtcggtcagttcttcgtaatggccgagtgggaagatgtcggctggctgactgctctgtgcgttggcagtgagcgctgtcatggcaacagcgcacaatgcaaccgaaagtctgtttttattcattattgattggttttagtgattgtttatgattgtcggctattggtgtgtaagcttgcaaaatcagctatacgcttacaaagttagccttttctgatgatatttcgatggttttaaatctaaaataccaaattaagactattgcaagaatgacgatagttttgtaattttgcggaattaacgctttaagaaaacagaaatactgatatggataataacaaagagatggctcagcatagctgtgctgagtcgcagaacttctggttgtggctcggagcactcgtcatcggtacggtgctcggaatgcttggtgtgggatggattgacagtgccaccaacttcgtggctaccatttacacccgcctttttcagtttgtggctatacctactatagcccttgccgtcaccactacgctcgcacgattcggcacgcagaaagatacaggacgcatattccgccacacgctgacctacacgctgctcactacggtggctgcagctgccgtgggcatgctgctgtaccggattatctcgcccgacaatctgccgcttgaggctattcagggcgacacgggcattgactcggtgaagcaggaacttggcgacgcctcatacatggactatatcattggcattgtgcccgacaatgtgctgcgcccgctggttgagggcaatgtgctctcgctgctgctcatagctgtggctgtgggcattgccctggcacgtatgcccgagactgacagcaagcgcacgctgatgaacggtctctacggattgcagaaccttgtgtctacactcatccactggctcatcgacattctgcctataggcatcgtggcgtttgcagcacagctgtcggctgaggttactgcaggcaccgtagtaacgtcgataggcaagtatgtggctgtgatattgggtggcaatctgttgcagttctgcgtggtgttgccgctgttcctcatggctcgcggactgaatcctatacgcgtggctcgtgccatgactcctgctgtacttatggcattgttcaccaagagttcggcggctacgctgcccgtcaccattcagagcgccgaggagcgtctgggtgtggacagtcgtgtggcacgcttcgtactgcccatctgcactactataaatatgaacggatgtgcagcgttcatattcgtcacatcgctgttcgtaatgcagaatggcggggtcgagattacatggggcacaatgattatgtggctcttcatatcggtgatagcagccatcggcaacgccggagtgcctatgggatgctacttccttacactctcgttgatgtcgggcgttggcgcaccgatagccattatgggcatcatcctgcccgtattcaccgtgctcgacatgattgagacagccgagaatgtgtggtcggactcgtgtgttgcggctatgaccgaccgagatgtccgaaacgccagcccacgccaagcataaggtgcttgggccggtggaagtcgttgaggcagtagcctatgtgcagcaggaagcggcgcgaaaggttcagcttcaatgctaacagttcgtatatgccgtggaagtcgtcggtagcgttgacgaagttgctgcctatgccgaagttgatggcaaaatagggcatgcagaactctacacgtgccgacgctccgagtgccatctggcgccacaccgactctggcgctacaccatcaaggtcgacgttggcgccacggtcgtaggtgccgtcgagcgataagcctgccttcagccagtggttgaagcggtacatcggattgaagttgaatcctgccacggcatacgttccgggtaagatgtaagcttcgccatcgctcgtatagtagccacgctgatgccatgcgccatataatataaggtcgtaggtgatgtcgtggctcacggctggcatggcttcgtgacgatagagtaggcgaggcgagtggcggttgatgtaataggcggcacctatgcgcagagctgctgtattgaggcccagattgggaaactgcgtgttgccgttggagtagtgggtcacgttgagtccgaagttgaggtcgacatggcgcgaggctatccagcgcagatacaggtcgaacccgatatatgccgtaacgctcgacccgatgagcttgttatcgggattgtcaatctcgtcgtacggattccatccgaaagtaaggccgagattccactcgtagttgagcgccagtcgattgctcagactggctatgcgtgcgccttgcaacagaaataccgacacaggattgcccaactgcggattgaactcgttccagccgatgccaatgccttgataagcgtcgcgatagatgcgtgcctgctcgctgccctcgggagccgagaaggcatacttaaggtaatagcccatatcgtggttcatggtgcgcacttcgggattcttgccacgcagaaagtcgttggtatgcagaatggcgcccggacgatagtcgaacattaattgatgtacgaagtggcgggtggctgacgagtcggaaagctccggctcggtttgtgccgacatgggcagggctaaaagcgcaagcaaagcccataatatataataaggtgttgttttcatttcacgatactttatttctgtactcacgtgaatatctttctcacgtgagtaatataattgcaaaagtaagtattttatatcgttttgcaaaaaatgtcatataaatttttccttttttcgcttctgtgccatattgacaggcttttgaccccgtgaaatgtcagtacgaacttagcattctgagttttggcacaccatttgtatattatacggcgaacgcagtcgtagtgctgctgttcagcatacaaatattaatcacgaaataaaaataaaaaaagatacattatgggaaagattattggaatcgacttaggtactacaaactcatgtgttgccgtttttgagggcaacgaacctgtagtaatcgccaacagcgaaggcaagcgcacaactccttcaatcgttggattcgtaaaggacggtgagcgtaaggtaggcgaccctgcaaagcgtcaggctatcacaaacccgaagaacaccgtatattctatcaagcgcttcatgggtgagacctatgagcagtgcgctaaggaggttacgcgcgttccgttcagcgtagttaacgaaggtggctacccacgcgttgacatcgacggccgcaagtatactccgcaggaaatctcagctatggtgcttcagaagatgaagaagaccgctgaggactatctcggtcaggaggtaactgacgcagttatcactgttcctgcttacttctctgactcacagcgtcaggctactaaggaggcaggtcagattgctggtcttaacgttcgccgtatcgtgaacgagcctactgccgcagctcttgcttacggtgtagacaaggccaacaaggacatgaagattgccgtattcgacctcggtggcggtacattcgatatctcaatcctcgagttcggtggtggtgtgtttgaggtactttctaccaacggtgacactcacctcggtggcgacgacttcgatcaggtaatcatcgactggctcgtacagggcttcaaggccgacgagggcatcgacctctctaaggatccgatggctatgcagcgcttgaaggaggctgccgagaaggctaagatcgagttgtcaagcacaacttctacagaaatcaaccttccgtatatctcagccgagggtggtgtgccaaagcacttggttaagactctgactcgttcacagttcgagcagttggctcacaacctcatccaggcttgcctcgtaccttgccagaacgctatccgcgacgcaaagctccagacttcagatatcgacgaggttatcctcgtaggtggttcaagccgtatacctgctgttcagactctcgttaagaactacttcggcaaggagccttcaaagggtgttaaccctgatgaggtggtagccgtaggtgcttctatccagggcgctatcctcaacaaggagagcggcgtaggcgacatcgtattgctcgacgttactccgcttactcttggtatcgagacaatgggtggcgtaatgacaaagcttatcgatgctaacacaactatccctgcaaagaagagcgaggtattctcaacagctgtcgacaaccagactgccgtaactatccacgtactccagggtgagcgtccgatggcttcacagaacaagtcaatcggtcagttcaaccttgagggcatcgctccggctcgccgtggtgttcctcagattgaggttacattcgacatcgacgccaacggtatcctcaatgtatcggctaaggataaggctacaggcaaggagcaggccatccgcatcgaggcttcttcaggcttgagcaaggaggaaatcgagcgcatgaaggctgaggctgagcagaacgctgcttcggacaaggctgaacgcgagaagattgacaagctcaaccaggctgactcaatgatcttcaccaccgagaacttccttaaggacaacggtgacaagattcctgctgacaagaagccgggcatcgagcaggctctccagcagctcaaggacgctcacaaggcagccgacgttgcagctatcgactctgccatcgccaacctcaacaacgttatgcaggcagcttctgcacagatgtatcagggtggcgcacagccgggcgcaggtgctcaggcaggtgctggcgcacagcagcagcaggctggtggcgacgctaagagcgacgagacaatccaggatgctgacttcgaggaggtcaagtaatcaatcactgttaaagcagacattctgaacaagaataaacaataaggcgtacaactgaaatcataatgattttggttgtacgcctttttttattgcattatgttctttattgtcttcttcgaaccaacctgatgcttggattatcgggtgagccgttatttgaaagtagaataggggatgtataaaaaaaaactcccaccgaagcgggagtataggtttaacaccttcggcaattgccttattgtgataagatgtaggaaatcttatattctgatgcaaatatataacagataatttgtctgtccaaattattagctgtacttttatggattattaatgattgactaaacaataattatacttgtatggcaaaaatattaggaatcgatactggaacaaatagccttggatgggctattgttgaaaagacggaagataattataatctgcttgataaaggcgtgaatatatttcaagaaggagtcaaaaaaaatgagaaaggcaaagaatcatcaaaggcagcagaacgtacaaaacataggtctgcacgtgtcggatattaccgtaggaaattgcgcaagatacgtttgcttcgcatattaagtgacaatcatttgtgtcctcctctttcacaagaagaactttcaacatggcgactaaagaaagtatatccaaagaatgaattgttcatgcaatggcaacgtactgatgacgatacagagaagactccgtatgcatatagacacaaatgtcttcatgagaaattggatttgtccgacattaccgatagatacattttaggtagagctttttatcatatcattcagcgtcgtggtttcttgagtaacagaaaagagcaaggtggagatgattctggcaaagtaaaggaaggtatcagtacccttactcaggaaatgaacgaagccggttatgaatacctaggcgactatttctatgctctttataataagggagagaaaatccgcaagcattatactgcacgtaatgaacattttctttccgagtttaaggctatatgtgataagcaagacttggaaaaagaactcgggttggaagtagtacgtaatattgaaaaggccatttttgaccaaagacctttaaagtcgcaaaagggccaagttgggaagtgtgtgtttgagaagaacaagacaaaatgtccttcttcacatcccatgtacgaagagtttagaatgctcacattcatcaataacattaagatcaaaactcctaatgatgatgtattacgccctcttaatgcgggggagcgtgaaagcgttatgtctttattctttcgcaagtcgaagaaacaatttgattttgaggatatagccaagaagttggcaccaaagaagatgtatggtttctacaaaaaagaagaagatgcagaaatgcctttcctgttcaattatccaatggatacatctgtttcaggctgtcctgttacagctgcccttaaagatgtatttggagctgattggatagatgctatttgtgaaacatacacattaggcgagggtaaaagtcgatttgatatagtaaacgatgtttggcatgttttgtatttctattcagacaaagacaaacttgccgagtttgctataaaccgcctgcaattatccgaagatgaagcaaagagatttagtgagatttctttgccggctgattatgcctcattaagccttaaggctatctgcaagattcttccttatctaagaagaggattgatatactctcatgctgtattttttggtaacttatgcgaagtcatgcccaattacgagtggagtataaaagaaatgcgtgatgctattatcgacaatatcatcatggagatggatagatatgataccaaagataaacgcacatttgaggtatgcattaaagagtatttgaaaaagcaatataatatttctgatgagagtctgaagaagttgtatcacccttctatgattgagacatatccaagggttcaatacactaacgagtatggtgtttatcaacttggttcaccaagaatagatcgtgttcgcaatcctatggctatgcgctctatgttcagattgcgtaaattagtgaaccgcttgcttgcagaaggaaagattgatcaagacaccgagatacatattgagtttgcacgtgaactgaatgatgccaacaaacgaaatgccattgctttattcgtaaaagagaaccaaagcgccaatgaagaagctcgaaagaaaatcatagctctgttcaagaaagagacaggaaagaatatagaacctacagacaaagatatattgaaatatgttctttgggaagagcagaatcacatatgtctttatacgggaaagcagatacgaatatctgattttataggagcaaatccgaagttcgatattgagcacactatacctcgtagtgttggtggtgatagtactaagatgaacttgacgctttgtgacagccgtttcaatagagatgttaagaaaaccaagctgcccgtagatttgtcaaaccatgaagagattatggagcgtattaatgattggaagaagaaatacgaaactcttgactttcaaatacgcaaacaaaaaaaactgtcaaagggagcgacaacaaaagagaagaaggatgatataataagcaaacgtcatcttctggaacttcgtcgtgattattggcgtggtaagtatgagcgtttcacaatggaatgtgtacctgaaggatttagccgtcgtcaaggtactgacattagtgtgatttctaagtatgcccgtctttacttgaagtcactattcaatcgtgtctataccgtaaaaggcatagcaacttcagactttagaaaaatctggggaatacaagacatctatagcaagaaagaacgtgtcaatcatgtacatcattgcatagatgccgttgtcattgcatgtattggcttagatgaatataataagttgggcgcatactatcatgacgaagagaataacaaatggtatggtatgtcgaaggcaactttcaaaaagccatgggccacatttgtagaggatataaagaagatacaagacgaaattttggtatatcattacactcccgacaacatgccgaagcaaggacgcagaagaataaagattgatggcaagaaggttctttgcaaaggtgatgcagcaagaggctctttgcataatgacacttattatggcgctattgaaaatgacggggctgttaagtatgtaaagcgtatagacttagcatcgttaaaagaaggcgatgtaaagaacattgtggatgatacggttagggaaatcattgaagctgccataaaggataaaggctttaaggatgcgatggcaagcacaatatggatgaatgaggaaaagcggataccaattaaaaaggtgagatgcttcacaagcgtaaaaaatccattgatctttgagaatcgcaaaccacgtgatgtttcagataaagaatataaaagaaactattatgtcacaactgagggaaattatatgatagcattatatgttggcttgaaaacaaatggaaagaaaaagacgttttatgaatttgtgaatataatggaagcggcaagatattatagaactagtaatgaaaaatctattgttggatataatgttgttcctcaaataaagaatgattgtcatctggcgtacattttaaaaaagggaactatggttatattttatagggaaacggtagatgaagtatgggagtattcttctgcagattttgcaaagaatctatattatgtatccgtaattgaatcagatggaagagtcacgtttaagcaccaacaggaagcaagacaagataaagaactacctcgaacagcttcagaatctatggatattaaacctaaaatcagaataggattagcaacagcaaaaatcctcgttcaaggttacgactttgagataaatgaacttggtgaaataaaaagacttagataatatgataaagcagacattattcttctcgactcaggtttgtctctcgctaaagaattcgcaacttgtgatttcttggaaagacagtgacaacaaggtaacgcgccctatagaagacatagggtgtgttgtcctggaaagtcaaatgataaacattactttgccgttgctcaatgagttggtgaagaataatgttgctgtcattttatgtgacaataaaatgatgcctactgcaatgctccaaagtttggatgccaatactacgcaatctgagaatatcaagtctcagattgctgttagcgaaccgatgaaaaaacaagtctggaaacaaataattgaggcaaagatcaagaaccaatcagcagtcttggatacgttttgtaaaaacggtagcattcttaaacctttttacgctaacgtgaaaagcggtgataccgacaatagggaaggcattgcagcaaaaatatattggacacaactgttcggtaaagactttaaacgtgacaggtgtggagattcgccaaatgtactgcttaattatggatattcaattttgcgtgctgcaacagcacgagcattacttggttctggattgttgcctaatcttggtatattccataaaagcagatacaatgcttttccgcttgctgatgatgtaatggagccttatcgtccttatgtggattcaatagtctttaatctttattcagacggtataacggaattaaacaaagattccaaaatggagataatgcgccttttaagctgtgacgtaaatataggcaaggtaatgcgcccgctacagatagcattgacatttacgacagcatctcttgttaagtattatgctggtgaaattaagaaaatatctcttccctttatcttatgacagaatacagacttaatgcatatcatattatgtggttatttgtgtttttcgatttgcctgtttctaccaaaaaagaaatgaaggctgctgcacttttccgtaagaatttggaaaaagacggattttccatgatgcagttttctgtttacattcggcattgtgcatcaagagaaagttttgatgtacacgtgaaaagggtgaaggctttattgccagaaacaggaaaggttagcatcctaagtgttactgacaagcaatatggtgacatctataatttctggggcaaaccaaagagcattaaaaagagtaaaatcactcagaaagttttaggtgccccaattcaattggaatttttttagtacttttgtagcgtaataattcttacacggcgatttcttataacaaaacaagaactgtaaaatattggttcgctgctatttagatgttataggttgtggtttgatgtaggaatcaaaagatatacaacaaatcgtcgaacgatgtatagcgagccttcagttgtggtttgatgtaggaatcaaaagatatacaacaaggaatttaactttacccaaacagatgtagttgtggtttgatgtaggaatcaaaagatatacaacttaattctgatgatagtcagatgcagtacagttgtggtttgatgtaggaatcaaaagatatacaacagctgcctataatatcgtacaccgtaaactgttgtggtttgatgtaggaatcaaaagatatacaacccctcaactactacaccgacgcacagaacgttgtggtttgatgtaggaatcaaaagatatacaacacacagtctaatatatccgcgacaatctcggttgtggtttgatgtaggaatcaaaagatatacaacaggatttagccgaccttttaggcgtatcggttgtggtttgatgtaggaatcaaaagatatacaacccaactttatcagatgtagccggcggagttgttgtggtttgatgtaggaatcaaaagatatacaacagcctctcacctacgggggcatcgtggccgttgtggtttgatgtaggaatcaaaagatatacaacagacctttttttgttaggtggcatgttcagttgtggtttgatgtaggaatcaaaagatatacaactaaagagaagcaagatagcgaacagattttgttgtggtttgatgtaggaatcaaaagatatacaacttctatcatttctcgtcttatatgattttagttgtggtttgatgtaggaatcaaaagatatacaactctgcctgcctaaagcacaccgaagaacagttgtggtttgatgtaggaatcaaaagatatacaactgttcttcacatcctcgaagtccacgccagttgtggtttgatgtaggaatcaaaagatatacaacctgtaatattttatctttccacctttcaaagttgtggtttgatgtagaaatcaaaagatatacaacatattaattccatacaagggaagtcagccgttgtggtttgatgtaggaatcaaaagatatacaaccgtcgtgagcgctcttagcgtccacaatcagttgtggtttgatgtaggaatcaaaagatatacaactggttcaaatatcattgagtatgcataagcgttgtggtttgatgtaggaatcaaaagatatacaacgtttatgttatcgttccaacaaaggtatggttgtggtttgatgtaggaatcaaaagatatacaacgcagtagtcgaaaagctggagcgagacgggttgtggtttgatgtaggaatcaaaagatatacaacaaaaccatgtgtttatctccaattcggtattaatatctggccacgctcggcaaaagctatggcacaagcgttgatggccccttgctcttcatccacggcttgatagcgtagctcgtccacaatatcgttcagccctgcaatgtaatggctcatcattggcactgccatcaacgacagcgcagcaccgacatacataaacctaatctttgccttgtcgcttatgggcgatatgcccacaaacaaggcaagaacgagcgacaacgtgcagaagcagagtgccagtaatgctgttcccatattctattctgtttttatttcaaatctactttatcattcttgaattgaatggaaaacagatcaatttaaataaatgttcttgtcagtctattttatgtgtgttttttctctgaaggaaagaagaggtgatctttgtccaagaaaacaggataaaatacagattcaatgatgtaacctgcaagtcttggtttctgtccaccgattcgttgaatggttccccatgcaacctctccctcaatatgttttggaatcttgaactgactttttgtgggaaattttccatagacctttaaaagctctttctgttcagcttcaggtctagtacatgcacaaacatcaataaactttctaagaagtttatccaacatattgctctcttgccatttttcaagagtttgtccaggaggacactggttgaagtcaaagtccttgaagttgaatgataactttggtaggtcatccttgacctttcgttcggttcgtacgttagcagtacggctgtcagaagcagctgtgcttttgaacttattatcaaacctactcttcttttttgctgccatactctttaataaacttatcgatgttaccgaaataaggaatggcaccatagcgtcctagcagataatccttagagaaagacgcatcgtttcgaacgctgtttgcctgattgattttgtattctaccaaggagtataaatcagatacgccctcagaagatttctctgcgaaccatatttggtcacgacgaagcaaatccttacgcaagaggttcgtgtcgtgtgtggtaattatcaattgtgcccccaagacgttcatcgtgctatagaatagtttaagtaattcaacagacagttgcgtgtggagacttgtgccgaattcatcaatgatgagcactccgccattctgaatggtatcgaagaatggaccaaggagggcaaacagtttggttgttcctaaagactcaaatttgaaatttaaggattcattacccacaacctcactgtcattataagtaatgtttaaaaaataacttccgcaatttttttgttgcagtttatgcttagttc

SEQ ID NO: 4213 - DNA, 17639 bp, synthetic construct
  source 1..17639: mol_type = other DNA
  misc_feature 1..17639: note = Synthetic
cgacctgccgctggagttgaaataccttcccatcatcgagtccgccctcaatcctcaggctgtctcccgtgtgggtgctgtaggcctttggcagtttatgatcacaacggccaagcacaatgacctcaccgtcaactcgctcgttgatgagcgtcgtgacctttacaaggcgtcttatgctgccgcacattatctgagcgacctctataagaaattgggcgactggaatctcgttatcgctgcttacaactgtggggctgacaagatcaataaagcgatccgccgttctcatggcgagcgtgactactggaaaatctatccgcgtctgcccaaggaaacacgcggatatgttccggcattcatcgctgccaactatatcatgaactattattgcgatcacaatatctgtccattaaagacgacacttccagaaaagaccgatacggtgatggtcgaccgtgacgtacatttcgagcagatcgcccatgtgctggggatggacattgacgagattcgtgatctcaatcctcagtatcgccgtgacatcgtcaacggcaacagcggacaggcttcgctcagactgccggaagcgatgattaataagttcatcgacaatgaggactctgtctacgcctatgccccgacagactatcagcccaaacgtaccgaggttgaggctgagggcggacactatgtggtgaacaagaatcaggtttctctcgtgtcaaggtcctccggcaagaagaaagcagagggtagcaaggccgaggataccggagctactgcaaccaattctcaagacgattctacctcaagcaaagaagtagagcagacgactgttgacgagagcgacaacgacgataacaatgaaagcggacagagcaagcgctcttcacgcaagcgcagttctcattctcgtaagaaccaggacagtagttccaagagcaagagtagtaagaaaagcaaaaaacaaaaaagcaaagataaaggacagcagtccaagagtgtaaccgtcaagaacggggataccctcagtgagattgcagaaagaaaccataccacggtgaagaaactccgtaagttgaatggtatctcgggaagtacgattcagaaaggaaagaagattaaagtcaaataaccttgtggcgtatggacgaattagagcagaaaaacaaggagcgtgaagtcgctgacaacaaaatgatcaatgatgcctttcagcatctgttggatacttatctcgcttcgccccatcgaaaaaaggtggacatcatcactaaagcgtttaacttcgcccgccaggctcataaaggcgtgcgacggctgtcgggcgagccctatatcatgcatcctatcgccgtggcgcagattgcctgcgaggagatggggctgggctctacgagcatttgcgccgctttgcttcatgatgtcgtggaggacacggactatactaccgaagacattgagaatatctttggagagaagatcgccaagatcgtcgatggactcacaaagatcagtggcggtatctttggtgaccatgcctctgcacaggctgagaacttcaagaagctgttactcacgatgagcgatgacatccgtgtgatcctcatcaagatctgtgaccgactgcacaacatgcgtacgcttgcgtcacagcctgccaacaagcaatacaagatcgcgggagaaacgctctatatctatgcgcccattgccaaccgactgggactgaacaagatcaagacggaacttgaagatctgagttttcgctacgagcatcccgaggagtatgcctccattgtcaataagttgtctttcacagaggaacagcgcaacagagtctttgatgacttcacggcgcctatccgtaaggctcttgatgacatgggcatcgaatacacaatcaaggccagggtcaagagtccttactccatctggtctaagatgcaaaacaagcatgtaaccttcgacgagatctacgacatcctcgccgtacgtatcatcttcaaaccatctgaccctaaggacgaaatcaacgagtgcttccgcatctatgttgccctcaaccaaatctataagagtcatcccgatcgcctgcgtgattgggtcaaccatcccaaggccaatggctatcaggctcttcacgccacgatgatgtcacgccagggtcagtggattgaggtgcagattcgttcccagcgcatggatgagatcgctgaacagggatttgccgcccattggaaatataaggaaggagaatactctcacgacgatgacgagctcaacaactggctgagtactattaaggaaatccttgatgatccacaaccagatgccatggacttcctcgactcggtgaaactcaatctattctcttccgagatctttgtctttactcccaaaggcgaggtgaagacattgcctgcgggctgtacagtcctcgactttgcctttcagatccataccttcttgggcagccattgtattggcgcaaaggtcaatcataagcttgtgccgttgagtcataaactccaaagtggtgaccaggtggagatccttacttccaactcccagcacgtgcaacctgcatggatcaatttcgtatccacggcaaaggcaaagggtaagattcaagcagtgctcaggcgagagagtagggagatacagaaaaagggcgagaaaacgctgaatgactggcttgccaaaaacgacgtggaactttctactgccgttgtagacaaactttcagacttccacgatattgctaaacatgaggacttcttcgaggctctgggcgagcgcaccatcatcctcggcgataaggatcttgatatcctccacggcaagaagaaagaaagcggttcgacaggttggcgcaagtttgtaccattcttgaacaaggggaagaagaagaaggaagacgacatgccgcaacttttggtcgttggaaaagacttcgataagaagaagccttgcattattacagaggagaccatcggcatgtatatctttcccaattgttgtcatccaataccaggcgatgatatcttgggattcattgacggcaagaaccgcatagagattcacaagcgttcctgtctggtggccagcaagctcaagacgagttttggaccgcgtatccttgatgctaagtgggatatgcacaagcaactcttctttgatgcaaccatcgaggtcaatggcatcgaccgtaagggtatgctgcgcgatgtctctgaggtcatctccaataagatgaacgtcaatatccgcaaggttgcttttactgccgatgagggcatcttcaaaggctccattgagattcgagtccatgatcgtgaagaagtgagggtgattatggggagactcaagaaaatccctgacttacaggaagtcaagcagatattatagagtagggcagaacactgctcatcgttactctaatcaagtctgacggtgggcctccaatgccacttgagacattcgaccgactttcaatatcgcaaaaaatataagggactgctctttcgggcagtcccttttttcatgtcttttgcggttctattctttacattcgattagtgaaaagcggtgttcttatcactaatagtcacgctgacctcctgacttccgctcgccatgaaagcaggattgtactcacattccgccttgatggttcctgcgtgatatttgcccggacggtcaaggaagtattctgtcatcaacgtgtagtcgcccttgggaaatgtctcaaagtagtagtcggtctgctcatccatctgtcggacatagcagcccagtcgccaatcatagtcggacagttggttgacgggcatcagacaggccggtcgatgatcggtgatacgtacgaagtcatagtcgcggtcggcgtgtaccttgatcacaacctttatccggtcgcctatgttgttggtcttccttgagctgtcagcaggcacgatcagacggctcacacggaagtctttgctttcatcgggaagagtagaagccgtagcctcgtgccagcctgtcaccacaggccaagccactctttgcggcatgggacctgtaaggaaggcggctacagcatcgattgttacgatgggcgtatcccatttctgcgttttcttttcctctaccagccaccgcttcatgcccaaaagcaggaaggtgtcacttggagcaatcagcgacagggcgtggatggcggcagtcactgtaggaatcttatagtcgcgccaactgtaataggcttttggcgtatcgaagtaagttccccggtcggaggttgtgacggcatactggctgaggctctctatcatgctccgtgcggacttggcccggccgtctgtatgcagtgccgtagccacacgggctttaccgagaatcgtgaggtcggcaccatgctcctcggcatagtccaacaaggctttcctggctgtgtttgccttcactgcctgctgtgtgggtaggagtgacagcgcatagaggatatggtaggcctcctctaaatcgcaacttgcggcaccggctctctgcagttgtttggcatcgtcggcgagccaggtcgtcagctttgtcgttgtgggttgcagcaattgcaatatttcacggtgatctttgaccaagggtgcaagtatctcggctaccgtcaccgtgacgagacggcttgcaggcattcccggccaccaggagaatgaaccatcggcacactggagacgtcgcaagtttgtgaagggtgtgtcagcatcttggagaggcttcgattcattctcatcgtcgttcaactcgttgagcttataaccggcatatactttggccgccaatgacagcgcgtcgctgcctcttactgagtctatttcgcccaaagcctcgcggatggcatcggcagcagagaggctgaccatctttatctccggtacgcgctccttgtccgaagcgataggtatcgtcttctccattccgtcgccgtgcccttttgctgaggcttcggcccgcacagtgatgctttgcagcaagctgtcggcaggcacgtggagcgttgcggtgaaagtcttagacgtggacggcttcaatccgaacttgtatttctcgtcaagtagtgactgtcccaagtgggtagcttgtacggtcaacgttcccttgagccgctcatctcccatattgctcacggtgagcggcagttgggcgtcgtcgccccgacggaggaagcgcggcaggttgtcggacaccatcagcgccatccgagtctgcactgtagtgtcgatggaggccacggcaccatcgcggtcgtgtacgagaccttgcagccgccatgtggtaacattgtcgggcatggtgaaagcaaacgaagcaaagccgttgtgatcagtcgccgtcgcgggagcccatagggcgagggtgcggaagttgcactgcacgcgtattctggaatttccatcagccaattttccttggttgtgcggagcgagattctttgtcttgttggtagcggcatagagtctgtcttcttcctttacctcaacgtctcttttgatgacgggtgccgagagcttatccaccggctccgcaacgcccaatgcgacaacctcctcaaggttgtcttcgttgtcacccaatgagatgacgaccggctcaccactggtaacggtcactgttgccgactggagaccgacgtatgaggcggtgagctgcgccgtgccgcggacgggtatggagaacgtcccatcgacatccgtcacggcactcgccccttggttggttctcagcatggctcccatcagcacttcgcccgacgggtcatatacgatgccgtggcaatagccgggcttgcccttgcctttgctttccagcgtccatccgcctaaccgataggccactgaccgcgcgttggcttgaaggcggatgaggccgtcggcaaagattgcgggatggatgttgggtacgactaactgctttgaacgtcctgtctcacctttgatgagttcgtcgttgtcaagggtttgagtgtagctggttggcaggtcatcgttgaattcccagttgcttttccaagtgttgtcgttgataaggtcgagcgcgctgtcgtagagcgtcaccatggcctgggcatctgctggctgtcccgtaggatgacagacgcgcaaccgccactcttgctgtcgcccgggttcagtgacactgtccaattgatcccattgagcttgaagcgtctctgtcggttcctcgtagggtagctcgatgtcgtagcttttcatcttgccttgcccataggctgctactgagagggtaacaccgcctccgtaggtctccttataatataaggtgtgtgtgaggagggtgtcgctcagcgccattgagccacgctccaacaggctgtctgccgaccgcaactcgtaatagagtgtaagccctttctccgttgtgcccatctgtacgattacaggttgtccgttgcttctgaacgcgtcggccgatgccgttgcccagaagaaggtgggcttggaaaggtggcgtgctgccgggtcgatgacggaaatggtgttgctcagcgtgtcgtcctcgacccatatcttcagcgtatgcagtccggcttccagagaatgcaggggaatgaaggcctggcggttggcggctatttctcctttcgtgccgtcgtcgagcagccatttcacgttgccctgtaccttgttgttctgagcatcgttgagcaagcagcgtacggcaagcagtgagtcgcggcagtagcctttggtactgttcagaaagacgctggtgatgtcgctggtgagaaaagctctttggttactgtagctcaagcgaacatagtctgtgcgttgctgtccgtctggtgctgtgatggtataagctttctcaaggtgagagagaaaatgattatcggcgtctttaggtactgcaatgcgatccgtgaacattccgttgttgtcagtgtataaggcagagtcgcccttggcctccactttggctctggctacgggagcaccactgagcagagagactcgtccgctcacggtcaccgtgtcgccgggcatgtagtgtgagggtgaggtacggaggctcacttgcagactacccaacttgtattcctcaaccctgaatgacagtccgttgacatcaacatcgatgtcgtctatttctttgcttaaagagtgaccgatgagtcgctccaactttgctaaggctccatcagccttccatctcagctccccatgaccattgtattcgttgccggtcacccatttcttggtaaggggaatatcggcatacgccgtgccgtagtcgtcggttgttacgtcgagggtgtcgatggggtggtcgtagtcccttgtgttgttgaattgcagttgcaatggcatgtggcttagtgccgtgcgccggtgccccggccgtcgcacaaaggccaccacagccacgtgagccgtgtcgcccggacggtagagggcgcggtcggagtaggcgtttgtgataatctggcaggggctggcgggttcgctctcgtccggatagaccatctctgattctcgccagtggtcatccgctgtgaacgggcgcacgtacattccacctctgctgtaaggcaccacggcttctccctgctcgtctgtggtgaatacgccatggacggaaggctctgatgaaatggaatccacttcggtgtcatcgaggtcatatacggccgtatcggcttcggcggtgtctacgtcaatggcagccgtgtcgctttctgcttcttcatactgattgcttccttcatcgccaatctcaatcttcgctcttggtaccggacggcccgtgcgggtatcgacgacgcgcatccgtacattcttctccgacatggggttgacggtcacgttgaggtcgctgacgatgaagccgaggatcactggcttcacgccttgtgccttggcaacgacttcataagagccgtagagtagtgggggcagttgcagactgtcttttgttattcgccaggccttgcctacggatagttgtctcgtagcgtgccatagaggggcaccgctccgtcggtcttttttcgtgccatacacagtcacatagacctttgacagattggtggaaccgacatgcagccacggtctctctttggaatggacgtactttccttcgaggcggatgctcagggaaggtcccttggcttctgactcgatattgcgcagttggttgccatatcccgatgtgtcgccagcccatcgccgcagactgctgtcggcgatggctacacttgcggagtcgctgagctgacgggccttgacagcggtgacgagttggctctcctttaggtcgccatacttggcaagcagagagtcgcaccattgcacgatgcgacttttgttttccgatggtgccatccacaaatcggtgacgagcgctgcccgtcgattgcctacctgctcatagtagtcgtacgccttcttgtattgtccggtctgccatgcgatcgcactgagcaagtcgccgccaaacacctcactgccgggtatgagcaggggcgagaagtctgtggcttgggtgtgggccagcagtgctgggtcggccagtgcctcgtcctttagtcccaggacacaggcgtagatggcagccagagcaggatgtgtcgtcttggcctcacgcctcttttgctccaactgctgacggacggaggccagggagtcgtcgccataggtctgacacatcaatgacagacggagcaggtcggcggtgagcaactgaccatactggttctctttcaatgctttgccgctgatacgctcaagaacgtttatctcattcttgggcttgtcggccttggcctgacgatagacgtctgcccaaagctgttgatagtcttgttgtgcctctgctggtaaaatggcacacaacagcaaaagcaagatggtgtagattgtcctcatatgctgataactttacttcgtttctcgtcgtttcttgtcgttgagatccgctcacgatcttgattgtgagacaaactcgtcaatttatgtagcaaaaataagcataatattcgatattctccaccttttgggaatacttttttatgatgagccaacaacttttagcacaacagcgatagaagtcgctctaagtttcaattacacaaggaaacgatgacgtctcggcgtaaagcttacgtctgcttgctgtcttttaaagcgggtgcattcaaagacactcgtgtatagaatgaatctgttcttcattcctttatatatatagactattgtaactctgtctcctaactttgttcgtttttctgacaaaaaacgacctctgagaatcgattcttttccacgaagacctactttgctctgattttcgcgaaaaatcgtgtgtttttgtaaattgttgataattagagtgttgtatacatagactctttttgtgaatatcaaacagaccttctctcgcaaaattctctagagaattttgggtcagaaaggtactttgacctcatcagaaaggtactttgacctggtcatctaagtactttgacactgtcattcaagcgtgatgacagcatcaaagtacctttctatactcctcgtaacgcaaaaattggagagagaagtcaattttgtctgagtttaaggatagaacggtgatcctgctttctctggattgcaagtgaaagtggaagatgttttgtaaagaaataaacagatgtcttatatgaactatcatatttgatggaatctggaaatagctgctttattattagggattgtacaattatgccctactatggctttggcttttagagtgagtattgaatagttttagttggtgaaaagacaaaaaactcccaccgaagcgggagtataggataacatccttcggcaattactgcctttttgcgataagatgtaggaattatcttattctttttgcaaaaatatgagaattgtttggtatttccaaataaaaatattaattttacggaaatttaataactgagcctatggcagaaaaaatcttaggaattgatacaggtaccaatagccttggctgggctattgtcgaaaagcatgacgatggttatcgccttgtggataaaggggtgaatatattccaagagggtgtgaggatagaaaagggcatagaatcatcgaaagccgcagacagaacttctcatcgctctattcgtgtgcggtattatcgtattaaggttcgtaaaattcgcttacttaaagttctaagtgacaatcacctgtgtccaccggtctcttctgacgaattgaaactttggcgcttgaaagacatttatcctaataatgagttgttacgtcaatgggagcaaacagatgataaaaccgacaagaatccttatacttacaggtataagtgccttacggaaaagttggaccttacggattttactcaacgttacattcttggaagagctttctatcacatcaatcagcgtagaggttttcttagcaaccgaaaaggtgagggcagtgaagaagatggagtcgtaaagtcaggaattagcgacttaaccaaagaaatagaaagttccggctgtcattatcttggtgagttcttttatatgctctaccacagaggtgacagaattcgcaatcattatactgctcgcaatgagcattatctaagtgaattcatagcgatttgtgagaagcaacatttggatgataaactggtaaaatcgcttaaagatgttattttcttccaacgcccattgaaatctcggaaaggacaggttgggcattgcgtctttgaaactaagaagcccaagtgtccagcatcacatccgttgtatgaggaatttagaatgcttagctttctgaacaacattaagattcagacaccccaggatgatgctttacgccctttgacagaagaagagcgcaagaaggttatgcctaaattttatagaaagacgaagccttcgttctgttttgaagatattgcgaaagaattatctggtaaggggaaatatgcttattataagactcccaagggcaagccttaccttttcaattatcatatgaactcttctgtatccggttgcccggttacatctggtttaagagatatcttgggggaagattgggtcaactctatatgtgaggtctacgataagactcagggaaaaactcgcttgcagattatcaacgatatttggcatgtgctttttgacttctctgatgtagaaaaactcgttgaatttggaaagaagcatttacaactcaatgatgaggatgctaagaaattcagtcaaataaaggtctgctctgagtacgcttctttgagtttgaaggctatatgtaagatccttccttatctacgtcgtggaatgacttattcactctcgacgttcttcgcaaatttgggatcagttgttcctgcagatatttggaaggacagcaccaataaagataagatcatcaaagatatactcgacgctatcgctgataaggacaacaatgcagctgatgacagaacgacagagaggtgcataaaagactatctgatttcacgttttgatattccaaaggaagatacggatagactttatcatccgtctatgatagagtcctatcctcatgtccccgaacatgttaataagcttgggtctccaagaatcgatagtgttcgcaacccgatggcaatacgctccctattccgtttacggcatgtcgtcaatacattgttggcagaggggaaaatagatcataatacaaccatacatatcgagtttgcccgcgagttgaacgatgccaataagcggcaggcattgtcaaaattcatcaaggaaaacgagaatgatagaaagaaaatcaaagcagagattatacaactctacaaagatgaaacaggtttggcaatagaaccaaccgatactgatatattgaaatatcagttatgggaagagcagaatcaccgttgtatctataccgatgaacagatcggtatagtagatttcttaggcgataatcctaagtatgacatagaacatacgattcctcgtagtgctggaggtgacagtacaaaaatgaatctcacactctgtagtagtaaatttaatagggagatcaagcaaacgcttcttccttctcaactcgctaatcatgaggctattcttcttagaatcgagaattggaaagcgaactacgaagaattagatcaacgcattcgaaagatgcgcacttctagtaatatgactaaggaacagagagataaattgatgcagaggcgaaatcttttgaaattacgtagagattactggtatggtaagtatcagcgcttccttatgaccgaagtgccggagggctttagccgtcgccagggtactgatatcagtgttatttcaaagtacggacgcttgtacttgaaggcattcttcaataaggtttttgttgttaaaggattggcaacttccgatttccgaaagatatggggcatccaggatatctatactaagaaagaacgtactaaccatgtacatcattgtattgatgctatagtgattgcatgtattggccccgatgagtacagtaaactggctgaatattatcgggatgaagaaaaccatgaatggtatggagcttccaaagggcattttgccgcaccgtggccgacatttcaagaagatatgaataagatccggaaagagatagtcgtgtcccatgatactgccgacaatattgggaagtctggaaggcatcggatacttcttaagggaaagaaggtctgggctaatggcgattctgcccgtgcgtctctccacaacgacacctattatggtgctatagagcgaaatggaaaggtgaaatatgtggtccggaaggctctggatgcaaaattcaaggatacagatgtcgacaatattgtggataataaagtaaaggagatcgtaaaagatgctatcttgcaaaatggtagtttaaaggaggctatagctaatggcatatggatgaataaggaaaaggggattgcaatacgtaaggtgagatgctttgcacctaatgttacacgaccgttggatatccgacatcatcgtgatttgtcaactaaagattataagcaacagttccatgtcaccaatgacaccaactatgctatggcgatatatgttgggcatgacaaaaaaggtaaggaaaagaagagcttcgaacttatcaacaatctcgatgcttgcaattattacaagaaaagcaatgataaagagattgtgggatacaatcttgttcctttgtcaaaaaacgacagtcccttgacctatgtcctcaagaaaggctcaatggtcttgctctatgagaaaactccagacgagatcagagattgtggtgttgaggaattggtcaaacggctatataaggtaacaggcctttcgtcgatggtagtaagtggctgtgtatacggtactatagtcttgcttcattcccaggaggcgcgatccagtggcgaattgaaagcgaagaatggagcttataagcagaatgaagaatttagaagttctataaaacttcttcatacacagtttaaggctcttgttgctgggtatgattttcttatcaatgatgttggtgaaatcaagtggttaagataatgttgaagcaaacacttttcttttcaaatcctgccaagctctccctcaaggataagcaactggttatatctataaaggacagtgatgatgttattactcgccctatagaagatatcggttatgtagtcattgaaaaccagcagatattactcaccatccctcttgtgaatgagttggtgagcaacaatgtctgtgtaatcttttgcgacgcaaagaatatgccttcctcaatgcttatgggattgaatactaacactacgcaagctgagagtctgaaattccagcttgatgtttctgaaccgtcccgaaaacaagcctggaaacaaatcgtggaacagaaaataaaaaaccaagcagcactattagacaaactgggcgtagaacatcataatctaaaggcttactataactcagtactgagtggagatacttctaatcgtgaaggaatagcagcacgattgtattggaaacatttgtttggtaaagattttcgaagagaacgggaagggcttcctcccaataatctgttgaactatggatatgcaatactcagagccgcggcagcaagagcgttgatcggttccggattgttaccagtgtttggcttgtttcacagaaacaggtataacgcattccctcttgccgatgacataatggagccttatcgaccctatgttgacgagattgtatacggcgcggcagaggagggacttctgaacttagataaagaagtgaaagtaagattgttgagattgctggttacagatgtaaaaatagggcagatgactcgacctttgtccattgctctgactacgacgtcagcatctctgttgagatattataagggggaaataaaaaaaatgtcattaccagtttttacatgactttagatcgccttaatgcataccatattatgtggttgtttgtattcttcgatttacctgtgacaacaaagaaggagagacatgatgctgctctgtttcggaaaaatttggagaaggacggtttctccatgatgcaattttctgtctacgtgaggcattgtggatcgtatgagagtcttgacgttcatgcaagacgcgtgaaaagttttgtaccaagatatggtatgataagtatattgtcagttactgataagcaatatagtaatatttataatttccgtggagagcctaaatgcacaaaatgtagtaagaaaagaaaatttgttggacaacctatacaattggaacttttttagtaactttgcaatgaaatatggacctacgcttccgttttttatttcttggatatagtgtattcccctttgtacaaaggagttcccagagattaagttgcggtttgatgtaggaatataaggatatacagcttgcaacctgcgaaagaagttgattatatgttgcggtttgatgtaggaatataaggatatacagctgtccgcctcggtgaagtccacgtacgtgcgttgcggtttgatgtaggaatataaggatatacagcgtccttgagcgtacccgaagcactgatgcgttgcggtttgatgtaggaatataaggatatacagcgagcctttgtaatagcaaagtatatctcctgttgcggtttgatgtaggaatataaggatatacagcataccagaaacggcctgcagaacttaattgttgcggtttgatgtaggaatataaggatatacagccttgctaaaaaaattgctgatcttaaactcgttgcggtttgatgtaggaatataaggatatacagccgaacttacggaacttagtcctttgctccagttgcggtttgatgtaggaatataaggatatacagcaatcacacaaaactactttgtcatctacaagttgcggtttgatgtaggaatataaggatatacagcacatcaatgtctgtacatcagcaccatccgttgcggtttgatgtaggaatataaggatatacagcaagtataatttagagaaaatgcagtttgagttgcggtttgatgtaggaatataaggatatacagcccagcacctaaaccgatagccataatatatgttgcggtttgatgtaggaatataaggatatacagcgatcctcagggtcaagtgaatagccaagacgttgcggtttgatgtaggaatataaggatatacagccaagcactacttaacaaaagcaccaaggttgttgcggtttgatgtaggaatataaggatatacagcgaagcttgtgaaataagaagtcttcacccgttgcggtttgatgtaggaatataaggatatacagcgttcgcaatattcacgatgacgatagcaagttgcggtttgatgtaggaatataaggatatacagctcactcacgtgagactgttccaccactaagttgcggtttgatgtaggaatataaggatatacagcgaatcatctattttataaatatccatatagttgcggtttgatgtaggaatataaggatatacagccagtttcatggtctatccaatcaaataccgttgcggtttgatgtaggaatataaggatatacagcgaactgcagggcaagtgggagaagctgacggttgcggtttgatgtaggaatataaggatatacagcacgatgatcagatgataggacgctgcacggttgcggtttgatgtaggaatataaggatatacagctggtgaaagcgacaatgaaaagggctgtcgttgcggtttgatgtaggaatataaggatatacagcccataccgcatcacggtcaagcggtaacagttgcggtttgatgtaggaatataaggatatacagcaaggtcgatgtcctttgtgcttgatgattgttgcggtttgatgtaggaatataaggatatacagcacacaagattatcgatgattgcattgaaggttgcggtttgatgtaggaatataaggatatacagcttatccatccgggaagagaaaacgccactgttgcggtttgatgtaggaatataaggatatacagcgtccgtggcgagttcgagagcatggaaacagttgcggtttgatgtaggaatataaggatatacagcaaaaccgcagacaagaaagccaaggcagcgttgcggtttgatgtaggaatataaggatatacagcagtacgttgctacgacatttgcagcgtcaggttgcggtttgatgtaggaatataaggatatacagcagtgtgaaacgtatcaataacttgtttgatgttgcggtttgatgtaggaatataaggatatacagccagacatatttgtgttatcaacatcacacagttgcggtttgatgtaggaatataaggatatacagcagaacttctgcaagtcagcgcgcacccatgttgcggtttgatgtaggaatataaggatatacagcttagccaaaaaaggggtttctgactatgttgttgcggtttgatgtaggaatataaggatatacagcgatgccattgctgacggctatgctaataagttgcggtttgatgtaggaatataaggatatacagcggaatatactcgctctgaccgtcagcatggttgcggtttgatgtaggaatataaggatatacagctttaggcctggctataatccttagccatagttgcggtttgatgtaggaatataaggatatacagctacacgtgggtcaggacaaaaggcgcccaggttgcggtttgatgtaggaatataaggatatacagctttctcattcatggtcgcgtggcttagggggttgcggtttgatgtaggaatataaggatatacagctctctctgaattctgaatcgtgtattctctgttgcggtttgatgtaggaatataaggatatacagcctacaccaccagtataaccattcatcgcaggttgcggtttgatgtaggaatataaggatatacagcaaagagaagatcatgcctcggagcactccgttgcggtttgatgtagggtaagcgtctcggcattaccgtatttcagcctcgcttaaaagtctgtacctttgc

SEQ ID NO: 4214 - DNA, 17614 bp, synthetic construct
  misc_feature 1..17614: note = Synthetic
  source 1..17614: mol_type = other DNA
cttgtggaaaatcatatcgatggcacgggcatgatccactacatacaaccagtcgcgcacgttctcacccttaccatatactggcaatggcttgcgatgacggatattgttgatgaacaatggaatcaacttctcagggaactgatatggaccatagttgttggaacagttggtcacgatggtaggcattccgtatgtatcgtggaaggcacgtacgaaatggtctgagcttgccttggaagccgagtatggagaatgaggattatacttggtagtttccaggaagaattcctcgccataagcctcgtggttctttccgctggaagccttggttgtgaaaggcgctgcaacaccctctggatgagtcatctgcagggcaccatacacctcatcggtagagatatgatagaagcgcttgccctcataaccctctggcagactctcccaatagatcttggcagcctggagcaaagccagggtacccatcacattggtctgagcgaaagtgaaaggatccttgatactgcggtccacatgactctctgcagccagatggataataccgtccacctgatactccttcatcagtttcagcatcaggtcgaagtcacaaatgtcacccttcacgaaggtatagtttggcttgtcctcaacatccttgaggttagctaagttgcctgcgtatgtcaacttgtcgaggttgatgatatgatactcaggatacttgttcacaaaaagtcttacgacatgtgagccgatgaaaccagcaccgcccgttatgatgatattcttcatttctatatgtttttagtatataatttcaattagctactttctgttccggatattacttggcagcctccagattagcaatacatttctcaagagaatctacccagtaaggcactttcacgccgaaggtctccttgatggaacgcttgtcgagcacagagtaagccggacgggttaccggagagggatattcagaactgtaacatggttggatgtcgcaatccgtatgtcctgagattcttgctatcatctgggtgaaatcataccaggagcaaactccctcgttggagaaatgatagattcctaccagtttctcctgcgcttctgccgtcttcatcttctctaagatggtctcgatggcataagccagatccagcgcataagtaggagtaccgcactggtcgaacaccaccttcaactgcggtttggtggcagtcaggttgagcatagtcttgcagaaattcttgccaaactcagaatagagccaggcggtgcggatgatgacatacttgcagccgctggcgatgattttctgttcgccgtggagcttagtagtgccataaacgcccgtaggagtacccttctgttcaggattgcaaggcacattataaggttccttaccaaacacataatcggtagaaatctgaacgagcagaccatccacttctttcattgccttagcaagattctccggagcatccgcattcagtttctcagccagtgcagccaacttttcatcggtttcacaagcatccacattggtccaggcagcacagttgacgatagcctgcacctcattgtccttcaccatctttcggatggcatccatatccgtaatatccagataagtagtctccagaccctccacctgattgacatccgtaaagatataatgatcagtagtattcttgctaacgatacgcatctcattgccgagctgaccgttggcacccgtaactaatatattcatttctatttataatttacaattagacccacttttatcagcatttctccaaagccttttttacctttttacctttttaaaaaggactgtcaaagtctttcagcatatcatgcttggtatccttctcagagagaatagcatgctctgtaggaatcttccagtcgatacccaagctctcgtcgaggatagagattcccccgtcagcctcaggatgatagaactcatcgcacttatactggaacacggcagtttcgctgagaacggcaaaaccatgggcaaaaccacgtggaataaagaactggcgatgattatcctcggtcagttccacagccacatgcttgccataggtaggagaacccttgcgaatatccacagccacatcgagtacggcacccttcacgcagcgcaccaacttagactgggtgaatggagggcgctggaaatgaagtccgcgcatcacgccataggacgacatactctcgttgtcctggcagaaatggataggatagcccagtatcggagccaccttctcgtcaaattcacgctgagagaaactctcgaagaaatagccacgggcatccttgaagatgcgaggctcaatgatgagcacgccatcaatatcagttttgattacttccatatcttagtcctttaaactattctggtaccattcataaagtttcttcacaccatcctcgatttccacctgatgggtccaaccgagcgagtgcaacttgcttacatcaatcaactttcttggagttccgtctggcttagaagcatcaaactccaccgtaccctcgaagcccaccgtcttcacaatcagttcagagagttcacggatagtaagttccttaccagtacccacattgatgtggcagttgcggatttcaccgagcgaaggaatggcaccgccacgaccctcagaattgttacggtcaacggcaccgtccaccttggcaccatagaaaacagaactgtatttctcgataccgatgatgtccttgaaatctacattcaggagcacgtgaacgctggcatccgccatatcctcgctccagaggaactcacgcagcggagtacctgtaccccagagcaccaccttattattatatataccatagaactccagggctttcaggatacgctcatggtcgttatgaccatccacgttgccctcgccgatgagttcgcgcagtttatcagtagggttgatcggacgcttgttcatatccacctcaatactgtgccagtcgccctcatgaatcagtttagacagatagatcttgcgcatcatcgcaggcatcacatgactgttttccaagtggaaattatcattcggaccatagaggttggtaggcattacagcgatatagttggtgccatactgcagattgtagctctcgcacatcttcagtccggcaatcttggcaatggcatactcctcgttggtatattccagaggagaagtaaggagcacatcctccttcataggctgcggtgcatccttcggatagatacaggtagagcccaggaagagcagcttcttcacaccatgactgtaagcattgctgatgacattacattgcatcttcatgttctgcatgatgaagtcggcgcggtagagcgaattggccatgatgccgcccacgaaagcagcagctaagaccacagcatccggacgctcctcatcgaagaatttctgaacggcatattggtcggtcaggtccagttccttatgcgaacggcccactaagttattgtaaccacgtttcttcaaattgttccaaatagcggaacccaccaagccatgatgcccagcaatgtaaatcttactatccttactcaacatttttacatcaaaaatttaagttattattttctccgtgcaaaattacgatttttctctcaaagaataaaaagttttagggatttattttgtatttatcgcaatttgatgtatctttgcactacaaaaggaataaacataatgaaaatcaagacatttttaatcatcggatttgccaccttggccatgctttcctgccatcgtggtcccaagccaccggtatctcagcagaacttgcccatcagcatgtcaaaaccagccaagggcgacaaagctatctacggacttgcctgcatgggatgcacagactccgtaataatcatgctccccaatcagggcggcgatcctgtaaaatataatattctcgaagccaaccgcaaccgtcaggtatttggcaatatcgaagtgggcgactggatctgcatcatccctgccaaggaaaagaataaggcaagcatggtcatcgacctcgacaaactgaaagccacctggacctatcaggtgatgcctcatctcagagatgtcacccacctctccaaaaagcagcagcagcgcattctcgccaatatgcccgacagcatcgtggaaacctacatgattccgcgcgaatacggatttacgctcaagcgaatgggagaagcacgttccgtgggaatggtggcgaccaacagttcggtagaggatgacagtcctgtggaatatcctaaagttcccctttacacagagtggcacgcctacaacggcaagctgatcttagtgaaaggaagatacgagtttaacaatgtcgttttcaacgagaaaaccacctacgacacgctttctttcgtctatatgaaggatgattcgctcgctctccgtgattctcggggcaatatccagagctatcaccgcaagaccaatgcacagactgccaatgccgcagcccagaaagcagcccagaaagcagcggaaaaattcaaggaagaactcaaataaagttcatgcgttcatcgcttgaaatccgagagaaatccttgaaacaagactaaacgagatggagaatttccgaaaaatgagtaatacgacggaggcgttcatgttcgaactcctccgttttttcatgcgcccatatcgtatgaaatgggatatgaatggcagaagctcctatcttgagagcaggcgcaatgtcgcttttgaaactgttgcccaccatcaccaattcctccggcagcacacccaactcacggcaaagtcggcgataagcttccggtttcttgtcgctcacgatgctcaccacatcaaaatatcgctgcagtcccgatcgccagagtttattctcctgatcctgcagttcgcccttggtaaagaccgccaacttatattccgtctttctgagttttgccagagtctcctccacctcttcgagcggtttggcatccagtctcagcagcgtctttcccaattccaccgctctgcctatcacgcgggcaggcacctttccgtcgctcaccttgatggcattttccactaatgagatggtgaacgccttgacgccatatcccaagtcctccatgttttccccttccgtctcaaagagcgcagcagagatttcctccttgcttccatagtcagaaagcaagtcacagtactcagcctccacttcctcgaagtaagtctgcaaggcccagagggtgtcgtcggcatcaaaagcgattgccttgatatgatccagttttttcatatttctcatttctaatttctcatttctaatttgtaatttctcattatataagaaccccatctgcaaaaataatacttttccccgaactgacaaagaaaaacgcgcaacaatctgctaaaagcaactgctgcacgtccgtcattcattcaatcttaatagagaattacttttcagaaccaaaagttattatttacatcagaatatgatctctttttagaaacgagtcataaactccactacaatcttgtccttctcagaagtctttgccacaccaccgttgcgatagaaatacttctcgtagttgatacggatgtcagagatgaaaggcttggcaagactgagcgtcacaccaccagtcacacgatggcgcttatagtcgttgattttcaacacgccagggtcctcatccgtagccccatatcgggtgccatcactgtggtcgctcatgaaatcatatcttaccaatggagaaaccttcctgatcagactcttctggttgaccaccggaatatcatagcatacaaacccgtcaaaggcgtgcacatcatgaaacgcattcttggaataatgcttgaagaggtattccacctcagcgatcagaccgccacgatggaaggtaacacccgcatcatacatattgacggtgacatcagaaggcttgattttctgcgtactcagcacgagattcacattcgggaagagaaactgcgccttggcagaatagttgatgcccttggtccagtaatccttctggttggtaagaccagagccgttgaacacacccgcattcacgatgataggaaaccccacgttccaggtataacccacctcagcaccgacatcacgcacattacccacctgtttggcgataaacgagcggttggcgaaatactgctgatgaggcgagcggtgcgcatcgatggtgaaaggcacacgttcctgaccgatagtaaactggagcgtactccatggtttgatacgggtataagcatcgagcatcttgattttgccctcatcgcagaggtcgatttccgccttgtagctcacctctttggtcaccttaccagtcacattgatacgggcagttctcacttcgaagcgtccctccccttcctcggtctggaattcgtacttcgaacgtatcgtaccgccaatcttcggagtacggtcaacctccttcttttcatcctgagcaaacaccgctgcagacatcatagtgcagagcagcagggccattgtcttcttcttcatattcacattattaatatattagcacacgtcatgaggccatagcctttattcgggtgcaaaattacgaagaatatatttctaacttacgacacggatgttacaaaatgatgaagaaaaagaaatcatatattccagacattccatgatatgaaacgttaccgatacatttttgccttttccctttgttatttcaaataaaatgattagttttgcagatgcaaagagtctgataagatattatcaccagaaacttaaaagaaagaaccatggcagaattgaaattatatccagtaggaatccagactttcgaggaaatcatcacccgaaatctgctgtacgtagataagacggaatatgtctatcgcatgactcatagcggtggcaaacatttcttcttaagccgtccacgccgtttcggaaagtcattgttggtttctacctttaagagttattttctgggaaagaaggaactcttcaaagggcttgccatcgaaaagttggaaaaggactggacggaatatcctgtcctgcatttcagcatggctggcggtaaacacatggagaaggaccagctggaaagatacttgggaaaccggcttgcagaacaagaaaaagtatggggaatcaagactcccgctgttgatgcgaacgaccgtctcatcgcactcattcagactgcttacgaaaagactggcaagcaggtggtagtactcattgatgagtatgacgcccctctacttgatgttgtgcatgaagatgctcatttgaaagatttgcgcaatgtgatgcgtaatttctatagtcctctgaaggattgcgaacctatgcttcgctttgttttcctcactggcatcactaaattttcacagatgagcatcttcagtgaactcaataatatcaccaatattagcatggatcatgagtacgctggaatctgcggtattaccaaggaggaattggagactcagatgtcagcagatgttgatgcattagcagttaagatgaatctaacccgaactcagactcttgatgcattgcgagagttttatgacggttatcattttgcagctcagtcaccagatattttcaacccctatagtctgctgaatgctatggctaaaagtaagttggattattattggtttacttcaggcacacctacctatctgatagaaatgcttaagaaattccaggtaatgccttcggaaattggaagttgcgaggcagacaaatcagactttgacgcaccgaccgaaatgatggtatccatcatgcctcttttatatcagagtggatatatcaccatcaaaggttatgatccagagacagaactctttacgcttgacattcccaacaaagaaatccgtgttggattatatcgcagtctcttacctaattatataggtatgactacgcctaagggaacaaccaccatcgcaaagatgtcggctcttattcgccgtaatgatatgaatggggctatgcagatgcttcaagcttttcttgccacggttccgtattgcaacaatgcggattcagaggggcattatcagcagatgatgtatgtgatattctctattcttgataattacgtggacgtagaagttcgcactccgtcaggaagagtggatatggtactgagaactgctacgcatctctatctctttgagttgaaactcaataaggatgcagctgcagcgatgaagcagattgacctcaaggaatatcctaaacgttttgctctatgtggcttgccaatcgtaaaggtaggcgtcaactttgatgtcgcttcgcataatatcacggattggaagatagaagattatacataatggtggcataattttcatatcgcatcacaaggcgtacactcctctgaatgagagcgtacgccttgtttatttattccccaccccctttctcaatatattgtgaatattccttcttcacatcgaagcaaggacaggcttaggaaaactcgttatgatcttggatggtgaatacggggaataattttgaccagaaaagactttgaccaaatgaccaatcgtagtatgcatcgtcaagagacgttttggcgatttatagcaactgaacctaatatctatatttttagttaaataacgttatcaaaaagttacaccttgagaaataatttgtatatttgtcatcaaaaaaaagaatcataatgacaaaagaccaatttccaattcgattacatgaagcaagaatgatgatgggactaagcatggataagctggtagagcgaacaggcggagccatcaccaagcagagtatatctcggtatgaaagaggcatcatgcgcccaaagagaccagcattgttggccttggctaatgccctgcacatcagtgaaaaatatttttggggaaccaatatagacatagatatgcctacgctacgaacaaatgccaatggcaaaatttcagaaaaagaactgttggcattggaagccaaactttctttttgggcagagcaatatttagagaaggagcataaggcaggtttcagttccacctttaagaatcccgttttagggacgaaaatctcaactttggaggatgccatacaggcagcagaccttttaagagagaaatggtgttgtggtgacggtcctatagccagtgttcttcgtttattagaaagaaaaggaatcaaagtgatgtcagcagaattgccagaatccgtttatggattaagcacctgggcaaatcacagatacccattgatagtacttgacatgaggcccagcaagactacggtagaaaagcttcgttatacagccatgcatgagttggctcatttgctcttttcatttcccgacaatccttcattatctttggagaagcgttgtgatttgtttgcaggttactttattctccccaagaagacatatatagaagagatgggaggaaccaaaaggatgaatatttccttggaagaaatgatagatcttaaaaatgtctatggtttatcacttcgtgcattgattctcagtgcccgtgacttcggcattatagaaacagaatacaaacgatggtggtatgcagagtatctggaagataatccatgggaatcggggttaggacattacgcttatccagaaacgataggtagagaaaagcgtattgattctattatcaattttagaaagacagaggaggaagggaataagttatgcaaaatggaatagacatgaagataaaacagaagtatataaaaaaataaatcccaccgaagcgggactataggttttacccttcggcatttctgccttattgtgataagatgtaggaaatcttattttctgctgcaaatataatataaaatatttgtttatccaataaaaaggttgttattttacagaaaattaataattaagtatataaaactatacaatatgactaaaatacttggaattgataccggaaccaatagtcacggatgggctattgtggaaaaacaggcagatgaatatcatttgcttgataaaggtgtggacatcttccaggaaggtgttttaaaaacagaaaaaggcaaagaatattctaaagctgctgagcgtacagctcataaagctgcaagagtaagaaactatcgtattaaattacgtaagatacgtttgcttcgtattttaagtgatgcacatttgtgtccaccactttctaaggtagaactttctgcctggagactcaagaaggagtatcctaagaatgaattgtttatgcaatggcaaagtactgatgatgaatcagaaaagacaccatacgcttatcgacacaaatgccttcatgaaagtttggacttcagtagtataactgataggcatattttgggtcgtgctttttatcacatgattcagcgacgtggctttttaagcaatcgtaaagatcagagtgctgatgatacaggaatggtaaaagaaagtatcagtaaccttactcaagagatgcatgatgctggttatgagtatcttggtgattatttttattctctctataataaaggagagaagatccgtaatcattatactgcacgcaatgagcattatctggcagagtttaaggctatttgtgaaaagcaggagttagataagaatcttggtcatgaagtggtacatcaaatagaaaaagccatattcgaccagcgaccattaaagtcgcaaaagggacaagttggtaaatgcgtatttgagaagaacaagacaagatgtccttcttcacatcctatgtttgaagagtttagaatgctctcttttatcaataatataaagattcaaacgccaaatgatggtgcattacgctctttgtctgccgaggagcgagaacttatcatgcctttgttcttccgcaagtcgattataaaaaagaagcagtttgtttttgaagatattgcaaagaaactggctcgtagggaacagtatgggttttataagaagagcactgatgtcgaaatgccatatcttttcaatttccctatggatacatctgtttctggttgtcctgtaactgctgctctgatagatatatttggggagaattggatcgatgctctttgcgaaacctatactcttgctgagggcaaaagtcgattggatattgttaatgatatctggcatgtattatttttctatacagatgaggcaaaacttgcagagtttggcaagaatcgtctgcaattgaatgatgaagatgcaaagaaattcagtaaaataactctacagaatggctatggacgattgtgtttaaaagtaatttgtaaaattctaccttatcttagaagaggattagtgaaagatcatgcaatcttgttaggaaatttatgtgaagtgatgccgcaatacgaatgggatataaaggaaatgcgtattgctgccattgataatatcatccgcgaaataaataagacagatactaaagacgaaagtacttcagagaagcgtatcaaattagagaagcgtatcaaagaatatttgaaaaatcagtatcatgtatctgaagagaaacttaagaagttataccatccttctaagatggataaatatcccagagtattgcgtactaatgatcatggtgtttatcagcttggttcacctcgaattgatagtgtgcgtaatccaatggctatgcgttccatattcagattgcgtaaattggtaaatcgtttgttggaagaggggaagatagatctggatacagaggtccatattgagtttgctcgtgagttgaatgatgcgaataagcgtcgtgcgatagcgaaatttgcaaaagataatcagaaaaaaaatgatgaggctcgtaagaagattatagacataatgggggaggactatgatgttaaagatgatgatataaaaaagtatattctttgggaagagcaggggcatatctgcttatatacaggtaggcaaattgctatttccgactttatcggaaatagtcaaaattttgatatagaacatactattcctcgtagtgttgatggtgatagtacaagaatgaatttgacgctctgtgatagtcgcttcaatagagaaatcaagaaaaccaagttgccggcagaattgcctaaccatgatgaaattatggcacgtattaatgactggagagaaaagtacgagtctcttgatgggcagatacgtaaactaaggggaaaatcaaagggggcaacaaccaaaaagctaaaggatgacataatttataatcgtcatcttttggaattgcaacgcaattattggcgaggtaagtatttgcgtttcacgatggagattgtacctgaaggatttagtcgacgccaaggtactgatatcggtgtgatttctaagtatgcacgtctttacttgaaatcccttttcaagcatgtctataccgttaatggtattgctacttctgattttagaaagatttggggtgttcaagatgtatatggtaagaaagagcgtgtaaatcatgttcatcattgtattgatgctatcgttgttgcatgtatcagccgagacgaatatgataagttaagtgcatactatcataatgaagaaaatcataaatggtatggcatgtcaaaggcttattttaaaaagccatggcctacatttgttgaggatttaaagaatgtgcaagatgaaattttggtttatcattatactccagacaatatgcctaagcaaggacgtcgtaaaatacttcttgatgtagaagttgatggaatcaaaaagaaaaagaaggtcctttgtaagggtgatgcagcaagaggtttattgcatagcgatacatactatggtgctatagagaacgatggcgtggtaagatacgttaagcgtataaatttggcttctatgaaggtgaccgatgttaaaaatatcgttgatgatgctgttagaggtattgtagaggctgctatcagagaaaagggctttaaagaagctatggctggaactatatggatgaatgaagaaaagcaaattcctattaaaaaagtaagatgctatacttcgataaaaaatccaatatctttcgataagaaaaaacaacgagatttgtcggataaagaatataaaagaaactattatgttaccactaagggtaattatatagttgcattatatgttggttctacaaaaactggcaaaagaaagacattttatgaatttgtgaatatgatggaagctgctggttattataagacgagtaatgataagtctgttgttggacataatatagtgccacttgaaaaagatgattgtcagttggcttttatcctaaaaaaaggaactatggttatcttttataaagaaacaaaagaggaggtatgggattattctcaaaaagagacagtcagaaacctttactacgtatccgggatagaatccgatggtagggtaacgtttaagtatcatcaagaagcgagacgagacgaagaacttcctcgaaatgcttctgacacatcagatataaagcctaagataagagtcggtttggcttctgcaaagatactggttcaaggctatgatttcgagattaatgaattaggtgaaattaaaagattaagataaaaatgatatgattaagcagacattgttcttttcaactccagtttgcctttcacttaagaattgccagattgtaatctcttggaaagatagtgacgacaagattacacgccctattgaagacatagggtgtgtagtcttggaaaatcaaatgataagcattactttaccgcttcttaacgagttggtaaagaataatgttgctgttatcttatgtgacaataagatgatgccaacatctatgttgcaaaacttagatgctaatacaacgcaagctgaaagtttaaaatttcagcttgctgttactgtcccaatgaaaaagcaagtttggaaacagataatagagtcaaagataaaaaatcaagctgctgtcttagctcttgccggaaagaataaagatattctcaagccttattataataatgtaaagagtggagattctgacaatagagagggattggctgccaagatatattggaatagtcttttgggtaactcctttaaaagagaaagagaaggctgttctccaaattctcttttaaattatggttattccatattgcgtgcagctgtagcccgtgctttacttgggtctgggttgcttcccaatttaggtatcttccataaaagcagatataatgcttttcccttagctgatgatgttatggagccatatcgaccatttgttgatgaaatcgtatatcgactttatgaaaatggaattacagaactaaataaagaatctaagtcagagataatgcgtgtgttgaattgcgatgtcaatatagggaaagttaagcgacctttgcagatagctttaaccatgacaacagcctctcttgtgaaatattatacaggagaaatcaagaaactttctttaccgttgataacatgacagaatatagacttaacgcttatcatattatgtggttgtttgtattttttgacttacctgttaccacgaaaaaagagataaaagcagcaactctttttcgaaagaatttggagaaagatggtttctctatgatgcaattttctgtttatattcgtcattgtgcttcaagagaaagtttggaagtacatattaaaagaataaaatccattcttccggaatcgggaaaagtaagtttattaagtgtaacagataaacaatatggtgatatttttaatttttgggggaagcctagaagtataaataaaagtaaaattacccaaaaagttataggtgaacccattcagttggagattttttagtatttttgtattgttttactttctactttgctatttcttattaatgaaagtgatagtaacatgctgattatcagctatatcaccattataagttgtggtttgatgtaggaatagtacgatatacaacatgtcgaacataactcccaacttgggcgctgttgtggtttgatgtaggaatagtacgatatacaactaccagcgtattggtaggtgccagctcaaggttgtggtttgatgtaggaatagtacgatatacaactccaactctgtcttcatctacagagaaagggttgtggtttgatgtaggaatagtacgatatacaacatattgaagtcaaataacaatttcgcatagttgtggtttgatgtaggaatagtacgatatacaacgcgcattatatagggttgataggtatcatgttgtggtttgatgtaggaatagtacgatatacaactgaatgaaataaatactatgcgtgatacggttgtggtttgatgtaggaatagtacgatatacaacaacattctgcctatgggccttgatgtttgtgttgtggtttgatgtaggaatagtacgatatacaacttgttttgcatacatcgcctttgtagcaagttgtggtttgatgtaggaatagtacgatatacaacgccctgcgcagcttgtagcccgaacgcatgagttgtggtttgatgtaggaatagtacgatatacaactcatctgattataaccagaatgagagtgatgttgtggtttgatgtaggaatagtacgatatacaacggtttgggaacatgtacttatgaagtttagttgtggtttgatgtaggaatagtacgatatacaactaatctgcgtaagggtcgcaagtgtaaaccgttgtggtttgatgtaggaataatacgatatacaactttcatcatatattgaaaactgggagctcgttgtggtttgatgtaggaatagtacgatatacaacagtcgcccgatgagccaatcttagcataggttgtggtttgatgtaggacatgaagataaaaatcaacaggtcatagaacatgatcaagttgatgttataaacaatatagaacctctcatttaagtaataagagggcatcaagtatgcttgaccgtgaccttgcaagattatatggagtagaaacaggacagttgaatagacaagtgaagcgtggctacaaacgatgactaaagcctccttgtaaccacgcttttatattctctatatcaaacaaggaacgtacccttgtttatttattccccaccccctttctcaaaatagggatctaatttcttcttcacgtcgaagcagggacaggctttagcggaaaactcgttgtgaccgtggatggtggcgtgagggaattcctccttcagctgaccgatgagatccagcagggcagccttccggtcgatgtaggtaagcaaattatccaatgatagctttaatctagatgataccatttctttcggacaaagctgtataatatcataggtaataaccttagcatatttctatagacaaagtctgatatatacaaaagaggtaatcaatgtgaatgtgcttttcagaataatatttgatttcactgatagcatgattaatcccattaaattctacttctttttcttcaatatatttatttttgttcgacaattttactatacatcacgatttcgctcctgaaaacctatatatttgaacttaaaaataaggggttttagtgaaaaaatccgcagttttgagctcttaagtgaaagaataagccgaaaaacgctccataaatagggatttcttatcatagtataaatacacaataataggtccctctctaatttacgtattactgcctatggttgattctacttccatgagttaggatttataagtcactcataataaagtaattaactccgccacttgggggtaattctaattcgctctatatgtttatcagcatctaaaatgttccgtatttcatatcttttggcaaagataataaatcttttatataatatcgaattttattattttttttatcgtaaaagtagaaaatagctattttgggggtataagaagtccaattttgatggtaaaacatccattttagagacaagaaaaagccctccatttgcagttttgggctgaatattttacagaattagaaagatacgacgatagagacagatgctgattgttagtatattttatctttattgcacttataaatgtgtcgcgaataaaatagtttagattacataacttattgacaatcaacaacataaacaatcataatgattaaaagcattctcttaccaagttagtagttggtcaaattggtcatggtcattattggtcattttataagaagtattgctcattttttctatagtataatataaataattatttatattatactataggcattttgacccatcccccgaaggattttgaccgaacatgaccatgaccaaaatgaccgctttttaaaaattcttgagtagcaagccttcattttcttcaaaatcagtcaaaatgcagcaattgatttccgaaatgtcgttgtaaagcactatcagtcaggcacttacaggtactcctaaaaaatctgtagcccaaaaatttgttttcaattccaaattgttgtacctttgcaccagcaatcgaaagaaagcttctcttgtaccga

SEQ ID NO: 4215 - DNA, 17559 bp, synthetic construct
  misc_feature 1..17559: note = Synthetic
  source 1..17559: mol_type = other DNA
tatattttaaaatttttgatattcaatgtttaataatctgttggaatgtttattttcccagccacttggcaattctctccatggcttccttgcagtcctcatgctcgccgaaggcggtgagtcggatgtagccttcgcccgatggtccgaagccgacacctggtgtgcagactacgctggcgccataaagcatctcttcgaagaatttccagcttggcgtgttgtttggagtctttacccagatatatggggcattctcgccaccataaaccttcaatccgagcttctggagctctgctctcatgaagtgggcattctccatatagtaattgatggttgcctttacctgttccttaccttctggggtgtagatggcctcggcagcacgctggctgatatagctggtaccattaaacttggtacactggcggcggtcccagatagggttcagtgccacttcctcaccggtcaatgtctttgccttcaactccttaggaacaatggtgtaaccacagcgcacaccggtgaaaccggctgtctttgaataactgtggaattctatcgccacctttctggctccacgaatctcgtagatagaatgagggatttccgggtcggtgatgtatgcctcgtaggcagcatcatataggatgatgctctcgttcttgatagcgtagttcacccattttctgagttcttccttcgagatgaccgtacctgttgggttatttggatagcagagataaatcatatccacacggtggtctggaatctgagggatgaagtcgtcgctctcatcacatggcatataggttacgttgctccacttgccgttctcaaagactcccgctctgccaatcatcacgttagagtcgatatatacaggataaatcgggtcggtgacaccgatgttgttatcccatctcaaaatctcctggatatttcctgtatcgctcttggctccgtcgtttacgaatacctcgttggggtcgagatggatgccacgaggcaggaagtcgttcttgatgatagcctcgcggaggaagtcgtaacctcgctccggaccatagccacggaaggaagcctgtactgccatctcatccacagccttgtgcatcgccttgatgacggccggacagagaggctgggttacgtcgccgatgcccagactgattactcgctgcttagggtgggcaatcttgtaggccttcaccttctttgcgatgtcggcaaacaggtaattgttggccaacttcaggaaatgttcattaactaatgccatatttttgttctccttttattgtggtctcttcagatatctctttttctgatgtatcttcatcaaccttattattatttaagtttgctcttatttattctggaatctcaatttctccttcaaaggcgaaggcggcaggtcccgtcatatagacatggtcatctgcctcgctatattctatgtggagcgttccgccatccatcacgatactgctttttctgccagcacgcttggtcagggctgcggctacagcagtggcacaagcccctgttccgcaagccatcgtaattccgcttcccctttcccaaactcgtgttcttatgatgtcagaatcagtaacctgcgcgaattcgatgttgcagcgctgcggaaaagcctggtctctttccagtatcttgccgtaatgggcaatgtcgatggagtcgatgtcatcaacgaaggtaacgaaatgtggattgcccatgcagacgtaagagccttcgaagattcttccgtcggcttcgagtactgaaggaccgataaactgctctggattttccaatcttggtttcagcatatccactgtaactgaatccacaactttcttgttgtcctgaagatgcaatttcaagattttgatgcccgatagcgtttccagtcggatggtttcctttcgggtcagtcctttttcataaagatactttccgatgcatcggctagcgttgccgcacatcattgcttcagaaccatcggcgttgaagatgcgcatcgagtagtctgctcttctgccatcctgcggttttccgatgagaaccagtccatcgcttcctattcctgtgtggtaagcactccaggctatggctgccttctctgggttgggtatgtcatacagctgggtatctacatagatgtagtcgttacccgctccctgcatttttgtgaaatgaactgtttctttcattttgcgttgtcctttaagtttgaatactcttctatctctcacgccttgtctctatcttgagattcgacattctttccagtcttgcctctttcgaaactttactttttgatagtctttcgaatatttcgatgactatttgtttgatttcggttgcaaagatacgactatttgttgaaatatgcaagaaaagatatacagaaaatgatagttattttttagtgtcttacaatttgcaatgcagaaaagtaggatagattacaaattgtaagcagaatatagaataaccggataaatttataatctcagtagaaaaatagaaacgaaatgcttttaatatctttgaaatcctgacaaaatgtattaattttgcagccgaaaacgaataatatgtaaaagaatggcttgatttgagtgacaatcaatgaaagcccgtttttcgttggagacaatcaataaaagtattaacacattattaattattaaaggattatgaagaagattgaggcaattatccgtaagtctagattcgaggatgtcaagaaggcgcttttggctgccgacatcgagtggttctcttattataatgtaaggggtgaaggaaagatgcgccaggcacgcatttatcgtggtgtgatgtacgatacgagcagtatagagcgtgtgctcctgaacatcgtggttcgcgataagaacgtggagccaaccatcgcagccatccagggagctgcccagacaggcgaggtaggagatggcagaatcttcgtgattccggtgctggataccgttagaatcagaactggcgagcgaggcgacatcgcattatataacgctgagaaagaggaataaagatactttgaactttgaggtttgaacattgaactttatgattggtattgaagtttatatttgagagactatattataatattgtattctaatttaactataagatataaatatgagcagtttattattgacggcacttgatacgggtaacacagcgtggatgatcatggccaccatcttggtgctcttgatgtcaatcccaggtatagcacttttttatggtggtttggttcgccagaagaatatcctgagcattctgatgcagacggtattcattgtggcagtggtcagtttgatatgggtagccttcggatattcctgggcattctccacagaatatgcggatagcggcaatcctctggcttgcgttatcggaggtttcgacaagtgtttccaatgccggtgtagctgctttggttatggcactctgtgtaggcaagcgtgatgattaccgtgcgggtcatccaatcactcctcataatatcaccttcgtgttcatgggaatgtcgttcctctggttgggatggttcggcttcaatgccggtagcggattggcagccgatggtctggcagccaatgccttccttgtaacccatatcgccacagctgcagcagccaccacctggatgctcatcgactggattgtcaacaagaagccaaccacggtgggtgcttgtaccggtgccgtagccggattggtagccatcacaccagccgcaggtagtaccgatatttttggtgctttctgcatcggaatcatttccaccatcgtctgcttcttcatggtagcagtggtgaaggagaagttcaagtatgatgatgcccttgatgcctttggtgttcatggtatgggtggtattctgggatcagtcctcaccggtgtattcgccacaagatacgtaacaggtgccgaaggcgtgcagggtgccctctatggcgactggcatcagctttggattcaggtggtagccacagtggtaagcatcatctacagcatcgtagttacctatattatcttcaaggtagtagataagacagtaggtgtacgtgttgacaagcgagtagaggaggaaggtctcgacatctacgagcatggtgagagtgcttatagcaactaaaagacatttatagagaattgtatgtagaataggcaagaaagtatcatattttcttgcccatatttctccttctctacttacttattatggatatagccacctgctattatcgtttatattcttttgaagaagccttcgtattcatcgtccaagattttccaaatgccatttttgcgactaccttctcttacaattaggttttggtcggaaagttgcttgaggtatcgttgcacttgtcgcaaagaaatccccatgttctctgacatttgcgcagcactgatttggggcatctgcgaaatcaacttataaatttgccgttgtgctttaacaaattcttttgtagcatttgctttttcttttacgacatcttttacgacatcttttacgacatcatccgtctcttttacgacatgaaggttgtcttttacgacatcctccccataattgaggttccatagagtaacatgaaattctgttgcattggaactaaactctggtgcgtgataattttccaagttttcaaaacgcttatactcaccaattatctttttcatgccactacctctacgctccatcagtttcaagcgatgaaagaaatctgccaataaaggattgcgacgtttcgatggcacagtcagaggattaagttgttgtatcaatcgtccatcaaacatgccaccaggggaatacacttccatgcggtcgtcatacatatctatgtgtatctcactgccaagttccatataatctctatgaatgatggcattacatatcacttcggttacggcacgctcaggataatctggcagttcttctcgatactcagcttctttccaccatcttctgtgagagttgtttctcacaaaagcaactgcatcttgcaattgactgatgacactaccttccaattcggcatcatccaaagcctcccccaaaccactcgtcatgtcaagtccattccaacgtgtgcagaagatacgagaatggcgtataggggaatcatctgccaataatgcaccggcattggttagtttcccgtcaatgtcaactattccccatgaaacgaaatcactatcatcaaacgattggttcaatcgcttaaaatgaacagatttgagtttggagaaagacatatcctcaaacttgtatggtgatgggatagcatcaaacgaacgaccagcacctctcataacaaggttcttcaattgaagtctgtcagctaccactgactcgttaccgactctcacaaatgccaatcgttgtttgtcacctatataataatatggtgtctcttgtcctttatagacatgaagcagcacaagcttcttgccgtccacctccttaaattcgaggttgacggcaggtatagggtcaagtttggtctttatctcctcacttattctctctgcgtcactttctgcatcagcaagtcctaccacttggtcgtcgtcactgataccaaacaccaatgttccgccctcaccattggcaaaggctgaaacactttttagccagctcttaggtctcttgacttcgagttgttgcttcttatcgtaggcggttgcttcgcctattaactcatttatgttcattttaaattcttttcttgttattattacgataaatcctcatgtgtcattttagaccttattcttgtcttttgttctttcatgagtacaccacaaaaactcaaccaatgttattgaactgcccacagctaatttggcatgacgttcttctaaccctttatatgaagcagcacgtccatgtccgcttccatatgaatttctcaaagtagccattccttcagctattgcgcttagattttatatccattcttaggaaggttatgttgcggaaattttatttctttatcaccttcagaacctggtcggcaaggcttctcattcccttgatagttgggtgaccgttcttcttgtctatgtcatgaagggcgatgaccggaacctgataggtcttgcagatcttttttactgactcgttgatttcatccttcagctcagaatttagaatgaagtagatatctacattcggatggcgctgacggagatcggaaagcaacttcgccagggcaggacggaaacagtagaggtcggcacgcttccagttgctgtactggtaattgccgataggggcatttgcccaactgtcgttcgttccgccgcaaatcaagatgatgtctggattgcccagaagggtagtgcggttgatgaatgaacggtcgctgtaatcctcatcgcgatagccggtgttgcagatggtggaaccggaataggaattgatattgcccatcttgtaaccaccttccttgataacctgccaccaccaggtttgttccaccttgttgacatcggttactttttgaaccgcagtggtgtaccaggtggcatatccctttggaatgaaaccctcgaatgttgaatacgagtcgccgagaacggcaacggtctgctttacctgtgccagcagaggcatcagggcgaacataaagaggcagacgataactgatagtcttttcatgacgtttatttgtttatagtttgattttttttatatgatcctctttttgggatagagtctgaaacccgattgcaaagatacaatataatttatggatatacaaatgttttgggcaataattttatatgaaattttcctatggattcctatatataataatgtgtaatccccgtttctccttaaatcttctagttcttcctatattcaagtgcttttttatgttaaatctatctgtagtttagtgacaatatcagacattcttattatatttgtcaacaaattaaagagctgacaattatgactaatgactcattttcaataagattgcgggaagcgcgacagatgatgggactcagtatggataaactcgtagagcgaacccatggagccatcaccaagcagagcatatcccgttatgagaaaggcatcatgcgccccaagcgtgatgccctgcaagccatagccaaagccctcaatatcagcgaggcatatttcgatggtaccaatatcaagatagatgttccgatgctccgcaccacctccaatggcaagttatccgaagacgagttgcaagcccttgaagcaaaactctctttttgggcggagcagtatcttgccaaggagaaagaagcgggttttcctacccagttcaagaatccgataaaaggaaccaggatatcaacgcaggaagctgccatccaggcatccagtcttcttcgtgaaaagtggcattgcggtgatggtcccatcgccagcattctgagactcttggaaagaaaaggcatcatgatacttgctgctactctcccggattatgttttcggaatgagtacctgggcagataagaagcatccgctgatgattctcgattttaatccggaaaagagtagcgtagagaaacttcgtttcacggcagctcatgagttagcccatctgcttctcctcttcccggaagatagtccgctgaggctagagaagcgctgtgatctctttgccagtttcttccttcttcccaaattggcgcttattgaagagttgggttccaggaagcgagagttgataacgctggaagagatgatagacatcaaggagctatatggtgcctctctcgccgcttccatcattgccgccagagattacggcattatcaccaccgagtataaacgggcatggtatgccgagcatatagagcctaatcctcgtgaaataggtaatggtcactatgcatttcctgagacattgggaagggagaagagagtcaattcaatcatcaaaagtatggaggaatagaatatgcagaatgaaagtcaaaatatagaatataaggaatcatggggacgtggtttcaagaagattgccgaggagtttgaacgtgccagcttgccattgccaacgatagaagaaaatggaggtggcgtgatggcgattgttcagcgcaaaacgatagatgaagttatcgcagagcgtgatgggaatgtcggtgtaaaagtcggagacatgtcggaaacaaatgtcggaaacatgtcggaaagcgaactatctgagcgccagttaaatatcatttctatgattaaggaaaatccctttgttacgggtaaggaaatgtcggaaacaatgtcggtaacgcaacgtaccatagaacgtgacttatctgtattacaaaaagcgggaataattagacatgaaggaagagtgaatgctggtgtttgggtgatactcgaacatggaaatacgaattcttaatagtgttagatatgaagcaaaataataatgaacaaatcgtcttcgagatgttcgaagaggttgcaaccgaaagcatcgctgaggctcggaatgcatacacctatgaagaaattgatgggtgctatttggaggcgaaggaaattgctgatcatgcaaggaagaacttgcaagagaaaataggaggtacataaaaacaaaactcccaccgaagcgggagtataggttttacaccttcggcaattactgccttattgtgataagatgtaggaaatcttattttctgctgcaaatataatacaaaaaatttgtttatccaataaaaaggttgtaattttacagaaaattaataattaagtatataaaactatagtagtatgactaaaatactaggaattgatacaggaaccaatagtcttggatgggctattgtggaaaaacaggcagatgaatatcatttgcttgataaaggtgtcaacatcttccaggaaggtgttaagatagaaaaaggtatagagtcttctaaagctgctgagcgtacggctcataaggcagcacgagtaagaaattatcgaattaaattacgtaaaattcgtctgcttcgtattttaagtgatgcacatttatgtcctccgctttcgaaagcagaactatctgcatggagactcaagaaggagtatcctaagaatgaattgtttatgcaatggcaaagtactgatgatgaatcagaaaagacaccatacgcttataggcataagtgccttcatgattgtttggatttcagcagtataactgatagatatattctgggtcgtgctttttatcacatgattcagcgacgtggctttttaagtaatcgtaaagatcagagtggtgatgatacaggaatggtaaaagaaagtatcagtaaccttactcaagagatgcatgatgctggttatgagtatcttggtgattatttttattctctctataataaaggagagaagatccgtaatcattatactgcacgcaatgagcattatctggcagagtttaaggctatttgtgaaaagcaggagttagataagaatcttggtcatgaagtggtacatcaaatagaaaaagccattttctaccagcgaccattaaaatcgcaaaaaggacaagttggtaaatgcgtatttgagaaaaacaagacaagatgtccttcttcacatcctatgtatgaagagtttagaatgctctcttttatcaataacataaagattcagactccaaatgatgatgtattacgccctctgtcttcagaggagcgagcactcattatgcctttgttcttccgtaaatcaaagaagttgtttgactttgaagatatagcaaagaaattggcacccaaaaaacaatatggtttttacaagaagagttctgatgccgaaatgccatatcttttcaattaccctatggatacatctgtttctggttgtcctgtaactaccgctttaaaagatatctttggagataattggatagattctctttgcgaaacctatacgctagccgagggtaaaagtcgtttgaatgtagtcaatgatatttggcatgtattgttcttctatacagatgatacaaaacttgcagagtttgctaagaatcgtctgcaattgaatgatgaagaagcaaggaaattttgcgagatttctttgccgggtgattatgcgtctttaagtttgaaggctatctgtaagattcttccttatcttagaagaggtttgatttattctcatgccgtattcttgggtaacttatgtgaagtgatgccgcaatatgaatgggatatagaagaaatgcgtaatgctgctattgagcatattatccacgaaatgaatcagattgattctaaagatgcacgtactttcgaggtttgtattaaggagtatctgaaggagcagtatcatgtatctgaagagaaacttaagaagttataccatccttctatgatggaggtatatcctagagtgcagcgcaccaacaaccatggtgtttatcagcttggttcacctcgaattgatagcgtgcgtaatccaatggctatgcgttctatgttcagattacgtaaattggtaaatcgtttgttggaagaggggaagatagattttgatactgagattcatattgaatttgctcgtgaattaaatgatgctaataagcgtaatgctatagctttattcacaaaagataatcaaaaaaagaatgatgaggctcgcaagaagattatagacataatggggaaagactatgatgttaaagatgacgacattctaaagtatattctttgggaagagcagggacatatctgcttatatacaggcaggcaaattgctatttccgactttgtcggaaatagtcaaaaatttgataaagaacatacgattccccgtagtgtaggtggcgacagtacaagaatgaatttgacactttgtgatagtcgtttcaatagagaagtcaagaaaactaagttgccaacagaattgcctaaccatgatgaaattatggctcgtattaatgactggagagaaaagtatgagtctcttgatggacaaatacgtaaattgaagggaaaatcaaagggggcaacaaccaaaaagcaaaaagatgacatcattagtaagcgtcatcttttggaattgcaacgcgattattggcgaggtaagtatttacgtttcatgatggagagtgtacctgaaggatttagtcgtcgtcaaggtactgatatcagtgtgatttctaagtatgctcgtctttacttgaaatctcttttcaagcatgtctatacagtaaaaggcattgctacctctgattttagaaagatctggggtattcaaaagacatatagtaagaaggaacgtgtaaatcatgtacatcattgtattgatgccattgttattgcatgtattggcttagatgaatataataagctgggatcatattatcatgatgaagaaaatcatgaatggtatggcatgtcaaaggcttattttaaaaagccatggcctacatttgttgaggatattaagaaggtgcaggatgaaatcttggtttatcattatacaccagacaatatgccaaaacaaggtcgccgtagaattatggttgatggaaaaaaagttttatctaaaggtgatgctgcaagaggatcattgcataacgatacctactatggagctatagagagtgatggtgttgtaaaatacgttaagcgtataaatttagcatcaatgaaggaaaatgatgtcaaaaatatcgtggatgatactgtaagaggtataattgaaacagctattaatgagaagggcttcaaagaagcgatgtctagtacaatatggatgaatgaagagaaacaaataccaattaaaaaggtaagatgttatgctacttctgttgctaagcctttgaatattcgccaacaacgagatgtttcatcaaaagaatataagcagcaatatcatgtcaccaatgatagtaactatttgcttgcattgtacattggtaaggataaaaaaggtaaggaaaagcgtgaatttgtgataattaatatgttgcaaactgcgcaatactttagaactagtaatgacaaagtagctgttggaaataatattgtgcctgtaaagagtgagcatgagtatccatttgcatattcattaaagataggaacaatggtacttctttacgaaaaatctccagatgagatatgggatgcttctctaacagagattaataaacgtctctataaagttgtgggattatctgcaatgagaatgaaaggacgaaatgttgattatgctacaataaagttgaaacagcatgaggatgctcgtctcagtacagaacttaaagcgaagaatggagcatttaagcaaggagaagaattgcgcccttcaataattatgctccatactcaactcaatgctttagttcaaggttatgattttgagataaatgaattaggtgaaattaaaagattaaagtgaaatgataaagcagacattattcttttcaactcctgtgtgtctttcgctcaagaattgccagattgtaatctcttggaaagatagcgttgacaaggtaacacgccctatagaagatatagggtgtgtagttttagaaaaccaaatgataagcattactttgccgcttcttaacgagttggtaaagaataatgttgctgttatcttatgtgataacaagatgatgccaacatctatgttgcaaagcttagatgctaatacaacgcaagctgaaagtttaaaatttcagcttgcagttactgagccaatgaaaaagcaggcttggaaacagattatagagtcaaagatagaaaatcaatccgcagtcttggctcttgttggtaagaataaagatgttctcaaaccttattataataatgttaagagtggagattcggataatagagagggattggcggcaaaggtatattggaacaagcttttcggtaactctttcaaaagagaaagagaaggatgtccgcctaatgctcttttaaattatggttatgccatattgcgtgcagccgtagcacgtgctttgctaggttctggtttgctccctaatttgggcatctttcataaaagcagatataatgcttttcctttagctgatgatgttatggaaccatatcgaccatttgttgacgaaatcgtttatcggctttatggaaatggaacaacagaactgaataaagaatcaaaaacagagattatgcgtgtgctgaattgtgatgtcaatatagggaaggttaaacgacctttgcagatagctttgaccatgacaacagcctctcttgtgaaatattattcaggagaaattaaaaaactttctttacctattataaaatgacagaaaatagacttaatgcgtatcatataatgtggttatttgtatttttcgatttgccagttacaactaaaaaagagatgaaggcagcttctctcttccgcaagaacttggagaaagagggtttctctatgatgcaattttcggtctatatccgtcattgtgcttcaagagaaagtttggatgtgcatgttaaacgggtaaaatcgttgcttccggaaacaggaaaagtaagtttgttgagtgttacagacaaacaatatggagatttctataacttttggggtaaaccaaaaagtattaataagagtaaaatatcgaaaaaagttatcagtgagcctattcaattggagtttttttagtacttttgcattggaaattatatcctgcacgccatttcttattagaagaagttattgttatacactggaaatcagtactttcaaatctataggttgtggtttgatgtaggaatcaaaagatatacaaccgcccaaacatcatatatgcagaggttatgttgtggtttgatgtaggaatcaaaagatatacaacgtgtgcctgcattcttccaacctgcctgagttgtggtttgatgtaggaatcaaaagatatacaacttggcgtagaatgaataaatcacgcctagagttgtggtttgatgtaggaatcaaaagatatacaacactacctaaaagcgtaagggcataaatcaagttgtggtttgatgtaggaatcaaaagatatacaactgcgtgccgacgttctcattattcactacggttgtggtttgatgtaggaatcaaaagatatacaacaggaaaatggttataagtactcacaagcggttgtggtttgatgtaggaatcaaaagatatacaacgaggtgttggatacaccagtctgtgctggcgttgtggtttgatgtaggaatcaaaagatatacaactgaatcatcagcaacattgacaagcttagagttgtggtttgatgtaggaatcaaaagatatacaacggggtgtgctgactggttcaaccgtatgcagttgtggtttgatgtaggaatcaaaagatatacaacttgtcatccttcaccttatcaatctcgaaggttgtggtttgatgtaggaatcaaaagatatacaaccgattagaaacatcgcaaagtgctccacggttgtggtttgatgtaggaatcaaaagatatacaactttagattaaaaagaacaacttatgcagcagttgtggtttgatgtaggaatcaaaagatatacaacacaacctcattagcagaagggacgaccatggttgtggtttgatgtaggaatcaaaagatatacaacgaatcatcagcaacattcacaaccttagagttgtggtttgatgtaggaatcaaaagatatacaactcgttgatgcagacgataacgtaatattaagttgtggtttgatgtaggaatcaaaagatatacaacgcctgggacgcatgggagaaatccaaagcggttgtggtttgatgtaggaatcaaaagatatacaaccccatatcttaaaaagaaaaaatcaaataagttgtggtttgatgtaggaatcaaaagatatacaacctgctcaagcaataaagggaagctactagagttgtggtttgatgtaggaatcaaaagatatacaacactacctaacagcgtaagggcataaataaggttgtggtttgatgtaggaatcaaaagatatacaacgcctgggacgcatgggagaaatccaaagcggttgtggtttgatgtaggaatcaaaagatatacaacgcaagtgggcaacacatacaaccgagtctgttgtggtttgatgtaggaatcaaaagatatacaacacaacctcattagcagaagggacaaccatagttgtggtttgatgtaggaatcaaaagatatacaactcttcgattactacggtatcaaagttaagggttgtggtttgatgtaggaatcaaaagatatacaactgaaactatatggcgccgatgaaatatcgttgtggtttgatgtaggaatcaaaagatatacaactttaagccagtttatacatcaaggaaaatagttgtggtttgatgtaggaatcaaaagatatacaactctatgaacacttctttgttgtcggaagctgttgtggtttgatgtaggaatcaaaagatatacaacagtatttattaatgagtactttcacggtggttgtggtttgatgtaggaatcaaaagatatacaacagtcaagcagaagtagatgcagctaacaagttgtggtttgatgtaggaatcaaaagatatacaacaaactaacaatgccaatgccggagctgctgttgtggtttgatgtaggaatcaaaagatatacaacagcttatcgtgagatacttacgacaggagagttgtggtttgatgtaggaatcaaaagatatacaacgaaaatgttcttggtactcctgtttctatagttgtggtttgatgtaggaatcaaaagatatacaacacagcactgctccttccacgcccactacaggttgtggtttgatgtaggaatcaaaagatatacaaccctttgttatcgttgcaagaaacgagcaggttgtggtttgatgtaggaatcaaaagatatacaacgagtccatttgtgccgtattcaccgacaagttgtggtttgatgtaggaatcaaaagatatacaacgaagcaaacacgaagtgtcactttcacccgttgtggtttgatgtaggaatcaaaagatatacaacattccgtgagccgagacaaggacgaaatcgttgtggtttgatgtaggaatcaaaagatatattatacaatgagaatggaatagggggtgctggcgcagtatcaggatatcttggaacataggcaagaaagagtcttgttctccacggtcttcaatcttttcaaaagaagaacggaaaagataaaagtatctctatcagtatatgatagtgcggtaaaatgtattgaggaagtggaatgtggcaaaagtactccgcaaaattattcttcggaactaagaaacaccatttgcccaatagataagaaaaacaatgctgatgtgacgataaggaccaacacgctatcttcgcctactacttcaatgctaactgttgttctgataatccttttccataacgcttagtttgaatgtttacgccacaaagatactaaaaatattgattacttcgttttttatacggagaaattttagcaaaagaaataaaacttatcgttaatttgtaagaaaaaagtggtttgtcggaatttccgacagaccactcaacatggtgccttagaggggaaaacacagagcctccaatctgcttcgcaaaaagtgcagaaattgagtgagattcaggaatgtttagcaaagaaattggcaaaatcgggctatttttctttatttaactccgaaattaagtggaatatcagagaaaatctttaaatttgcatttaaatacaatattttgtaaagaatggaagatagagaactattacagaaaagtgctccagagttcgaacgcctcgcctttacggtgttggctatcgaggcttcggcacaaaaaatgggtatatcgccgtctgaaatgagaaagcgattggataaggtggggctaatcaagagtctcattcaagattgctatgacactctacataccgagagccgggaagctgtagcaaatgatgtggtcgaagctcttaaaaattgggaaagaaaagaataatggaaaagcaaatattatatcaaggttcatattaagccaagagatagtagataagtatttgcaattcaaatcatatgaaaggatataattatgttggactttttattatggaataaaatcgctcgtatcataaagcagttagccgacacgctgcatatatctaccgacagggcattacagatattctatgactctgatgtttgccgtatgttacatgacaaagaacttggcttgcatctgatgagtgatacatatattgtaaatgacttgatagaagagctaaggaataagcaatagcaaaacaattgttgtggtgtcatcgttcccataagacaaaagacgccatagccttgtagcgtggtaactactataaataatggttcttctcaaattttggtacatttatgtatctaagtttgaggagacctttat

SEQ ID NO: 4216 - DNA, 17340 bp, synthetic construct
  source 1..17340: mol_type = other DNA
  misc_feature 1..17340: note = Synthetic
gcacctcattgtccttcaccatctttcggatggcatccatatccgtaatatccagataagtagtctccaggccctccacctgattgacatccgtaaagatataatgatcagtagtattcttgctaacgatacgcatctcattgccgagctgaccgttggcacccgtaactaatatattcatttctatttataatttacaattagacccacttttatcagcatttctcaaaagccccttcaagccctttttcaaaagccccttcaagccctttcaaaagccccttcaaagccctttttacctttttacttttttacctttttacctttaaaaaggactctcaaagtctttcagcatatcatgcttggtatccttttctgagagaatagcatgctctgtaggaatcttccagtcgatacccaagctctcgtcgaggatagagattcccccgtcagcctcaggatgatagaattcatcgcacttatactggaacacggcagtttcgctgagaacggcaaaaccatgggcaaaaccacgtggaataaagaactggcgatgattatcctcggtcagttccacagccacatgcttgccataggtaggagaacccttgcgaatatccacagccacatcgagcacggcacccttcacgcagcgcaccaacttagactgggtgaacggagggcgctggaaatgcagtccgcgcatcacgccataggacgacatactctcgttgtcctggcagaaatggataggatgacccagtatcggagccaccttctcgtcaaattcacgctgagagaaactctcgaagaaatagccacgggcatccttgaagatgcgaggctcaatgatgagcacgccatcaatatcagttttgattacttccatatcttagtcctttaaactgttctggtaccattcataaagtttcttcacaccatcctcgatttccacctgatgggtccaaccgagcgagtgcaacttgcttacatcaatcaactttcttggagttccgtctggcttagaagcatcaaactccaccgtaccctcgaagcccaccgtcttcacgatcagttcagagagttcacggatagtaagttccttaccagtacccacattgatgtgacagttgcggatttcaccgagcgaaggaatggcaccgccacgaccctcagaattgttacggtcaacggcaccgtccaccttggcaccatagaaaacagaactgtatttctcgataccgatgatgtccttgaaatctacattcaggagcacgtgaacgctggcatccgccatatcctcgctccagaggaactcacgcagcggagtacctgtaccccagagcaccaccttattattatatataccatagaactccaatgctttcaggatacgctcatgatcgttatgaccatccacgttgccctcgccgatgagttcgcgcagtttatcagtagggttgattggacgcttgttcatatccacctcaatactgtgccagtcgccctcatgaatcagtttagctaagtagatcttgcgcatcatcgcaggcattacatgactgttttccaagtggaaattatcattcggaccatagaggttggtaggcatcacagcgatatagttggtgccatactgcagattgtagctctcgcacatcttcagtccggcaatcttggcaatggcatactcctcgttggtatattccagaggagaagtaaggagcacatcctccttcataggctgcggtgcatccttcggatagatacaggtagagcccaagaagagcagcttcttcacaccatgactgtaagcattgctgatgacattacattgcatcttcatgttctgcatgatgaagtcggcgcggtagagcgaattggccatgatgccgcccacgaaagcagcagctaagaccacagcatccggacgctcctcatcgaagaatttctgaacggcatattggtcggtcaggtccagttccttatgcgaacggcccactaagttattgtaaccacgtttcttcaaattgttccaaatagcggaacccaccaagccatgatgcccagcaatgtaaatcttactatccttactcaacatttttacatcaaaaatttaagttattattttctccgtgcaaaattacgatttttctctcaaagaataaaaagttttagggatttattttgtatttatcgcattttgatgtatctttgcactacaaaaggaataaacataatgaaaatcaagacatttttaatcatcggatttgccaccttggccatgctttcctgccatcgtggtcccaagccaccggtatctcagcagaacttgcccatcagcatgtcaaaaccagccaagggcgacaaagctatctacggacttgcctgcatgggatgcacagactccgtaataatcatgctccccaatcagggcggcgatcctgtaaaatataatattctcgaagccaaccgcaaccgccaagtatttggcaatatcgaagtgggcgactggatctgcatcatccctgccaaggaaaagaataaggcaagcatggtcatcgacctcgacaagttgaaagccacctggacctatcaggtgatgcctcatctcagagatgtcacccacctctccaagaggcagcagcagcgcattctcgccaatatgcccgacagcatcgtggaaacctatatgattccgcgcgaatacggttttacgctcaagcgaatgggagaagcacgctccgtgggaatggtggcgaccaacagttcggtagaggacgacagtcctgtggaatatcctaaagttcccctttacacagagtggcacgcctacaacggcaagctgatcttagtgaaaggaagatacgagtttaacaatgtcgttttcaacgagaagaccacctacgacacgctttctttcgtctatatgaaggatgattcgctcgctctccgtgattctcggggcaatatccagagctatcaccgcaaggccaatgcgcggactgccaatgccgcagcccagaaagcagcccagaaagcagcggaaaaattcaaggaagaactcaaataaagttcatgcgttcatcgcttgaaatctgagagaaatccttgaaacaagactaaacgagatggagaatttccgaaaaatgagtaatacgacggaggcgttcatgttcgaactcctccgttttttcatgcgcccatatcgtatgaaatgggatatgaatggcagaagctcctatcttgagggcaggcgcaatgtcgctcttgaaactgttgcccaccatcaccaattcctccggcagcacgcccaactcacgacaaagtcggcgataagcttccggtttcttgtcgctcacgatgctcaccacatcaaaatatcgctgcagtcccgatcgccagagtttattctcctgatcctgcagttcgcccttggtaaagaccgccaacttatattccgtctttctgagttttgccagagtctcctccacctcttcgagcggtttggcatccagtctcagcagcgtctttcccaattccaccgctctgcctatcacgcgggcaggcacctttccgtcgctcaccttgatggcattttccactaatgagatggtgaacgccttgacgccatatcccaggtcctccatattgccgcactccgtctcaaagagtgccgcagaaatcacctccttgcttccatagtcagaaagcaagtcacagtactcagcctccacttcctcgaagtaagtctgcaaggcccagagggtgtcgtcggcatcaaaagcgattgccttgatatgatccagttttttcatatttctcatttctaatttctcatttctaatttgtaatttctcattatataagaaccccatctgcaaaaataatacttttccctgaactgacaaagaaaaacgcgcaacaatctgctaaaagcgactgctgcacgtccgtcattcattcaatcttaatagagaattacttttcagaaccaaaagttattatttacatcagaatatgatctctttttagaaacgagtcataaactctactacaatcttgtccttctcagaagtctttgccacaccgccgttgcgatagaaatacttctcgtagttgatacggatgtcagagatgaaaggcttggcaagactgagcgtcacaccaccagtcacacgatggcgcttatagtcgttgattttcaacacgccagggtcctcatccgtagccccatatcgggtgccatcactgtggtcgctcatgaaatcatatcttaccaatggagaaaccttcctgatcagacatttctggttggccaccggaatatcataacatacaaacccgtcaaaggcgtgcacatcatgaaacgcattcttggaataatgcttgaagagatactccacctcagcgatcagaccgccacgatggaaggtaatacccgcatcatacatattgacagtcacgtcagagggcttgattttctgcgtactcagcacgagattcacattcgggaagagaaactgcgccttggcagaatagttgatgcccttggtccagtaatccttctggttggtaagaccagagccgttgaacacacccgcattcacgatgatagggaaccccacgttccagatatagcccacctcagcaccgacatcacgcacattacccacctgcttggcgataaacgagcggttggcgaaatactgctgatgaggcgagcggtgcgcatcgatggtgaaaggcacacgttcctgaccgatagtaaactggagcgtactccatggtttgatacgagtataagcatcgagcatcttgattttgccctcatcgcagaggtcgatttccgccttgtagctcacctctttggtcacattaccagtcacattgatacgggcagttctcacttcgaagcgtccctccccttcctcggtctggaattcgtacttcgagcgtatcgtaccgccaatcttcggagtacggtcaacctccttcttttcatccagagcaaacaccgctgcagacatcatagtgcagagcagcaggaccattgtcttcttcttcatattcacattattaatatattagcacacatcatgaggccatagcctttattcgggtgcaaagatacgaagaatatatttctaacttacgacacggatgttacaaaatgatgaagaaagcccaaatcatatattccagacattccatgatatgaaacgttaccgatacatttttgccttttccctttgttatttcaaataaaatgattagttttgcagatgcaaagagtctgataagatattatcaccagaaacttaaaagaaagaaccatggcagaattgaaattatatccagtaggaatccagactttcgaggaaatcatcacccgaaatctgctgtacgtagataagacggaatatgtctatcgcatgactcatagcggtggcaaacatttcttcttaagccgtccacgccgtttcggaaagtcattgttggtttctacctttaagagttattttctgggaaagaaggaactcttcaaagggcttgccatcgaaaagttagaaaaggactggacggaatatcctgtcctacatttcagcatggctggcggtaaacacatggagaaggaccagctggaaagatacttgggaaaccggcttgcagaacaagaaaaagtatggggaatcaagactcccgctgttgatgcgaacgaccgtctcatcgcactcattcagactgcttacgaaaagaccggcaagcaggtagttgtactcattgatgagtatgatgctcccctacttgatgttgtgcatgaagatgctcatttgaaagatttgcgcaatgtgatgcgtaatttctatagtcctttgaaggattgcgaacctatgcttcgctttgttttcctcactggcatcactaaattttcgcagatgagcatcttcagtgaactcaataatatcaccaatatcagcatggatcatgagtacgctggaatctgcggtattaccaaagaggaattggagactcagatgtcagcagatgttgatgctttggcagtcaagatgaatctaacccgaactcagactcttgatgcattgcgagagttttatgacggttatcattttgcagctcagtcaccagatattttcaacccctatagtctgctgaatgctatggctgcaggctgtctggattattattggtttacttcgggcacacctacctatctgatagaaatgcttaagaaatttcaggtaatgccttcggaaattggaagttgcgaggcagacaagtcggagtttgatgtggctttggaaaatatgaattctattttgcctattctctatcagagtggatatatcaccatcaaaggctatgatccggaaactgagcttttcacgcttgatattcccaacagggaggttaagaaagcgtggatgtggcttgaagacatctatgcctatcgtaaagagaggcgtcaactttgatgtcgcttcgcataatatcacggattggaaaatagaagattatacataatggtgaaattggagtacccaaacatgcttattccaaatatttatactaactttgcgacaaaataaaaatatataaggagaatcgctcatggatagtaatatcacaaagaagaaaaatgccaagcgcgaatacatttatcgcaaacgcatcccttacggaatcatgaacttcgttaccgtgagaagagacgactgctattatgtagataagacagattttatagaagaaatagaaagatccaacatgtatttcttctatatccgccctcgtcgtttcggcaagagccttaccctctccatgctcaaacagtattacgacatcaatatggctgataggtttgaggaactgtttggaggattgtatatcggcgagaatcctacacctgagcataatacctatctgattatctcgctcaactttgccgtggtggatgccaatcttgagaattacaagaagggactcgatgcacattgcaacacagagtttaactacttctgcgatgtgtatgcacaatatctgcctgccaacatcaaagaagagatgaacaggaaggatggcgcagtagaacagttggactatctttgcaaggaatgtaagaagacaggacagaaagtgtatctctttattgatgagtacgaccatttcacgaatactatcctggcagaaccagactgtctcaacaattatcaggcagaaactcatggcatgggttatctccgtaagttcttcgacaccatcaagtcagctaccgattccaccttagagcgggttttcgtaacgggcgtcagtcctgttaccatggacgatctgaccagcggtttcaacatcggtaccaactattccctttcatacgagttcaacgagatgacgggcttcacggaagaagaggtgcgcgaaatgctcacttactataccgaaaccctccatctccacaactacaccgtggatgaattgatagacctgatgaaaccatggtacgataactattgttttgcaaaggattcatacggcgaaaccaccatgtacaattccaacatggtgctctatttcatcgataattatatcagaaaccgaggaagacttcctaagaatatgatagaggaaaacatccgactggattacaacaaactccgtatgctcatccgcaaggacaaggagtttgcccacgatgcctctatcatccagcaactggtagaaaacggctttgtggctggcgagctcaagaccggctttcctgccgagcagataggcgacccggataatttcgtgagtctgctctactacttcggcatggttaccatcgcaggaaattatcagggaaagaccaagttcgtgataccaaacgaggtggtgcgagagcagctgttcaaatacctcctcgacacatacaaggagaacgacttgaaatacgattcctacgaaaaaggaaacttagaaagcgccttggcatattgtggagaatggaagccttattttgaatatattgccgacagtctgcataaatattcatcccagagagatcatcagaagggagaatatttcgtgcacggattcacgcttgccatgacttgcgacaacaagttctaccgtccgatatccgaaaaggacacccaggaaggctatgccgatatcttcctctgtccgcttgttgacaacttcagcgatatgctgcattcctacattgtagagttcaaatatgccaagtctaaggataccgctgcgcatatagaacaactcaagcaggatgccatcagacaagtgaatagatatgcagaaagcgaagtagtaacttctgcaatcaagaccacgcagctacacaagattatcatagtgtataaaagcacggaaatggtggtttgcgaggaagtgaaataatcacaaggcgtacgctcctctgaacgagggaacgtacgccttgtttatttattccccccactccctttatcaaaatagggtgaatattccttcttcacgtcgaagcaaggacaggctttggcagaaaactcgttgtgaccatgaatggtaaatacggggaataattttgaccagaaatgactttggccaaatgaccaattgtagtatgcatcgccaagagacgttttggggatttatagcaactgaacctaatatctatattttttagttaaataacgttatcaaaaagttacactttaagaaataatttgtatatttgtcatcaaaaaaaaagaatcataatgacaaaagaccaatttccaattcgattacatgaagcaagaatgatgatgagactaagcatggataagctggtagagcgaacaggcggagccatcaccaagcagagtatatctcggtatgaaagaggcatcatgcgcccaaagagaccagcattgttggccttggctaatgccctgcacatcagtgaaaaatatttttggggaaccaatatagacatagatatgcctacgctacgaacaaatgcccatggcaaaatttcagaaaaagaactattggcattggaagccaaactttctttttgggcagagcaatatttagagaaggagcataaggcaggtttcagttccacctttaagaatcccgttttagggacaaaaatctcaactttggaggatgccatacaggcagccgaccttttacgagagaaatggtgttgtggtgacggtcctatagccagtgttcttcggttattagaaagaaaaggaatcaaagtgatgtctgcagaattgccagaatccgtttatggattaagcacctgggcaaatcacagatatcctctgatcgtacttgacatgaggcccagcaagactacggtagaaaagcttcgttatactgccatgcatgagttggctcatttgctcttttcatttcccgacaatccttcattatctttggagaagcgttgtgatttgtttgcaggttactttattctccccaagaagacatatatagaagagatgggaggaacccaaaggacgaatatatccttagaagaaatgatagatcttaaaaatgtctatggtttatcacttcgtgcattgattctcagtgcccgtgactttggcatcatagaaacagaatacaaacgatggtggtatgcagagtatctggaagataatccatgggaatcgagcttaggacattacgcttatccagaaacgataggtagagaaaagcgtattgattctattatcaatttaaaaaagatagagggggaaagaaataagtaaagtaaaatggaatagacatgaagataaaacagaagtatataaaaacaaaaaaatcccaccgaagcgggattataggttttacaccttcggcaattactgccttattgtgataagatgtaggaaatcttattttctgttgcaaatataatataaaatatttgtttatccaatataaaagttgaaattttacagaaaattaataattaagtatataaaactatactaatatgactaaaatattaggaattgataccggaaccaatagccttggttgggccattgttgagaaaaatgcagatgattatcatttgttagaaaagggtgtgaacatcttccaagaaggtgtaaaaattgaaaagggcatagaatcttcaaaagcagcagagcgtacggctcataaggcagcaagagtaagaaactatcgtattaaattacgtaagattcgtctgcttcgtattttaagtgatgcacatttatgcccaccgctttctaaagcagaactatcagcatggagactcaagaaagagtatcctaagaatgagttgtttatgcaatggcaagctactgatgatgattcagaaaagactccttatgcatatagacacatatgccttcatgagaatctggatttctgcagcatgacagacagatatattttaggtcgtgccttttatcacatgattcagcgccgcggttttttaagcaatcgtaaagatcaaaatggtgacgaaactggaaaggtaaatgaaagtatcagtagccttactcagcagatgcatgatgccggttatgagtatttaggtgattatttcttttttctatataataaaggagagaagattcgcaatcattatactgcacgaaatgagcattatttagcagagtttaaagccatttgtgagaagcaggatttagataagaatcttggtcctgaagtagtacgccaaatagaaaaagccattttcgaccaacgcccgttaaaatcacaaaagggccaagtaggtaagtgtgtgtttgagaagaataagacgaaatgcccttcttcacatcctatgtatgaagagtttagaatgctctcttttatcaataatattaagattcagacaccaaatgatgatgctttgcgccctctgactacagaggaacgagaacttattatgcctttattctatcgcaaatcaaagaaacaatttgattttgaagatattgctaagaaactggcaccgaagaaacaatacggcttttacaagaaaagtactgatgttgcaatgccatatcttttcaattatcctatggatacatcagtttctggtagtcccgtaacggcctctttaaaagatatatttggtgaggattggattaatggtctttgtgaaacctatacattagcagagggtaaaactcacttggatgtagttaatgatatttggcatgctttatctttctacacggataatgaaaaacttgctgagtttgccaaaaatcgtcttcaattgaatgatgatgaagcaaagaaattttgtgatatttctttgccaggtgactatgccgcattaagtttaaaagctatctgtaagattctgccttatcttagaagaggtttgatttattctcacgccgtattcttgggtaatttatgtgaagtgatgccgcaatacgaatggaatatagaggaaatgcgtaatgctgccattgataatattatccatgaaatgaatcagatagattctaaagatgcacgtactttcgaggtgtgtattaaagaatatctgaaggaacagtatcatgtatctgatgagaaactcaagaaactataccatccttctatgatggagatgtatcctaaagtacaacacaccaataatcatggtgtctatcagcttggttcacctcgaattgatagtgtgcgtaatccaatggctatgcgttctatgttcagattgcgtaaattggtaaaccgcttattggaggaaggtaagatagatcaagatacagaaattcatattgagtttgctcgtgaattgaatgatgctaataaacgtaatgctattgcagcatacacaaaagagaatcaaaacaagaatgatgaggctcgcaagaaaattaagtctctctttaaagacgaaactggtaaggacattgaaccatcggatatagatgttctgaaatatgtcctttgggaagagcagaagcacatatgtttatacactggtaagcaaatctgtatatcagactttattggatcaaatcctaagtttgatattgagcataccattccacgtagtgtaggtggtgatagtactaagatgaatttgactctctgtgacagtcatttcaatagagacatcaagaaaacccaattacctacagagttgtctaattatgatgagattatggctcgtattaatgattggaaagaaaagtatgagtctcttgatggtcaaattcgtagacaaaagaagttgtccaagggcgcttcaagcaaagagcaaaaggatggcattattcgcaagcgccatctattagaacttcagcgtgattattggcgtggtaagtatttgcgtttcacgatggaaagtgtacctgaaggatttagccgtcgacaaggaacagacatcagtgtgatttcaaagtatgcacgtctttatttgaagtccctcttcaagcatgtctatacagtaaagggtattgctacttctgatttcagaaagatctggggtattcaaaagacatatagtaagaaggaacgtgtcaatcatgtccatcattgtatagatgctattgttattgcttgtatcggcttagatgaatataataagttaggtgcatattatcatgatgaagaaaatcatgaatggtatggtaagtctaaggcctattttaaaaagccttggtctacatttgttgaggatattgaaagggtgcaagatgagattttggtttatcattatactccagacaatatgccaaagcaaggacgccgcagaattcttcttgatgtagagattaatggacgaaagaagaagaaaaaagttctttgtaagggtgatgcagcaagaggttcgttgcataacgatacatactatggtgctatagaagacgatggtgtagtaaaatacgttaagcgtattaatttgtctacaatgaaagaaagcgatgtaaaaaatattgtggatgagactgtaagaggtattattgaggcggccattaaagaaaaagggtttaaagaagctatggctggaacaatatggatgaatgaagaaaagcagattcctattaaaaaagtaagatgctatacaccttctgtcacaaagcctttgaatattcgtaagcagcgtgatgtttcaccaaaagaatacaagcagcaatatcatgttgtcaatgatagtaactatatgcttgcattatatattggtaaagacaaaaaaggcaaggaaaagcgtgaatttgaaattgtcaatatgttgcaaactgcacaatacttcagaacaagtaatgataaagaagctgcaggaggaaatatagtgccggtaaagagtgaacatgattacccatttgcatattctttaaagatcggcacaatggtacttctttacgaaaaatctccagatgagatatgggatgcttctctaacggagattaataaacgtctctataaagttgtgggattatctgcaatgagaatgaaaggacgaaatgttgattatgctacaataaagttgaaacagcatgaggatgctcgtctcagtacagaacttaaagcgaagaatggggcatttaagcaaggagaagaattgcgcccttcaataattatgctccatactcaactcaatgctttagttcaaggttatgattttgagataaatgaattaggtgaaattaaaagattaaagtgaaatgataaagcagacattattcttttcaactccagtttgtctttcactcaagaattgccagattgtaatctcttggaaagatagcaatgacaaggtaacacgccctatagaagacatagggtgtgtagtcttggaaaatcaaatgataaacattaccttgccgcttctcaacgaattggtaaagaataatgtcgccgttatcttatgtgacagcaagatgatgccaacatctatgttgcaaaacttagatgctaatacaacgcaagctgaaagtttaaaatttcagcttgctgttactgacccaatgaaaaagcaagtttggaaacaaataatagaatcaaagataaaaaatcaagctgctgtcttagctcttgccggaaagaataaagatattctcaagccttattataataatgtaaagagtggagattctgacaatagagagggattggctgccaagatatattggaatagtcttttgggtaactcctttaaaagagaaagagaaggctgttctccaaattctcttttaaattatggttattccatattgcgtgcagctgtagcccgtgctttacttgggtctgggttgcttcccaatttaggtatcttccataaaagcagatataatgcttttcccttagctgatgatgttatggagccatatcgaccatttgttgatgaaatcgtatatcgactttatgaaaatggaattacagaactgaataaagaatctaagtcagaaataatgcgtgtattgaattgcgatgtcaatatagggaaagttaagcgacctttgcagatagctttaaccatgacaacagcctctcttgtgaaatattatacaggagaaatcaagaaactttctttaccgttgataacatgacagaatatagacttaatgcttatcatattatgtggttgtttgtattttttgacttacctgttaccacgaaaaaagagataaaagcagcaactctttttcgaaagaatttggagaaagatggtttctctatgatgcaattttctgtttatattcgtcattgtgcttcaagagaaagtttggaagtacatattaaaagaataaaatccattcttccggaatcgggaaaagtaagtttattaagtgtaacagataaacaatatggtgatatttttaatttttgggggaagcctaaaagtataaataaaagtaaaattacccaaaaagttataggtgaacccattcagttggagattttttagtatttttgtattgttttacttcctactttgctatttcttattaatgaaagtgatagtaatatgctgattatcagctatatcaacattataggttgtggtttgatgtaggaatagtacgatatacaacaaataatttttagaacggatgaatccgttgttgtggtttgatgtaggaatagtacgatatacaactcaaaaatacttaaaccactgtcttcaaagttgtggtttgatgtaggaatagtacgatatacaacaaactgatcctcagactgatcacctcgatagttgtggtttgatgtaggaatagtacgatatacaacaaaatcgaggtaagatgttctacggatcggttgtggtttgatgtaggaatagtacgatatacaaccgtaatcaccatcaccggcagcaacggacgttgtggtttgatgtaggaatagtacgatatacaacaaattgttttatctttgcgttcgaaatcaagttgtggtttgatgtaggaatagtacgatatacaacgagtggttcattctttagggtacacctaaagttgtggtttgatgtaggaatagtacgatatacaacattgggcacgtggcaacacgccattaaaagttgtggtttgatgtaggaatagtacgatatacaactgtacggaaagatttcgaactgcaacgcagttgtggtttgatgtaggaatagtacgatatacaactttgagcgttaacacctcgcttaataatgcgttgtggtttgatgtaggaatagtacgatatacaacttaaaatatttttcaactctttcattatagttgtggtttgatgtaggaatagtacgatatacaacgtacataaattattaaatctcataaattagttgtggtttgatgtaggaatagtacgatatacaacgaagaagatcagaacgttttaggtttataggttgtggtttgatgtaggaatagtacgatatacaactcaaacttgttcatcttagtattccaagcggttgtggtttgatgtaggaatagtacgatatacaacttgagtaaacgttagaatcagatggcaaagttgtggtttgatgtaggaatagtacgatatacaacccaccatgacggataaatgtagtatcatggttgtggtttgatgtaggaatagtacgatatacaacttgcggaaaatcagaaggagtgttaaggtagttgtggtttgatgtaggaatagtacgatatacaacatgtatataatctgccattgttacaggaggttgtggtttgatgtaggaatagtacgatatacaactatcccaaagatttcaagtggactggatgggttgtggtttgatgtaggacatgaagataaaaatcaacaggtcatagaacatgatcaagttgatgttataaacaatatagaacctctcattaaagtaataagagggcatcaagtatgcttgaccgtgaccttgcaagattatatggggtagaaacaggacagttgaatagacaagtgaagcgtggctacaaacgatgactaaagcctccttgtaaccacgcttttatattctctatatcaaacaaggaacgtacccttgtttatttattccccaccccctttatcaaaatagggatctaattccttcttcacatcgaagcaaggacaggctttggcgaatctgtccctcgccaccaatattacttgaaagcgcaccattcgccagcatcatgcatttctatattcgtaaagagatccaccacatcacccaagcggcgcttatccagctcctaacgggcgaaattcttaggtaaaaatcccttccgtctttcgttttcacgctcgatggcagtcagcgcatcatctattgccattttctatctatttatattataataaggtgatatagtatctatttgaaagctaaaaaattcctgtctccgcgctaaaaacacgcacagaaaagccctttttagtgattttttcttcatttccctgcatttgctccacagaaaatgaagaaatctgaaaacacgaaaagggcgaataccaacacctgaaacacgctgatattcgcccttcgatatacacataatcctggagagtatttttgacggctcaaacaccatcacaattaatgcactgagtatcaaatggttatacatataccttatcgattattttttctattttaagttttagattgcttgtggatttccccactaagcatttacaagaaacaaaggtataaaaaataaggaaaacaccaaatttaatgccttctttaacggaaaaagttatttttgaggctatttttgcgatttaagaccctcgaaaatggcgaaaaaatgaagcagaaatgcaaaaacaagtaccccaaaatgcagttttagtaaagaaacacaacaaaatgataggcaagaaatggatatt

SEQ ID NO: 4217 - DNA, 17278 bp, synthetic construct
  misc_feature 1..17278: note = Synthetic
  source 1..17278: mol_type = other DNA
gagaacgtcaccctcaagcagaagcaagcctaccacggcctctatcgctcgctcatccacaacatggtggtcggcgtcagccagggctacacccgtgagctggagcttgtcggcgtaggttaccgtgtgagcaacaagggaaatctcctggagttcgctctcggttacacccaccccatctacttcatgcttcccaaggagatcaaagtcgagaccaagtctgaacgtaaccagaaccccctgatcatcctgcagtcctgtgacaagcagctcctcggtcaggtgtgtgccaagattcgtaccttccgcaagcccgaaccttacaagggcaagggtattctcttcaagggagaggtcatccgcaggaagtctggtaagtcggctggtgccaagtaacagtaactctaaaatagcgtaatcatgacaacgaaaatagaaagacgaatcaagattaagtatagagttcgcaacaagatctccggaactgcagagcgtccccgcatgtcggtgttccgcagcaacaagcagatctacgtacaagtcattaacgacctcaccggcaccactctttgcgccgcttcctccctcgggatggaggcatgccccaagaaggagcaggctgccaaggtgggtgaactcatcgcaaagaaagccctcgaggcaggtatcaccaccgtggtcttcgaccgcaatggttacctctatcatgggcgtgtgaaagaagttgcagatgcagcacgtaaaggtggacttaaattctaaatcattatggcaatcaagaatgtaaagatcaatagcgatgtagagttgaaggaccgcctcgtagccatcaaccgtgtcaccaaggtgaccaagggtggccgcaccttcacgttcgcagcaattgtagtagtcggcgacggcaagggaatcatcggttatggcctcggcaaggccggtgaagtcactgccgctatcgctaagggagtggaagccgccaagaagaatcttgtgcaggttcccgtcctcaacggcactgtgccccacgagcaggctgctcactatggtggcgccgaagtgctcatcatgcccgccagcaccggtaccggtgtggtggccggcggagctatgcgtgccgttctcgagagtgttggtatcactgactgtctggccaagtccaagggttcctcgaacccccacaatctggtgaaagccaccatcgcagccctctctgagatgcgtgatgcccgccaggtggcacagaaccgtggcatcagtgtagagaaagtattcagaggttaacgaaggaggttcaagactatggcaactatcaaagtgaagcaaatcaagagccgcatcggcgcccccaagaatcagaagcgcacactcgacgctatggggttgagaaagctgaatcatgtcgtggagctggaagatactcccagcgtccgcggtcagatccagacggtacatcacttggtgaagatcgtcgactaagctttccacaagtaaacattaaactctaaactctttaaccgacacacgattatgaaattaaatacattgaaacccgcagctggtgccaccaagtcacgcaagagaattggtcgcggtcccggttccggcctcggtggaacctccacccgtggtcacaagggtgccaaggcacgttcgggttataagaagaagattggtttcgaaggcggtcagatgcctctgcagcgtcgcctgccgaagttcggcttcaagaacatcaaccgcaaggagtaccagcccgtgaacctcgcacagctccagaagctcgccgagcagggtctggagaagatcggacttgctgaaatcgtagccgcaggactggccaaggctggtgagctggtgaagattctcggcaacggtcagctcaccgcaaagatcgaagtcgaggctaatggcttctcgaaaactgctgaagcagccatcacggctgccggcggaagcgcaaaaacactctaagaaccctaaggacttatgaaaaagttttttgcaacactgaagaacatctggatgattgaggaccttcgcatgaagatcctcttcaccgtggcttttgccgccatctatcgttttggctcatttgtggtgctcccgggcatcaatccgagccagctcgtagcattgcgcgagcagaccagcgaaggtcttatgagcctgctgaatatgttctcgggaggtgcattctccaacgcgtctgtttttgcgctgggaattatgccttacatcacggcctccatcgtcatccagctgctggcagtcgctgtaccttatttccagaagatgcagcgcgagggtgagagcggccgtcgtaagattaaccagtacacccgttatctgacgatcttcatcctcctgttccagggccccggttacctcgttaacctgcgccacatgtcaggcggtgccctcagccccgccctcgactggacttggttcatgatcacgtcaaccatcatccttgcagccggcagtatgttcatcctatggctgggtgagcgcatcactgacaagggaatcggcaacggtgtatctatgatcattatgttaggtatcatcgcacgcctgccgcaggccttcggtcaggaggctgtcagccgtctgaacaacctcaacggtggcggtctggtgatgttcctcgtcgagctcgtcatcctcttctgtgccgtcctcgctgccatcatgctgacccagggaacccgcaaggtccccgtgcagtatgctaagcgcgtcatgggtggtggacagcagattggcggtgcccgtcagtacatccccctgaagctcttcgctgccaatgtgatgcctatcatcttcgcccaggctatcatgttcctgcctatcacgctctacggagcactcagcgacggacagaacccctcggcactgatgattgcgctttccgaccacaccagctgggcatataacctgatgtttgccgccctcatcatcatcttcacgtacctctacaccgccatcaccatgaaccccgttcagatggcagaggatatgaagcgcaacaacgggttcatccccggcgtgcgccctggtaaggacacggcagactacatcgacaacgtgatgtcgcacatcatgctgcccggctccctcttcctggcgctcattgcctgcatgcccgctttcgccggcctgctgaatgtgcagccggaatttgctcagttcttcggcggcacctcgctgctcatcctcgtgggcgttgtcctcgacaccttgcagcagatcgagagccacttgctcatgcgccattacgacggcctgcttgagtccggccgcattcatggccgcggtatgagtgcctactaaaccaaacgcgatctatctctaatgatatttctgaagacagaggacgagattgagctgatgcgggccgccaatctgttggtggccgcgacgcttgccgaagtcggacgagcagtccgcccaggcattagcacagctcagctcgaccgtctggccgacgaatttatccgtgaccacggagctacgccgaccttcaagggtttccccaatccctacggagggcccttccctggcagtatctgcacatccgtcaacgatgtggtggttcacggcgtaccttccgaggccactgtgctgaaagatggcgacatcatttccgtcgactgcggcacactgctcaatggctacaacggcgacagctgctacaccttccaggtaggcgaggttgccgaagacgtccgtcagttgctgcgtacgaccaagcagtcgctctacgagggcatagcccaggcagtagccgggcaccgcattggcgacatcagctatgctgtccagtcctactgcgaagcccagggctacggcgttgtccgtgagttcgtcggtcatggaatcggccgcgagatgcacgaagacccccagattcccaactatgggactcgcggtcagggcaagcagataaagaacggtctatgcatcgccatcgagccgatgattacccaggggagccgtgaggtctttatggccgaagacaagtggaccatctacacgcgtgaccaccggcccgctgcacatttcgagcacaccttggccgtccaccacggaaaggccgatatcctctcctcttttgaggaaatagaaaagttggaagcacaacgtaaccagacattataaacagatcacaactgatacgaagtatggcaaagcaatccgctattgagcaagacggccagattatggaggctctttccaatgcgatgttccgcgtcgaactggagaatggccatcagattacggcccacatctccggcaagatgagaatgcattatatcaaaatcctgcccggcgacaaggtcaaggtagaaatgagtccttacgacctgtccaagggacgcatcgtattcagatacaaataatttagaaaagatatgaaaacaagagcatctttgaagaagcgcacccccgactgcaagatcgtacgccgcaagggtcgcctgtatgtgattaacaagaaaaacccgaagttcaaaatgcgtcagggttaacgtaaaacgaaaacgtaaatcgtaatttcaaaatatggcaataagaattgttggtgtcgatttgcctcagaacaaacgaggtgaaatcgctttgacctacatctttggtataggtcgcagtagttcagcaaagatcctggagaaagccggtgtcgataaggacgtcaaggtcaaggattggaccgacgagcaagccggtaagatccgtgaggtcattgctgcagagtacaaggtcgagggtgaccttcgtaccgaaatcactatgaacatcaagcgcctgatggatatcggctgctatcgtggtgtgcgtcatcgtcatggtctgcccgttcgcggccagagcacgaagaacaatgcccgtacccgcaagggcaagaagaagaccgttgcaaacaagaagaaggccacgaagtaattgaaataattgaaaacagaaaattcatatggcaaagaaaacagttgcagctaagaaaagaaatgtgaaggttgacgccctgggccagcttcatgtgcacagctccttcaacaatgtcatcgtttcgcttgccaacagcgaaggacaggtcatttcctggtccagcgccggcaagatgggatttcgcggttccaagaagaataccccctacgccgcccagatggccgcccaggattgcgccaagatagcctacgacctcggcctccgcaaggtaaaggcctatgtcaagggtcccggcaacggccgtgaatccgccatccgcaccattcacggtgcaggtatcgaggtcgtcgagatcatcgacgtcaccccgctgcccttcaacggatgccgtcctccgaagcgtcgtagagtttaataatgggcgttatatcgtataacgtgatattctaagtaacgaaaacatttaaatagattatggcaagatatacaggtcccaaatctaagattgcccgccgtttcggcgaggccatattcggtcccgacaaggtgttgtccaagcgtaactaccctcccggacagcatggcaacaaccgccgtcgcaagacctccgagtacggagtcatgcttgctgagaagcagaaggcaaagtacacctacggcgtactcgagaaacagttccgcaatatgttcgagaaggcagcccgcaccaacggcatcaccggtgagattctcctccagaacctcgagtgccgtctggacaacgtcgtgttccgtcttggcattgctcccactcgcgccgctgcacgccaactcgtcagccaccgccacatcgttgtcgacggaaaagtcgtcaacatcccctccttcagcgtcaagcccggccagattgtcggcgtgcgcgagaagtccaagtccttggaggtcattgctgcagccctcgccggcttcaaccacagcaagtacccctggattgagtgggacgaggctcagaaggccggcaagctcctgcacaagcccgagcgcgcagacatccccgaaaatatcaaggaacaactcattgtagaactctactctaaataaaaactgattatggcgatattagcatttcaaagacctgacaaggtgttaatggtggaggccgatgacaaatacggcaagttcgaatttcgtccgttggagcccggcttcggtattaccgtcggcaatgcacttcgccgtattctgctttcttccctggaaggttatgccatcaataccgtacgtatcaatggcgtagagcacgaattcgcatctgttcctggtgtgaaagaagatgtcacgaacatcattcttaacctcaaacaagtccgcttccgccaggtcgtggaagaattcgagaacgagaaagtcagcgtcaccgtcgagaacaccaccgagttcaaggccggcgacttcaataagtaccttaccggattcgaagtattgaaccccgagctcgtcatctgtcacctcgatgccaaagcctccatccagatggaaatctccatcaacaaaggccgcggctacgtgccctctgaagagaatcgagagttctgcacggatgtcaacgtcatccccatcgactccatctacactcctattcgcaacgtaaagtacgccgtcgagaacttccgcgttgagcagaagaccgactacgagaaactcgtcctcgaagtcactaccgatggttccatccagccgaaggacgccctcaaggaggccgccaagatcctcatctatcacttcatgctcttctccgacgaaaagatcaccatcgagaacgtcgacaccgagggcaacgaagaattcgacgaggaaatcctccatatgcgccagcttcttaagaccaagctcgtcgacatggacctctccgtgcgcgccctcaactgcctcaaggccgccgacgtcgagacactcggagacctcgtgcagtacaacaagacggatctgctcaagttccgcaacttcggcaagaaatcgctcaccgagcttgatgatttgctcgagagtctgaatctgtcgtttggaaccgatatttcaaagtataaattagacaaagattaaaatttcctatgagacacggaaagaaattcaaccacctgggccgtactgcatcccaccgcgatgccatgctctccaacatggccacctcgctgatcatgcacaaaagaatcactacgaccctcgccaaggccaaggccctcaagaagtttgtcgagcccctggtcaccaaggcaaaacaagataccaccaatgcacgtcgcgtcgtcttctctcatctgcagaacaagtacgccgtgacagaactcttccaggtcgttatgccgaaagtcggcgaccgtcccggcggctacacccgcatcatcaagaccggtttccgtcagggcgacatggctcccgtctgcttcatcgagctcgtagacttcgatgagaacatggccaagacccagaagaaggctacgcgcacacgccgcagccgcaagtctgcagcagcacccgccgctgaagctcccgcaaccgtcgaggcagcagaggctcccgccgctgaagacacccccgccgaggcacctgccgaagcaaccaacgaataattctttattgcacatacaagcgagaagggcaacccgtgagggctgcccttttcagtcgtatatcctattatcatttccgacgcttcgtgtgaagagaatctcacttcattatggtttcacacccgtaatcgtagcgtacgaaggtttcttgcggtacaactccgtatgaatgaaacccgcagcatcaagaaaatccttcagctgctcaggtgaatagaccgtcatgcccccgaccatatcagtccacacggaatcgccttccaccacttccaccatgatgacgaagcgtccgccgcttttcagcacacgcccgacctcctgcagacaatggctaaggttcggccagaaataaacagtctccacagccgtcacgaggtcgaacttctcatcgtcgtatggcagtttctcggctgttccccgacagacaaacacgcgcttgttgagcatgtcggcattcacctgacgggccttcgccacgctctcttccgagatatcaataccatagacacacgcgccatcactacgtttgagtagtcgtttcagcgtggcgcctccaccacagccaatatcgaggatggtcatcgccggacgaaaagccaccagactcaggccccagttcgtcagcggagcgtgtccaaagttcataaaccgcagcatcagccgtcctaaagtaccctcaggccttgcgcactgagagaagaaagatttcaatagttttttcattgtattatctgttttaagtcctgaatgtaattcttgctttccggctgcaaaggtacgacaaaaaaagcgattgcacaatacccagaaatgacgattttaacaatcggcaagcattaacaaacagcaacgaaaagccccaacgggacagccagcagtggctggaggtcatcgagccgctgtcgcggtggtggagatgacagaatggtactgaaatgggctggaacagtacgggaaatgaaaaaagagggagattgtaccgcgatatgaaacagtgtccatgtaaaataattctgaatacctacttaattgggatgcatctttcaaatgatgcagagccgcacttttgctactctatctatgctgctactaattcttcccctaatttgtgaagatgttcaaggatttcacgttcacgttcttttgacggctttttgaatccgtttatataattccgaagcagcgtgggattcaagcctgctcgacgagcgaactcagcaacattgatttccttatgggttaagaagaaacgctgcagggcacttggctctgcatcttcatatccgaagctctcgaaactgatgtcctcatccagctcacgccaatgaataccgtcgaaaccaaacatgtacttgctgcgctcctcatcattagcctgacgcagtctgggataccacagcaacgattgcttatgctcacgtccctcttcgtctctgccgtaaatataatcggcatcaaaccaaatctctttaatcttcatacccagtcctccttattattcaaaatattctttccaacgttttacgataatatcagcattctcatctataaccttcttgatcttcttatagtcgtttgtcttgattccttgtttctcaaacaattcgaactcagcaccattccatataaactaggccataccgccgttaccctctacatgaatgtgtagtggctcgtgctctttactataaaagaagaacgagaatccgtagaatctgaatacttctggcatattttccttgcttttatcgttttcttggcgcaaagataggaattattttcgatacccgcaaataattgagccactttttctgttcatcaccttctacaatcctgattccttcaaaaaacgattccgtttttcgaggtaagacttcgcagaagacatggttaaggtcactgaacatcaacccaaccccacttacgaggaagagtcgctttctgtggcagggctgggataaggctctggatctcacgcgtcagcagccaccatgaatcttgtcatttcttgattttgttttggatgatttcttctcccaactgtttgcgtaataaatcattttgcaacatgttccagagttcatcatctaatgaggcgtaacttatattctctttcaaccattttgtcgaaggagttatcccccatattttttctgagattgtaccgcgatatgaaacagtggggggctttgcggcgtgatttcaagataatggctcgcgtccgggaaatgaataaatggcaaacgacgttgagctgattcacctaccgggatgactgcataaaaaactcccaccgaagcgggagtataggttaaaaaccttcggccaaaggccttattgtgataagatgtaggaatcttacggcacaaaagtagtggattattttggtacatggaaattttgttgtatctttacccccaaatttaagacaatttaatattatggagcgtattttaggtatagatactggaacaaatagcctgggatgggctattgttgagaaagagggtgactcttatcgcctccttcacaaaggtacgaacattttctcagaaggtgtgaagattgagaaaggcattgagtcctcgcgtgcagcagaacgcactgagcacagggccgtccgtcgtcactattggcgccggaaggttcgtaagatcagccttttgaaaattcttattgataatcatctgtgtccttctattcccaaggaaagcttacgcgagtggcgcttgaagaaagtctatcctaaggacgaggctttcatgagctggctgctgacagaggataagacaggcgtgaacccctatcacttccggtacttgtgcttgacccagaaacttgacctctcaaatcctacacagcgttatatcctcggacgtgcgctgtatcacttgaaccagcgtcgtggcttcctgagcaaccgcaaggaaacgaccaaggcttcggagggcaacgtgagtacgggtatcagtgaacttacagcagagattgaagctgccggttgcacgtatcttggtgagtatttctatcatctctacgagaaaggtgagaagattcgcaaacattatacagcccgtaaggaacactatctgaaggagtttcgcgctatttgtgagaaacagtgtctggatacagcgctcgcaaacaagttggaggaagccattttcagccagcgtccgttgaagtctcagaagggacaagtaggaacttgcacctttgaaaaaggcaagccccgttgtccgatatcacatcccttgtatgaggatttccgtatgtatgcatttttgaataatgtcaagatccaaactcctttcgatgcagaattacgacctttggacaaggacgagttgcagaaggtcatgcctttgttcaagcgcaaatccaaacgaagcttcaactttgaggacatcgccaaaaagctggcccccaagaatagctactgcttctataaagacaatgagcagaagccctatcgcttcaactacccgatggatacgtctgtttccggttccattgtcaatgcacaattggaggatatctttggcgagaactggctggatgccgtctgtgaagtttatacgttaggtgcaagcaagagccgtttggaaatcctgaatgacatttggcatgccctcttcttcttcgatgatgaggacaaactgaaggagtttgctatgaaccgcctacaactttccgaagaagacgccacgcgtttcagtaaaatttcgataccccaggactacgcttcactgagtctcaaagccatctgcaagatactgccttatatgcgtgattatggcttgatttactcacatgccgtcttccttggaaacttgaaagaggtgcttccttctcatgtgtggggtgttccgcaaatgagacaggcggcgatagagaaggtgatagaggtgctgttctctgtgcagcagacctccgacagccgcactcaggagcagagtgtgaaagaattccttaaagagcgttatcacctggacgacaaggcggttaataagctctatcatccatcaatgatagacctctatccccgcgtccgtcccaacgacgagggcttgtatcagttaggttctccccgcatcagcagtgtgcgtaacccgatggctatgcactcgctcttccgcctgcgcaaggtcgtcaatctccttttgcagaaaggatatatcgaccacgagacgaccatacatattgaattctcccgtgacctgaatgatgccaaccgccgctgggccatacaggcttggcagcgtgagaacgaaaaagaccgtgaacgttgcaagaaggagatagagaaactcttcaaggaagctacgggcagagattctgttgagatatctgatcgcgacatcctcaaataccagctttgggaagaacagcatcacaaatgtctctatactggggaggaaatagggctgacagatttcctcggcgaacatcccaagtacgacatcgaacacacggtaccacgcagcgccggcggcgacagcacgaagatgaacctcacactttgtagcagtcggtataaccgtgaagtgaagaaaaccaagctacccacagaactcgcagaatatgaagctattctccaacgcatcgaggagtggaaagaacgctacgaagacctcgaccgtcagattcgtaagacgaaaggaatgccatcagccaccaaggaggagaaggacaagaaaatccggcgtcgccatcttcttacattacaacgcgattactggcgtggcaagtacaaccgtttcacgatgactgaagtaccagaaggcttctcgcgccgacagggtacagacattagcgtcatctcgcgctacgcccgcctttttctgaaatccgtcttcccgcacgtatatatagtaaaaggtatagccacctccgatttccgcaagatttggggcatccaggaagaatacaccaagaaggagcgtgtgaaccacgtccaccactgcatcgatgccatcaccattgcatgcatcggtcctgacgaatacgctaagttagcgcagtactatcacgatgaggaaaaccacgaatggtacgggaaatcgaaaggacaaatcacccctccctgggctaactttgttgaggacatccacaagattcaggatgagttgttggtggcacactatacggaagataggatgcaaaaacgtgcaaagagatatgtccgtacggctaaaggtaaagtcctgacagcaggcgattcagctcgcgcctcattgcataacgacacctattacggtgctatcagcgtgggtgatgaaatcaaatatgtcgtccgtcggcctttggatgctttggaagagaaggatataaagaatatcgtggatgaggttgtgcggaagaagatagaagacgcgattgtaaaatatggaaacttgaaggaggcattagagcacaccatttggatgaacgaggagaaacatattcctatcaagaaggtacgtgtgttcactccttctgttacccgtcctttgaatatacgccagcaacgcgaccaatcgcgtcatgaatacaagcgtcaatatcatgttcaaaacgaccgtaactatatgatggccatttacgttggtcagaatgagaaaggaaaggagaaacgggattttgaactcgtcagcaatcttgcagccgccagtcgttccaagaagagcggaggtgtccagcaacctttggcgccgattgccaagaacggactcccgttggtctatcaactgaaaataggaacgatggtgttgctctatgaaaagagtcctgaggaaatctggacggcgagtcaaaaggagatgcagaggaggttgtataaggtgacggggttgtcatctttggtaatatcttcttaccactatggaacgattgtattggtacatcatcaggaggcaagaccaagttcggacgttaaacagaagaatggtatatttatttctggtgaggattttcgctcttcaatcaaactttatcacactcaattcaaggctcttgttcaaggcttcgactttcaaatcaatgaccttggagaaatacatcgtctaagatgataaagcaaactctcatgttcacattaccagcctcgttgagtttgaaagacaatcaaatagtcattcagctcaaaggggcagagcaagttgtgacgcgacctatagaagacatcggcgtggttgtggtcgaaaatgcacaggtcaacttaacagtcccgctacttaatgcattggtggataataatgtctctgttgtattttgcgacaacaggcagatgcccaaatccatgctgatgtgtttggacggcaatacaacattgcaagaaagttaccgctatcagatagatgcaactcaacccaccaagaaacaattgtggaagcaacttgtagaaagcaaaatacgcaaccaggcagcattgcttcgaaagcttgataaggatgcagaagcgttgaaaccctatttcatgaatgtgaagtcgggagacacggacaaccgtgagggcttggcctctcgcctctattggcctttgctgatgggagacgatttccgtcgagaaagggaaggtccccctcccaaccagatgtttaattatggttattccatactcagagctgctgttgcaagggctctgattggttctggattatatcctgcttttggcttgttccatcacagccgttataatgcattcccgcttgcagacgatgttatggagccataccgcccttttgtcgatgagatcgtctatcgtatctatttcgatggtgccgcctcagagcttgacaagcagagtaaaagcgaactgctcagagttctctttgcagatgttcagatggggaaattgacacggccgttggaagtagcactttcaatgacaacagcctcattgttgaaagtcctgaaaggagagcaggaaaaactatctttacctgtgcttgcatgagtgagatacgactcaacgcctaccatattatgtggttatttgtgttctttgacttaccggtaattacaaagaaagagcgtaagatcgctgcactgttccgtaagaacctgatgaaagacggatttgtaatgcttcagtactcggtgtatatccgccattgtgcctcgtatgagagtcagcaagtacacattaaaagattgaaagcacttatcccagaatcaggtatggtgagtattctttctgtaactgacaagcaatatagcgacataattaacttttggggtaaggaaaagaagaaaaatacaccttcagaacccatgcaattggaattattttagtaactttgcaccaagaaataaatcttcatcaccacttcttgagcgttattcgttgtataaacaattcatactcaataatattaaaaccttaggttgtggtttgatgtaggaaacagatgataaacaactggtgtaagtggggcaactgcaagcacctgttgtggtttgatgtaggaaacagatgataaacaacctgtagctgttgccagggacgataccgcccgttgtggtttgatgtaggaaacagatgataaacaactacgaaagaacgggtattgatggccgttagttgtggtttgatgtaggaaacagatgataaacaactatctttgatttttacaaagattactttggttgtggtttgatgtaggaaacagatgataaacaacttcggtagcgagccgcgcgaggtttttggtgttgtggtttgatgtaggaaacagatgataaacaactccaaagttgatttaagcgaataataactgttgtggtttgatgtaggaaacagatgataaacaactataattgtaaacattattctcagaaggtgttgtggtttgatgtaggaaacagatgataaacaaccttatgaaaatggaactttcattccccaagttgtggtttgatgtaggaaacagatgataaacaacaatcagtgagaaaagcaccagttaactctggttgtggtttgatgtaggaaacagatgataaacaacagtctgtcataatttccttttaatttatttgttgtggtttgatgtaggaaacagatgataaacaaccgacagcgcaacgatggcgcagtttggcagttgtggtttgatgtaggaaacagatgataaacaacgcaaaagtgcaaaagtgcaaaagcacccctgttgtggtttgatgtaggaaacagatgataaacaacatcttttatatattgcgcgcgtcataggggttgtggtttgatgtaggaaacagatgataaacaacttgaaggacggaacgcttgtccctgcattgttgtggtttgatgtaggaaacagatgataaacaacgaagactcctgaagacatatattttcacctgttgtggtttgatgtaggaaacagatgataaacaactcagggccagcgccaagtagatgctatcgcgttgtggtttgatgtaggaaacagatgataaacaacattgacgagatagaggatacgctacggctgttgtggtttgatgtaggaaacagatgataaacaacttcggtggtgattccctgcgcggcggcggcgttgtggtttgatgtaggaaacagatgataaacaactttgatcctttgatacacgagttatatttgttgtggtttgatgtaggaaacagatgataaacaacctgcaagcaattcgtgaacagttgaaatatgttgtggtttgatgtaggaaacagatgataaactacgccctcattttgctttgtaaatacattatcggtactgccagattaccaatactccttaaaaatatatgcgcacgcgaacctttagttctatgacttcagcaggtgatgatcatactggcagctcacattgagctgacgtgttcgggtgcgccacatgtcgcgtgcaacttccggttcatttcatcctttctcccgcaaataaatggtgcaatcagcaacaaaagagctcaatatgacggcaaaaaccatctacttgcccactttttgtcacttttaacgcactaaaagcacgaatatacaagaaaagtagtacttttgcactcagaaacaagaaaaaaggcattatgagtacagcaacactaacaggtttactgcaatacctctacggaacactcacaccgagcaatatgcgttgggtgggtgaacatctcatagagtacgccaataaggaagaagaacaagcattgcagccattaacgatggaagagatagatgcgatgcttgacgaagctgaaagcgattttgcggcaggaaattatctcacccacgacgaagtgtttcaccgccacaatgaagccttaaccatatgaatattcattggcataaacgtgccgttgctgcactgcaacaagttgaagcatacgtcttggataagttcggtgaacaaacacgtcaggaattcatggatgaagtggatcaggcggtacttgctttagcaaaaacaccttccatgggtaagaaagacccgttgtttgctcatcgtcgtcaggaatatcgtagcatagtcgtccgccggttgaacaaggtagtatattatatcaaggacgatactatccatatcgcagctttttgggatactcgacgtgaacctcaagcacaggctcgccaagttaaatagtctcatggctagccatttcaatggctggtaatgaggatgttaacggatagcgtgccgtaggtacgcgacagggatttgatgtcgcgtacctaaaggcacgctttttcct

SEQ ID NO: 4218 - DNA, 17194 bp, synthetic construct
  misc_feature 1..17194: note = Synthetic
  source 1..17194: mol_type = other DNA
tatggagcgttcacgagaggcccttatctgcagtatcctgcgaaaaggtgttgtcgatattcccctgctcattgtcatgaatgcgctatggcctttgtttggctgcatgtgggtgcagccgatagttgatttcacttcaatgttggttgccttttactttgcctctcagattcgggctcagattcatgactactaatcagcatttcattgcaccatttcagcatgtgttttatttctcaatcaaccagtattccatgtgcttggtggttcgcttgcttgtaaagttgaactgcacatcgttaagcgcagaaccaatctttctgaacgatgtttctgggtcgaagttggcatagcgcgtggccagcacctgactgatatcgcccaggctccaccacttaccttgctctgtttccttggggcggcggaaggtttcgcctatcatctctaccaggtcgttcaatttctggaacggctcgttctcctctatcagcgtgctgatttcatcgtcgttcagccaaaaacgctcaccttgattaaacaggtgcagggcttgggcaaaaagctgctcgtggttcagcgtgtcgctgaagtcgatgttgccatctacgccaacgcatacaaaacggcggcttcccgttgggtcaaccagtggtttcatctggttggtagtgccgataaacgaggtgtagcgacgatacaacttgatggtcttgccgtaaggcggacggaacttcacgtcgctcgacgacaacagatacttcagcacaatctgctgcgacgaggtggttttatcaaactcgtcgatgttgataagcgcaaacgaggtgagagcgatgttcaggtcgaactcgtttttaaagttcagtttgtcgttgtagtaatcgcgcagttcgggtggcaggataatcttgcagaatcgcgttttaccgcatccctggcgaccaatcaatagtggcgttagtgcattgcctgtcaactgcttgtcgctctcgcgccattgtcccaccatgcccatcagccaatatctcaggtacttgggccaatgtggctgcttggtgggcacgcgggctgccagctcggctatataatcgtgcccatcccatttgggcaactggtcgagccaggtgttgatggggtcgaactgctcgatgcggggcgagtcgataaagcggttcacgtttctgtcccaggctttcagtcctaactcggtggctctcagcgtcatatcattgcgaacctcctcgtttagtggcttgaatcgctggtcgtcgctgaacttctcgcggtattctgccacgcccgtcaacaggtttttgcgcatatcaaagttcgagttcaggaaaatctcggtcttcatcgcttggatagtgtcttcgggcacactctttagcggatgaggcttgtgcttctcgcgataaccctcctgctcagccacgctataaacggtctgaaaaatcttttctaccagcatcttgtcgcgattcagtacagggtgcagcatcgtcaagcccttggcatgcgcctgaggtataccctcgtcaaggcatctggctgctatctgcatcagcagttcggcctccttattctcatccggcaagtcgaaatagtgtcccatcaccgtctcgacaataaaagtccagttcagatgataggttcgcgtcacggtgcggccaggcatcagatggtcttcgtcgcgactgatagttacaggctggggtagggtgtgatcctttgtgtcggcataaaacgggcgtgcatcggcacgatagcccatttccgggtcggcactcatgtaaacggtgcggtccagtcgtggttccaagaactggatatcaaatccaaactggttttgatacgccatgcgcgccgtgttatacagattcagatgaaactgtcggatgttctgttcgcctgtaggcaatccaccttcaaacagctcgccacgacacacaatcttcacgcttcggcccgatccgcccagaaaacacatcagcgtttcaggcattttcttggccagttcgcgtatttctacagccctttcgtaggtctgcaggtcgtttacctccagcaccaccagaccattgtaggccagcatgcgccaatcccctttgtgattctgatagtcagccacaaaacagatgcgaggcagtttgatgccgccttctagctgtgtcgaaatctgaccgtcgcctaatctgtgtggattcatcagatgatacacttcgcgcgtttggcgtaccgtgttcttaatcataccattcttgatggctgaggccatttcaaccaactctacacggttaataacctctttacggccttcttttttaagtaatgtaatcttcatataagtttattagttattttgttcaaaaatcgcctacaaagatataacaattaatttgaaaatgaaaactgttttcgatttattttctgctttctacctacataactacataaaatcgcttgaaacccttatgtaacctatgttttctattattatttaactacataataactacataaaactacataataactacataaaactgcatctaactacatacgaactacacgaaaagtggcttttcacccgacaaaaagctacttttcgacgggtaaaaagtaactttctgccttaccaaaacatacttttcgatgtacttgcaatctatttccttatgggtaggtattaaattctctagagaattttcggcttagtgccgtactagcgattgctgactgcccaggaaaccgaaaaattctctagagaatttttcttctactattctttctatgtagttttatgtagttagaatgtagtatttatgtagttagacagaccaatataatgcctatatacacaggcgttttgagcgattttatgtagttatgtagttaacattgcaacttttttattgtaatattgtgcttagattcttcagatttcaagtttttcttgattttcttgctgattttctagaaaatgtgtatatttgcagcactaaaaacgtattactcatgaaatatagattaaagaaagaaaccaaacctacattaccaacttttggtaagtacaaggcagtagctgtgcattaccatactgtcgagagtcgccaacttattaaagaggtagcccagcgtatgggtacgcatacgtcaaatgtgctggcagtcatgacgagtgttgccgaggtggtaaacaatcatctgcgcgaaggcgatcgggtgcgcttagaggactggggcatgatgaagctcgaaatcgaaagcgaaaaggttgacaatctcaaagatttcaaagccaagaagcacatccgtggtgtccgcctccacttcctcccccagagctacgaaggccaccaagaactctacgaaggcatcaccttcgaaaaagacaagctttacacagaggaataaaaaagctcccaccgaagcgggagcataggttttacccttcggccattgtggccttattgtgataagatgtaggaattttacgagtgcaaaaataggaaaaaactatgttatatcaaaataatttcgtacttttaccgcaaaaattaacgaaatattactattatggagagaatattaggtattgatacaggaaccaatagcctcggatgggcaattgttgataaggatgaaaatcaatatcatctagttgccaaaggtactaacatcttctctgaaggtgttaaaatagagaaaggaatagagtcttctaaagcctcagaacgtacagatcaccgttctgttagaaagcactattggcgaagaaaaataagaaagataagattactgagcatattgtctgataatgacttgtgtcccagacttaaaaaagaacaacttcgcttgtggcgactgaaaaaacagtatcctagtgatgacacatttatggagtggcagcgaacagaagataaagctcaggttaatccatataagtttagatatatctgtttgacccagaaacttgatttgagtgatattactcagcgttttattttgggacgtgctttatatcatttaaatcaacgtcgcggcttcctgagtaatcgtaaggaatcaacaaaagaatcagaaggaactgtaaaagagggtataagtagtctttctaaggatatgaaagatgctggctgtgagtatcttggtgaatatttctatcatctttaccaacaaggcaaaaagataagaaatcactatactgctcgtaaagaacattatttaaaagagttcaaggctatttgtgcaaagcaggaacttgatgatgcattgatagaaaagttagaaaaagctatctttgaccaacgtcctttgaaatcacaaaaaggtcaggtgggaacttgtacatttgaaaaaggaaaatctcgttgcccatcatctcatcctctatacgaggattttagaatgtatagttttgtaaacaatattaaagtacaagtaaatacgctttacgataagggcgaacgaagtcttacagatgaggagaaacgacttattatccctttgtttaagcgtaaatcaaagcgtactttcctattcgaagatattgcaaagaagattgctggcaagaataactattgctatattagaagtaatgaagagaaagcatacaagttcaactatcaaatggatactcaggtatctggtagtcctgtaaatgcgcagttagaggaaatttttggtgaagattggcttagtggtgtttgtgaggtttacacgcttgcaaataataaaacacgattccaaataatgaacgatgtatggcatgttttatttttctatgacgatgaggataagctgaaagagtttgccaaggaccgtttgcagttggatgatgaattagctgagaagtttagcaaaatatcgattcccaacgattatgcagctttgagtctaaaagcaatacgcaaaataatgccttacttgcgagattatggacttatttattcagaagcagttttccttgcaaaccttgttgatgtgttacctcaacatgtttggggaattaaggaaatgcgagaggccgctatcgaaaatattattgatgtaatgcattcgtatgacaagaataacatagatggcattacgctcgaagtgtgtgtaaaaacattccttaaagagaggtatcaagtaaacgatgatgatctaaagaaattatatcacccatcgatgatagatccatatcccagacagcgccctaatgatgaaggcgtgttccaacttggttctcctcgtataggtagtgttaagaatccgatggcaatgcattctttgttccgcctcagaaaggtggttaacctcatgctgaaagaaggatatgttactccagataccaagatacatattgaattttcgcgcgacttaaacgatgccaacaagcgttgggctatacagatgtggcagcgtgaaaacgaaaaggaaaaagaacgttgtcgtaaggaaatcgagaagtatatagctaatccatctgatacagatatattgaaatatcagttatgggaggaacagaatcataagtgcttatataccggcgatgagattcgcattactgacttcttgggtgataatcctttatttgatattgaacatactatacctcgtagtgccggaggagatagtaccaaaatgaaccttacgctttgtagtagtaggtttaatagagacgtgaaaaagacgaaactcccttcagaattagtaaaacacgatgagattctggaacgtataaaggactggaaagaaaagtatgaagagctcgacaaacagattcgaaaaataagcaccaagggagctacatcaaaagatgagaaagatagtaaaatccgtcgacggcattatttgattttgcaacgtgattattggcgaggtaagtacctacgatttacaatgacagaagttcctgagggcttttctcgtcgccagggaacagatattagtgttatttcccgctatgcccgtatgtaccttaagtctgtttttaaaaaggtatatatagtaaaaggcgttgctacatctgatttcagaaagatgtggggaatacaagaggagtatgccaaaaaggaacgtgtgaatcatgttcaccattgtattgatgccataactattgcttgtatcggtaaggcagagtatgataaactggccgaatatcgccataagtatgatgattatttattcaatggtaaaactaggccaacgtttgataagccttggccttcctttgtgattgatatcaaacatattcaggacgaattgttaattgcgcattatgctaaggatattatgcctaaacaatccaaacgttatgtgcgtgatagcaaaggaaagagagtattaacccaaggcgatactgcacgagcatcgttgcataatgatacatattatggtgctatagaggttgatggcgaagtgaaatatgtggttcgaaagaaccttgctgggctggatgaaaaagatgtcaagaacatagttgatgctgaagtcagatccaaggtagaaaatgcaattcttatacatggttctttgaagaaggcattggaagcaaagatttggatgaatgaggataaacagattcctattaaaaaggtgcgtgtatttacaggttctgttactcgtccaatcaacattcgtcagcaacgtgaccaatccaaacatgagtataaacgccagtatcacgtacagaacgatcgcaactatatgatggctatatatgttggtcatgataaaaagggcaaagaaaaacgtgagtttgaattggtgaataatattacagctgccaatttctatcgtcgtagtaatgatcgcgttccaaccgacggtcagctagttccattgaatagtaaaagtggttatgaacttcgatacaaactgaagataggtacgatggtattactttatgagaatggaccagaagaggtttgggaactcgacaaggtgaatttgcagaagcgattgtataaagtcacaggaatgtcgtcgatgataatccaaagaaagtttgaatatggtactatagaattggttcatcatcaaaatgctaagcctagtagtgaaattaagaaagtaaatggcgagtttaagtctggtgaagattttcgtccaggaataaaaatgcttcattctcagcttaatgctcttgtccaaggagtagatttcgagattaatgatcttggtgagataaggaggttaatatgataaagcaaacattaatgttttcgaatcctgtttccattcgtcattgtgcttcaaaagagagtcaggcagtacatataaagagagtgaaatcaattgtaccagagacaggtatggtgagcatacttagtgtaacagataagcaatatggtgatatagtaaacttctggggtaaggaaaagaagaaaaaagttccgaccgatcctttgcaattggaatttttttagtatttttgcagcaataatccacgaaacaagccacttcttaggcaattaaatcttagtaaatgcctgaaatacaggccaaaaatcaacttaggttgtggtttgatgtaggaaaaggatgatatacaactcaggccaacgagccagatgtttacccaagttgtggtttgatgtaggaaaaggatgatatacaacaaacactggagagaaagggatgccccaagggttgtggtttgatgtaggaaaaggatgatatacaacttgatgttatatacgatacccgatctgaggttgtggtttgatgtaggaaaaggatgatatacaactcggtgcgaatactatcacacctcttacaagttgtggtttgatgtaggaaaaggatgatatacaacgccgcagaagctccaaagaagccgccgagagttgtggtttgatgtaggaaaaggatgatatacaacttgcggcgcaatagagcatctcaacctttcgttgtggtttgatgtaggaaaaggattaaaaatcgtgtctcccatctgaggttaatataacaaggaaaatggccttgacacagttcaacttacactaccgcaggttctagtttgtaataactaaatgatagcctctacctgttcaacaaattcttttgaaagaggttgcatttctaaaacttcgtcttccgttacctcggcgatgctgttgtaatcggctttgtggcggagttgaaccatacgagagaagaaacgaccgaatttcttatcaacctcgcctgataaaataaaatcctgaccaagatgggtgagtgagccatcgtgagatttggctgatactccacgagagataaacaatgcttgcaacatgtgatagcaagcatagtaatatctgttagcagcaatgtcccaacgcctttggataaccatttcgtcggcatcggccagcattttatgtgacttgtctttttgaagttttatcagtaattctttatccatatattatataaggtttatgccatcacgtaccacgttgtcgtagaatggggtaatgctgctggcatcccattcggctttggtgtacataacggggttgatttgttcgttgagtttccaacctaactcaacaaaggggaaacttacatcatcgtaatcgctctgttccaagcggctcttaggcagaacaatcaggatatcccaatcggatcctctttttgcttcgcctctcgctctggaaccaaacagaataaccagactgcctttgggggcagactcgcgtgcaactgctttgatttgatcgagtacctttctgtttttatctgtcatacaacaatgtttgtttgttctgctgcaaaaataggaaaaatactccaaacatccaaatgttttgcgaaatatttctattctttagttgtgccgcaggtgaaggggtgtaattgggtgggcatgatggtttgcatgagttcgaatacatggttgcctgtgcaatggctggtatagaactgcgtttggggataatcggttttcagtctttgagccaaagctacaatatcttcgtccgattgcagaccatcgagcagatggaaaccaccaacaacggaatgaacgggccaaggacatgcggccagaatgttctccaaaccattatgggcacagcctgtaaacaggagtccatctacatatagagctatctcatgactgaaattgtcgtgtacaaaacctccgttagcatcctgaacatagagattcaaattacctttaggcatcggatgcgtttgagatatatgtgcaattacttgtatgccaccagctatctcgcaggtgtgatctatcaagataagtctgtcgttgcttatctcaggccattcggtagtgatgctatgaagattgcctcgctttgaaaagaatctgccgctcatagcatcgggagagataatgattctggcctgctgattatgctctaataggtaacgtaagcctcctgcatggtcgctatgaccgtgagaaataaaaacaaagtcgatatcgcttaggtcgatgcctatctgctctgcatttctggtaaacacatcgcttgcgcctgtatccaacaggattttgtgtcgatttgtttgcagaacgatggataatccgtgctctgtttcaagctctggattgttcgaacggttatctgaaattacagtccacgtcatgttagtcgttttcttccagccacttggtaagtacctggcaatactcctggtgagcatcgataaagcaagtgtggcgcgagtggcggaacagatgccattggctgtgggggatatgctcgtagagtgaggctgctacaacgggggtacagatgtcgcgtgtgccactacagataagtgtaggctgagaaatctgacttaacttatcggtgtattcgaagtccttcagactgccgagtggctgatactcattggggccccagccatagaggtaggcttcggcaccagcacgcttgggacgacgaagacactcgggtgagtgctcatcaacgctaataacaaactgctcaaagtaatgattgtttgcctgcagataggctccatcatcccattggcctgtagcttcggcatgacggatggcttcctgatcttcgtccgacaggtatttgataagacggtgctgctcgctggcccataaactgctggaggaatggcctgatgacagaatgagcgacttgatgccttggggctgatggtcgatgacataggcgatggcctgcatagctccccacgactggccaagtatatgcacggcatcgagctgaagatactcgcggatggcgataagttcgtcaatccacgtcttctgtgtccaaagttctgggtgtccgtcgagataagaattgccgcaacctatctggtcgtacgagataacctgtcgtcctgtttcggcgatgcagtcgagcacctcgaaatagttgtgcgtactaccaggaccgccatgcagcaacagtagcggtgctttctccgatgcctcgcctactatgcggtagtaggtttggtagcccataaacggcatgtagccttcggtaatcatattttttattcttcgtcgttggatgtgcgaaggatgatagaggtggcgccgagggtgaacagggtgccatcgctgataacgcggcgctcttttggggtgagctctacgttatcgataaaggtgccagtgttgctgttgttgtctttcagcgtataacgcaagccacctttcttatcacgactaacggtgatggtgcaatgattgagatcgacgctgggatctactgtctcgaaagcggtattggcgggattgcctttctgataacgaccaatgatgttgtcgcccatacgaagagggataacctgcttgtaatggaatacgttttcgataacaacgattgatccgcaaccctgttcgttggcctgcattcccgccccttgggcgcctacccgtagcctttcatcagggtcttcgtccttccgacgatttagaagcttgctcacgccgatacggatgccaaactccttgccgcagtcggggcatttgaaaaccaacgactgaccagcctcgtacttggtctcgtcgaaggtgatatactggtcgcatttagggcagcgtactctcttcattgattatttcttctcgttatatttgtaaacccaagcatcttccagacctttctcgtgatttatcttctggagctgggtgtaagcgtcggattggtcggtgtagtgaccgtaaacgatacgggtgacatggttgtgcacataaatctcggcacccttgtaaccacgctcagccagattgctgataaaaatctcggcattctgcttgttaacatggctggccagtacaatgcagtagccttcgcgagcactgtcggtcttgatggcaacgggcttggtagcctcggctggcttagcgggcttgatggtatcgagtatagcctcggcagttttaactgcggcaggcttctgtgcatcctttcgtttaaaatcgatggcgctggtgttagtgtccttcgaggtcatcatgccaaacaaaatctgattgttcagattattgatggtgctcttcatcagctcggtcttgccagtaggcatagctacaaagaacacagccaacaggatggcggctacggcaacagcattgcgaatccacgagaacttgatacgtactacatcggtatcgtcgtcgttgatatcaaccaggttctgctgcagaacgctgttaacctccgactctggctttggctctggcttcatctcaaccacctttgcttcaggagtctcttcgacactttccgagctgacggtcttaatcagtttcatctcgaacgagttgagtccatacaaacttggcgtaagaatgcctgcctcgcaaggggtgaacacgtagttgccatcctcgttaagctctattatacctatattattaagctcgtagcgaccttcgttctgcaggatttgtgtcagttcgttcacttcgtcctcaatacgctgaagggcctctgggtagctgatgtcgtaagcctcgatgtacgactgggccagaagtgaatcgttaatcttaagttgtgggttaaaacctaatgtacggagtgggggaaggaaggcctgttcgtcttcctcgtatcttgcttcgacatgatgcgccatgaatccgcccaaaccgggcacaatcacgcagtcgttgtcgagcagcagtatctcaatatgtctttctaattcaatcacgggtgcaaaattactgtattttttcgacataaacaaataaaagaaacttaaaatgcttgtgatattaaaaatttagtgtacctttgcacaaaatttagttgttaacagtatgaatattgctattgtaggaaccggatatgtaggtttagtatcgggaacatgctttgccgatacaggagcaaatgttacgtgtgtagacgttgatgaaaagaaaatagaacgcctgaagaacggtgaaatccccatctacgaacctggactcgacgagttggtaaagaagaatgtggccgctggtcgcttgaagttcactaccgacttggcttctgtactcgatgatgtggagattgttttctcagctgtaggtacacctcccgatgaggatggctcggccgacttgaaatatgtgctgcaggtggctaagaccatcggtcagaacctgaaaaagtacgtggttgttgtaaccaagagtactgtaccggtaggtactgccaaaaaggtgcgtaaggctatcgaggacgagttggctaagcgtggcgtagatatcgagttcgacgtagcttcgaacccggagttcctgaaagagggtaacgccattaaggactttatgagtcccgaccgtgtggtagtaggtgttgagagcgagaaggccaagaaaacgctgaccaagctttacaagcctttcctgattaataatttccgtgtgattttcatggatatcccatcggccgagatgactaaatatgctgccaactcgatgctggctacccgtatctcgttcatgaatgatattgccaacctttgcgagcgtgttggtgccgatgttaacatggtgcgcgctggtattggtagcgatacgcgtatcggtagaaagttcctgtatgcaggttgtggttatggtggttcttgctttcccaaggatgtaaaggcgctgattaagactgccgatcagaatggctactcgatggaggtgctgaaggccgttgagcgtgtgaacgaaaagcagaagagcgtgctgtttgagaagctggttaaggcatttggcagcgttgaggctctgaaaggtaagaccatcgccatgtggggactctcgttcaagcctgagactgatgatatgcgcgaatcaactgccctcgtgatgattgccaaactgcttgaggctggttgtaacgtacgtgtttacgaccccattgctatggatgagtgtaagcgcagaatcggcgaaacggtaacctattgtcgtgatatgtacgatgtggtgctggatgccgacgctctgttgctgctcaccgagtggaaggagttccgcctgccaggatggggtgtgattaaaaaggctatgaagcgtccgttggttatcgatggtcgtaacatcttcgatagcgaggaactcgacgagaatggctttgagtatcattgcataggtaagtaaatgaagaagattttaacgatatcaatgctgatggttgttctggtggcttgtaaccagaacaactcatcatcgttgcccgacgataaggcggcaaaggagatgcttcagggagtttgggtagatgaggagagtggtgatgtgtcgttccgtgtaagtggtgatacgctctactttgccgatgctaccagtatgcctacctacttccgcatctacaaggattcgctttatctggcttcgggcacatcgtatagtatcgttaaacataccgaacacctcttctggtttaataatcagaatggtgatttgttgaaactgcaaaagagcgacgacgctgatgatgctgatatagagactgctgctccgagtgtgctaacctatacccatcaggttaagatcgactcggtggcaacctataacggcaatcgctaccattggtatattgccattaatcctaccaagtataaggtaacaaagcgtacttttaacgaggatggattggaagtagagaatgtgtactacgataacatcatgcacattagtgttttccaaggtgcacgacagatatattcgagtgatttccataagcagcagtaccaaggtctggtgcctgccgaattcttaaacgatgccattctggccaatatggcctttagtcatattgatgcctctggcttacattttaacgccacactatgtatccctgatggcgctacctgttatatggtagaatcaaccatcagttatacgggcgtgttatcgatgcagttagtagagtattaatctttctcggctaaccacgcatcgagcagcatacgtgctatagataatttttcggggatagtaggcaggttgtctttacggaaccagccacctttagctatctcgctggcctgcaggtggatgtcgcctgatacatagtcggcattaaagcctaccatcagtccgcaagggtagggccaaggctgcgaaccaaaatagcggatgttggtgatctttatgcctgtttcttcgaaagcctcacgggctactgcttcttcgagtgtttcgcctgtctcaacaaatcctgctaccaatccgtagaaatcggtacggaagttcttggcgcgaaccagcagaacctcgtcgcctttgtgtatcagcacgataactgctgtagctaattgtggccatatctctttgccgcactcagtacatttcttcgagatgtcggtatccattcgcattggggcaccacacacgccacaatacttggtgttggcatcccaatacagcagttcctgacatttgcctgccttctggtacagggctttatcaagtttgtaaaagctctgtcgcaggccgcacatctcgtagcgtgggtcgtcgcaaaccggactgtctatcttatatgtttttacctcaacgccatccagcggggtaacggtcattacgttggtccaaggttttacctcggtgggtggttcttcctgaaaggggatggtatatccgccatctgcggttttttctaacaataagtcttctttacagaatacgaaataatgttgtttcatttttcaaacagttgtttacggtctctctcgagggcaggttttacccatgcctcgggcacaaacttccagttgttattcttctgtgggtcgatagtacccaaacgtttgatctcttctgtcagatagtggcgctgatccagttcggtgtggaagagtacacgactctcgagcgaatcctgtgggatacctgcaccacgagtcagcaactcgccaccgccattggcgcgatagctgttcatcactaccttataccacttcttctcgtcgaatggctcaccgttcgacatgcgcagaatccttaccttctgtccgtcgggcttggtcagatcaacctcgtagtcgataccgcaagccgagtcgaaattaaaggtgtagtattggaatccggtacgttgctggtcttccttcgaatcgttgtttaagcgcaatgcgtggtcgttgggcgatgtcatagtgttacaccacatatcgtacgagaactccaggtgttttctgatttcctcgccagtcatcttgagtacaaacagaaggttctcaaagcgatacagcttaaacatatcggcctgtgtaacctcgccggcatcgatggtggtatcgaatgccaagggggcgttgaacgatatgtcggctttcgagatgctcatctgcagattgtgaatcaaatctgtaaatgccgagttgccaaagaaactctcgcgggtgtagataggattcttaaagtatccaatcctctgacttacgtattccttaaccttatcgatggtaggctggaagtaggtaatcatctgcttgtcgatcttctcgtcgcgcacatttacaatgttaccgataatgcttttcttgctaagcttgccatccttgtatgtcagcgtaatctctgcttcagccacgttgtttacatagcacgagggatctacacaaagcaccttttcgccagctttgttggtgatcagcatgttgtgtacctggtggtcgtgaccaaagaagataatgtcgaaaccaggaacctcacgggctactgattctgttgcatcttcctcgtattcagcagttttgataccaccgttcagaccagagtggaacagaccgaaaatcaaatcgggtttctcgttctccttgacatatttcacccatttcttggcgcacgaggtcatctcctcgaactccagacctttccagatggatttgttcagccagtttggaatggcgggggtgatcatgccgataactacaatcttaacaccatctttgtaatgtacagagtagggcttcagtcctgtatagatatgctcaggacgggcctctgcgttcttgtattcctctttaacgatgttggcgcccagcaatggacagcgaacctcgcggatccacttgtcgtaaaccttgtggccaggctcgatgtcgtgattacctacggtttcggcatcgtatttcatatagttgataaccgaagctgcgatgttctcgtcttcaggcatcacatagttcgaccaatatacgcaaggctgaccttgcaggatgtcgccattatctatcagcaggaaatgatcctcgccatactttttacgctgctttttgatataggtgtttgcgcgcgaaagtgtacccttgatgggggtttgctccataaagtcgtaggggaaaaaatgtccatgcacatcgctggtttcaatcaccttaatttttacggtcttattgtcttttgcctcgatgggcgccactgataacagtgtggaaatcagtatgatagcaagctttttcatcaatattcttctttttgtttgcaaaattacataaataagttgatatgcccaaatatttattcgattattttgtattttgtttggcacattttttgctggaaaagttaaaaaaataggaggataagattatggcatttattgattattacaagattttaggcgtagataaaaccattgcgcagaaggatgtaaagaaggcctatctgaaacgtgctaagcagtttcatcccgatttgcatcctgatgaccccaaggctcaggctaagttccaggccttgcaggaggcttatgatgtgattggtgatcct

SEQ ID NO: 4219 - DNA, 16119 bp, synthetic construct
  source 1..16119: mol_type = other DNA
  misc_feature 1..16119: note = Synthetic
  variation 136..264: note = note, n is a, c, g, or t
atgataaagggtatatcgcaacgcgataaagggtattctttgatgaaaagtatttactttttagggtaaataaattcccaaattttataaatacctaattatcaaccgattacaaaaagtgccgaaaaatcgcgtnnnnnnnnnnnnnnnnnnnnnnnnnnnnnnnnnnnnnnnnnnnnnnnnnnnnnnnnnnnnnnnnnnnnnnnnnnnnnnnnnnnnnnnnnnnnnnnnnnnnnnnnnnnnnnnnnnnnnnnnnnnnnnnnnttttatatactttgtccgctttattcaagggtctgcgccttgaatgtaaaccgttataaaccccaagggagcgggaagcactgacggacttatgctgctgtttgagtccttggccttgtgagcaagttcacggatcaggatgcgaacaaccgcatggcggctctcgccgtcttcccgcacccctggccataaaccgaatttaaccgctcacgcagcaggtttgcaaactgatgaaaccgcacacgcagtgaactgcgaaccgaatgaaaccactcacgcatgtcttacatgccgtgttgttgactctacatgtacagggacggaagaatggcgtgagcggtttaactggattgaaagcctgcccttgagggaggggcgtagtgctttacatttaagccatgggtctcgtcactacgacatccataagagtaaaatgacaacccatgacaacgccagaggcgcaacgcaaggtcgcctccctaccctaccaatgaataaaaaaacgggaggaattgaaaagaataaaaaggatgcaacctaaagaaaatcaacaacttagataaaaaaaacaacatgggatatatatatctatatatttatttgtgtaggcctttatatataggtttttatatttatttgttcctttgtttttgcatttgtttatatgtttatatacgcaacaagctaaaaatcatccaaaaaaaaggagccaaaagtgaagaagtgtacatgaatggataaataacgcaaaagagaaggggcttaaatgaatcgaaaaggctgatatccaaagggttaaatggaaaaacaagatacctggaagggtaggcaaatagaacataaagaggcgcacaacgaaacaaaaaatagggtaggggagggtaaaaactcaaaaaaagcattccaaaaaaagaaaggttcaaaaaaaaggttcagcaaatataaggagatctttgtaaaaaagggtgcaaaaacaaagaataagatggagtagggcacaggcttaacatacttcaaaaagaaaaagaaccaaaaaagaaaaattaaaaactttcaagagagttagatatcattagtaatatcgttagttaatcatgatattagtagaggccatctaaccctctgatacacaagctttccaagaccttactgacgacaaattagtaaggtggtgcgacatttagggaagttggctgcgacaaattagtaaggtgcttgcgacatattaggaacatgttttcgtatgcggcgacaaaataggaatatggctgcgacggatagggaaattgtttgggaatccgtgataaatacttgacggaaacgagcatatagacgttatctttagggtcgagtagggtaacagtccgctgatgaagccataatcaccgtctttgcaattcacacactataagtgtgttatgcgcttctgcgacaaaatagtaagttcctgaatcacgttggcgcacaagaacggcgacaaaaaaggaggtttcagaaaaaacaagacaacaaacgagtgtcgcaaccaataatgagctgctacctttatagtgtaaatgccttattagcaggcattaacggagtaccctaacccatgaagtcaagctacaactacctgtactttggcctgtagtctcctgtcaagagcaccgacaggaaatcaagaatgaaaaaacggctcttcctgaatttggagtgatgccccttgctttggacttgctttggacttgctttgggcttgaatgtaaaccgatataaaccccaggggagcgggaagccctgacgggcttatgctgacgtttgcgtcctttgccttgtgagcaagctcacggccaaggatgcaaacgtcagcatggcggctctcgccgccttcccgcacccctggccataaaccagatgaaaccgctcacgcatgtctcgcacgccgtgctgttctcactccgtggacagggacggattaacggcgtgagcggtttaacctgggcttacattcaagccattggtcttatcgcgctaaattttggaggagaaaaaaaactcccaccgaagcgggagtataggctaaataccttcggcccttgcgggccttattgtgataagatgtaggaaatcttattctggctgcaaatataagccaaaagatttgcaattccaaatgtttttctgtatttttaccgatattttttaatctgacctattgagagggcaaacatatgaagaagattttgggtattgacacaggcaccaatagcctgggctgggccattgttggcaaggacgatgatgaccgttggctgatagacaagggagtggacatattccaggaaggcgtgaaggtggaaaagggcatagagtcctccaaggccgctgagcgcacggaccatcgcgcccagcgcgtgcgctattaccgtatcaagttgcgcaagatcaagttgcttcgtgccttgagcgataattatctctgtccgccgctgacctctgaggagttgcgtgcttggcgattgaagaaggtgtatcctgtcaacgagctgttcatgcggtggcagtgtaccgacgatgacgctgacaaaaccccatacgccttccgccaccgttgcctgcatgagcggctcgacctcagcagcgtcactgaccgctatgtcctcggccgggctttctaccatttggcccagcgccgtggcttcctgagcaaccgtaaagaccaggcaagcgatgatacgggcaaggtgacgaagggcatcactcagctcacggcagacatgcgtgaagctggctatgagtaccttggcgactatttctatgaactctatcgtaaaggtgagaagatacgttgtcactacacggcccgcaacgagcattacctggccgagttcaatgccatctgcgagcgtcaggggctcgatgccgacctggcctccaaaatacgccatgccatcttcgaccaacgcccgctgaagtcacagaagggacaggtaggaaagtgtgtctttgagaaaaagaaagccaagtgtcccgcttctcatccgcgatacgaagagtatcgcatgctggccttcctcaacaacatcaagatcaaggcccctggtgacatcgagttgcgtccgctcacggacggggaacgcgccaaagtgattcccctgttctacagggggacgaagaaacagtttgccttcgaggacatcgccaagaagttggccccgaagaagcagtatggtttctgcaagcgcagcgaggaccgcatgatgccctacctcttcaattatcccatggacacgcccgtatcaggctgtcctgtcacagcggcgctacgcggcctcttcggtgatgactgggagcagtcagtctgcgaggtctacacactcgccaaggacaagagccgtgaggagattgtgaatgatgtctggcacgtccttttcttctattctgacggtgacaagctgatgcagtttgcacaggaccgcctgcagctgtcgccagaagaggccaagaagtttgcagagatacgtttgccatccgactatgcttcgctgagcctgaaggccattcgcaagatattgccttatctgcggcgtggtcttatctattcgcacgccgtgtttctggccaacctgggagaggtgatgcccgcctacgagtggggcaacgaggccatgcgcgaggcggccatcgcccatgtcgtccaggccatggacagccatgacccatgcgatggccgtaccatggagcaacgggtcaaagactgcctgcgtgaccgctatcatgtgagcgacaaggccctggagcgcctctatcacccctcgatgatggaggcctatccgcctgtgcgccccgacgcgcaaggacggcttcggttggggtcgccccgcatcagcagtgtgcgcaaccccatggctatgcgctccatgtttcgcttgcgccatctggtcaaccagttgttggccgagggctgtatagatgccgacacggaggtgcacatcgagtttgcgcgcgagctcaacgatgccaacatgcgcaaggccctggagagccaggcgcgcgccaaccagaaggccaacgatgctgcccgcaagcgcatagccgaactctacaaggaggagacaggacgcgacatcgagcccaccgaccgcgatgtgctcaagtatgtgctgtgggaggagcagaagcacctctgcgtctatacgggacagcagatcaagctggccgacttcgtgggtgacaatccccggtttgacatcgagcacaccataccgcggagcgtgggcggtgacagcacgcgcatgaacctgacgctctgcgacagccacttcaaccgcgatgtgaagaagaccaagctgcccactgagttggcctgtcacgaggatatcctggtgcgcatagcgccctggaaagacacggtggaacagctcgacaagcagatacgcaagctgaaaggggcatccaagggggcaacgaccaaggaccagaaggatagcatcatacagcgccgccacgaactggagttgcaacgcaactactggcgcggcaagtatgagcgcttcaccatgacgagcgtgcccgagggcttcagccgtaggcagggcaccgacatcagcgtcatctccaagtatgcgcggctctacctgaagtcgctcttccgccatgtctacacggtgaaaggcttggccacgtccgatttccgcaagatatggggcgtgcaggaggtctacagccgcaaggagcgtgtcaaccatgtgcatcactgcattgatgccattgtcatcgcctgcatcagtcccgacgactacaacaagctcggggcttactatcacgacgaggagaaccacgagtggtatggcgcctccaaggcatcgttccccaagccatggcccacatttgtggaggacgtcaagcgcgtgcaagacgagatattggtctatcaccacacgcccgacaacatgccgaagcaaggtcgacggcgcatcatggctgagggtaagcgcgtgctcagttgcggcgacgcggcacgcggctcgcttcacaaggatacttactatggtgccatcgagcgtgaggggggcgttcgctacgtgaagcgcatggcacttgctgacctcaaagatgccaaggacgtggagaagattgtcgatgagacggtgaaggctatcgtcaagcaggctattgcagagaaaggattcaaggcggccatggacccggagaataccatctggatgaacgaggagaagcgtatccccatccgcaaggtgaggtgctaccagccgtcggtgaccaatccactgcacattcgccagcagcgtgatgtttcgccaaaggagtacaagcgacagtttcatgtggccaacgatgacaattatctactggccgtctatgccggcaaggataagaagggcaaggataagaggactttcgaactggtcaaccgcctgcaggctgcagagtttttcaagacgagcaacgacaaggaggctgcggggcatcatctggtgcctgtgaagagccaggaagactatccgctggccttcaccctcaagataggcaccatggtgctgctctatgagaagtcgcctgtggaggtgtgggaggccacgcccaaggaactcaataggagattatataaggtggcgggattgtcttccatggttatcagtggaaatccatacgccacaatcaagatgcgccaccatgaagaagcccgacaaagtaaggacatcaaggcgaagaatggtgcttataagcaaggtgaggagttgcgcccagccattctgatgttgcacactcaactgcgtgcccttgtgcagggttacgacttcgaaatcaacgaacttggagaaatcaaatggctgagaactcatgattaagcagactcttttcttcaccacgcctgtccgcctgtcgctcaaaaactgtcagttggttgtttcctggaaggacagcgacgaccaactgacacgtcccattgaggatctcggctgtgtgatactggaaaaccagatggtcaacgtcaccctgcctctgctgggcgagctggtgcgcaacaatgtggcggtcatcctctgcgacagcaaggggatgccttgcgccatgctgcagcctctcgaggccaacgccacacaggccgagagcctgaaagcgcaactggccgtgagcgaaccgatgaagaaacaggcgtggcggcagattatcgaagcgaagatacgaaaccaggcggctgtgctgatgcgtatgggcaaggagggtgtggcgctgaagcctctctacgagaatgtgaagagcggcgataccgacaatcgcgaggggcaggcagcccgactctactggagcacgctcttgggacgtggcttccggcgcgagcgcgatggcgagccgcccaacgccatgctcaactatggctacgccatcctccgtgctgcgaccgcccgtgcgctcatggggtcgggcctgatgccaggcctgggcatcttccaccgaaaccgctacaatgcctttccgctggccgacgatgtgatggagccttaccgcccttacgtcgatgagatggtctgccgtctctatgaccagggagcggtagacctcaccaaggaggtcaaggccgagctgctgcgcctcttgaccaccgatgtcaacatgggcaaggtgacaaggcccttgcagatagccctcacgttcaccaccgcttcgctggtgaaatactacgcaggagaaatcaagaaactgtcgttgcccatcatgacatgaccgaataccggctcaacgcctatcacatcatgtggctctttgtgtttttcgacttgcccgtcaccaccaagaaggagatgaaggctgccgcccttttccgcaagaacctggagaaggacgggtttgccatgatgcaattctctgtctacatccgccactgcgcttctcacgagagcctggcggtgcatgtcaagcgggtcaaggctatgttgcccgagtcgggcaaggtcagcctgctcagtgtcaccgacaagcagtatggcaacatatacaacttctggggaaagccaaagagtatgagcaagagtaagattgataaaaaatatatcagcgagcccatccaactcgagattttttaatacctttgccgtagaaagaacttcctgcatgccatttcttatcagtaagtgtgaacgtttgccattgaatatcagtaagttcaccgctataggttgtggtttgatgtaggatataaaagatatacaactggccccttgtgcgttcgtgttcccggctggttgtggtttgatgtaggatataaaagatatacaactcaaagccgtttataacaatcaggaaatagttgtggtttgatgtaggatataaaagatatacaacgtgcggcatggtgttaaggcaatagctacagttgtggtttgatgtaggatataaaagatatacaacctagtctctacacgtttgggggacgcccaagttgtggtttgatgtaggatataaaagatatacaacgccatcaaggagggcgcgccgaccgaatagttgtggtttgatgtaggatataaaagatatacaaccaggcagagttagggcagtttcagcatttagttgtggtttgatgtaggatataaaagatatacaactgtgagccgatgtcagtatttccggcaccggttgtggtttgatgtaggatataaaagatatacaacgtttctctgcaaaaataggagaggtcgaacgaatccttatcccaagaaagactacacaaaaagcaagcaaagagaaagcgctatctatatttgagtccacttggaaaagtcagagcattatccatttgaaagttaagtagcaaaaataagccctaaacaggcttataaatgctaaatatcacatataaaatagggctcttcctgaatttggagtgatgggacctttgtgttggggtggaatgtaaaccgatataaaccccaagggagggggaagcactcaattttgtcacttgtgggtttacattcaagccatgggtcttgtcacgacaaattccggaagagcctttaatattgtttagctaattatatttatgtaactataaagcgtgtgaagatgcacgttgcagaattgttcgtaacattgctcttacgcaaattctaagttatggtctgccgttgtggtttgatgtaagatataaaaggtatacaaatagaagactgccttgggggcactcttgtatcagacacagcagtatcatttagataagccccgattcaagctttccaacggccttttgtccgcatgacgtgcgaaatgtcaaatcgaaaatgacaccgtaaaatcggaattttacaaatcaggaacatgagttaatcatacggtctctcatgtatacgagtacaattatgtaaacatccgcagataggtgtgcatttggctatatatttttttgtggataggagattaatgcatatctttgcgcccacactgcgtggcattaacgatccaccctttgtccgtcatgagaagctacgtcactctgaggcatgcgcctctgctcttgttcgccctcctgctggccctcggtgcctgtcagcgcagggaatctgtggacacgctgcgctccgcctactactggagcaccacgtggaagatggactcggccaaggtgcgcttcatccgccagcaccacatccggcgtctctatgtgcgctacttcgacgtggtgcgggatgccgacggccaggcgcgtcccaacgccacgctgcgctttcccgatgagatggggtggggtggcgagcacgctgccccgacgtcgcccgtgccccgcggggtggaggtggtgcccgtggtctacctcgtcaacgactgcttgcgccctgcgccccatgccaccagtcccgacacgctggccacgatggtgctccgccgcatcctcgcgatgagccaggcacacggcctgcaggacatgcgtgaggtgcaggtcgactgcgactggaccgccacgacggcccacgcctacttccgcttcctcaccgcgctgcgccagcaggcccacggccgccacctgcgcctgtcggccaccatacgcctccaccagcttgcgctggaggcaccgcccgtcgaccgcggcgtgctcatgatgtacaacaccggcgacgcccgccggcttgcctgccacaagcccatcctcgacatggccgccgccgcgccttacctcggccatctcgccgcctatccgttgcccctggccgccgcctatccgctcttcacgtggcgcatcctcttccgcgagggccgctttgtgggcttcctccatgctgacgacgacctgcccgtgctgcccggcgacagcatcgtggtgcgccgtcccgagctcacggacatcctccaggccgtgagggccatccgcctgcgtcgtcctgacgcctgcgacgaggtgatactcttcgacctcagcacccccaacatacttcgttttaatcctcttgattatgacaagatttaccgacacccctaaacttttggtcctgagcctcctggctctctgtctcgccttgcccgcacgggcctgtgtggccgaggtgagcgaccacaattattatatgttcagcgtgttcaaccgcgaccaggccgaccctgcctaccgctaccggttggccgcctactggcagcgctatgctggcgctgacggcgcgcccagtctctacttctacgaccagtatgccgccgacatcctcaagaccgcccgccgcaagggcgacgcggagatgcaggcctacatcaagcgatttgacacctaccgcgccgcctgcgaggtgctggcccccgaggcgtggcgctatccgtcgcgccaggagcggcagcgcgccctcagccagctcacggcggtggccagcgccgcccgcgcctaccagggacggcgcctgaagagccagtatgcgctgctccgcatgcgcgtcaacatgctccgcggcctcgaccagcagaacgtcacgctgtggaacacggtggcccggcgcctgccccagtcggcgtggcgtgaggccatgcgcggcatctacgcgcgtgccctctggaagacaggccaccgccagcaggccctcgacatctatgccggccagggcgacatggccagcgtgcgcgtcctggcgcgcggctaccgcaacctcgcaggcatcgaggccacctaccgccgtaaccccaactcgcccatgctcacctacctcgtgcaagacttcgtgaacaactgccagcagacgctcgacagccgcgcctcgcaggccgacttctccaaggagtggatcgagaccctcggcgccaaggtggtctatgagaaggaggccatgggcttcgtgcgctttgccgacagtgtcgtggctgagggcaagaccacggtgccctgcctctggcggtcggccacggccatgatccattatctctatgggcgccagcgcgaggcatgggccgagagccaagccgccgtggcgctcgccggcacccggcgcatgagggacaacgcacgtgccatccgcctgctcgtctccaccgcgcagcccaccgcgcccgatggctactccgactatctcgtcggcgagtttcgctggctcaatgagcaggcccgccacgccgccaccgccgacagcacttatcccgccgccaccgaccgccactatgtggaggtgcaggaacgggtggcctatcgcgccctgcgccgtcacttcgagcgccacggacaggcggagatggccgtggccatgtatggcatgatggacgcctaccagcgcaccttcctcaaggaccagcaggacgagcgttacctcagccgctatctctactcctccgagtatgccctgcgcctcgactcgctgtcggcccaagagctcgccgcctactatcgattcatcacggccgaccacaccgacgccttcgagcgctgggtctgccagtcgctctaccgcgacgccaacttcttccatgacctcatcggcacccgttacctggccgaggggcagtgggccgaggccgccacgtggctcaaggccgtcacgctgcctttcatcaatgaccaggccatcagcttctatgccgcacgccgcagcgtgtcggtgcccttctggtttcagcgccagcgggtcgacgactcgaacctgtgggccatcgacggtgcctatgccgacctgcaggccaaccccaagctgctgttctcccaggagatggctcgcctcaccagccagtatggcctgatgcgcgagggcaccgaccgcgaccagttggcctacgacatcgccgtgcgcctctaccaggcctcgtgctatggcgactgctggtatcttacccattacggcaagagtgtggccgacagcgcacgcgccggtgaggccgactatgccgccatggcccagcgttacctcgaggtgagcagcctgagccctaacctccagttgcgctaccacgcgctctacgccctggcctccatcggcattgatccctggaaccgcacggtctacgatgccgactacaacgccagcaccgtgctcatgccccagtcggcccagtacaaggcgctggcacgctggctcaccttcaccaaggagcatcccgccgaggtcgacagctataccacgcgttgcgacgtgctgcgcgccttcgaggcggccaccaccggactgtgatgtgcgggcgggtgcctgccatagggcaggcgcatagcggccctgctcctgagcgggtggggcacccggccttaatgaaaaccactcaataaccaacaagcaatatgacaaacgacaaaatgaataaaacacccgatgcctccgtcaacaccccgcacgaccaggaccagacccacgagataggcccctggaagattctgagttccgactatcttgtccgccgcccctggctcaccgcccgccgcgacaaggtgcagttgcccgacggccgtgtggcccccgagttctatgtgctcgaatatcccgactggatcaacgtcgtggcgctcaccaccgacggcaacatcatcctcgagcgtcagtggcgccacgccctcggcatcgtctccaccgagatacccgccggtgtggtggaggccggcgagacacccctcgaggcggcgcgccgcgagctgcaggaggagaccggctacaccggtggcgagtgggagcccatcgtcaccgtggcccccaaccccggcctgatgaccaaccgctgccactgcttcctggccaagggcgtgagcaagaccagcggccagcacctcgacgccaacgaggacctgcaggtgttcttccgccgtcccgacgaggtggaccgcatgctccacgagggtgtcttctcgcaggccatgatggtggcgcccctggccttggccctgcccaagttgctggccttatgaaaggcataaggccgcaaacttaaaaaatgggcacttgtcacccccaatgccggatgagccaaatggagacggtgcgagccaccgcgtcagctgcttgctgacgccccgccaatggcaatagcgtccaaaacgtggcaaaggagtctaaaatgtgggtcccgacgtaacgtttgtgccatttatcccttatctttgcacaatcgagccgttggtgtgcacgggcggacgctggccgcaaggtctggatgcctgttgccgtgcgctgacaaacgcggcagaaacagacaatcctatatagacaatatgaagaagactacactcttggccctctgcctcgcgacgtcgctctcggcggccgcacagggagtgaaaatcaagaccgtcacgcccgtggccgtcaccaccaccgcaggcgaagtgcccatgctgccttatcgcctctgggtgacctacaccgacgggagtggcgaataccggcaggtaaaatggatgaactcgtcgctcgagaccgagcaggaggccgccgatgcggccaagcatcctgccgggtcggcctatgacgtgcagggatatgtcatcggcgacaacaagacggccgccggctatcccgtcacggcccgcgtcagcgtggtggccacacagccgtcggcacccctgccgcagcccgtggccgagcccctgcccctgggcagtgtgcagctcatcggcgacaaccgcctgacgcacaaccgtgacctcgacatcgacaacctgctctcgctcgacccccgtcagcaggtctacaactaccgtgacacctacggactgtccaccgacggctatcccgaggctgacggatgggactcgcccaccaccaagctcaagggccacggcaccggccactacctctcggccatggccatggcctatgtggcctgccctgacaaggccaagcgccagcagatcaagaagaacatcaagctcgtggtcgaccagatgcgcgagtgccaggagcgcaccttcgtcttcgacaagcagctcggacgctaccgggaggcgcgcgacctcgcacccgaggcggagcttcgcaccatgggcggcacgtggaaggacttcgaccgctacaagacggactacgcccactacggctacggatacatcaacgccattcccgcgcagcactgcgccctcatcgagcgctacgcaccctacaacaacgaggagggtgtgtgggcgccctactacaccgtccacaagcagctcgccgggctcatcgacgtggccaacctcgtcgacgacaagaagatatcggccaaggccctcaccatcgccaaggacatgggcctctggatatggaaccgcctgcactaccgcacctacgtcaagaccgacggtacgcaggctgagcgccgcgccaagccgggcaatcgctatgagatgtggaacatgtacatcgccggcgagctcggcggcatacaggagtcgctctcgcgtctctcggagatggtgaccgacaagaccgagaagagccacctcatcgaggccgccggcttcttcgacgcgccggccttctacgggccgctggccaagggcatcgacgccatacgcgaccgccacgccaaccagcacataccgatgatcgtgggtgcgctgcgctcctaccgctccaaccacaacccttactactggcacatcgccgacaacttctgggacctggtgcagggccgctaccgctacgccatgggtggtgtgggcaacggtgagatgttccgccagccctacaagcagatggtgagcatggccaccaatcccgccggtcccgacatcaacgagacgtgctgcgcctacaacctcgccaagctcaccaaggacctcaacgcctatcaccccaacgacgcgcgatacatggactactatgagcgggtgctctacaaccagctcgtgggctccatcaacccccatcgctatgccgtgctctaccagtatgccgtgggccttgacgccagcaagccttggggcaacgagacaccgcagtcgacctgttgcggtggcacgggggccgagaaccacgtgaagtaccaggaggccacctactacaccgctgccgacaccctctgggtggggctctacctgcccacgcgcgccacatggcggggcgtcaccttcagccagcagtgcaccttccccgccgagcgctccgtcatccgcatggagaaggggcgcagcgccttcaccatgaagctccgcgtgccctactgggccacacgaggcttctctgtcaccgtcaacggccgtgagctggccgccagctaccggccgggcacttatgtgaccatccccacacgccagtggcagcggggcgacagcgtggtggtgaccatgccttacggcccgcacctcgactacacgcccgacaagatggacatcacgcgcaagcagacctacaagcccatgtgggccgcggcgatgatgcgcggaccgctggtcatggcggccaaggacatacactcctgggaggaggccacacttcacagtcaggctgatgccgaccgcctgcagcttgtgcccgactatgacgccgacagccacatcacacactacttccgtctcgacgcgcccatcgaggacaccacctatgtggacaatgccactctcaccgaactgatgcgtgtggcggccaagcgcctcgaggagcagcaggcttgggacaacatgcagaccaaggtgccggagtatgcaccgtgggccaagaacggcattgaggccatgcgacagcgctatgaggcgctcaaggccttcctctccgaccaccagggcaacggctcggcgctggccagcgagctcaacgctgcgctgagcatgatgcgccccggcaacctcgccgaaccttccgacctcaaggaactgcttgaggcactcaaggccgcacaggccgtggaagccccctcgcagcggctcaaggacgccatggactatgccgagatggtcaaggcctatgtcaacgacggcagtggcaccaaggaccttatccgccgtggcctcaccggactgcgtgccgccatgcccgccaactgatttcatctgccaatctacccataaaaaggggcaccaacccagagaaggttggtgccccttttggcttcgtcaggagctttgccaggtgcttcgtcaggatgaacggcactcctcctctctacctcctcccctctgtcttgccggcgtgacagggccgcatgtagccctgtggtctgtctgccgggggcctccgccggcactcttgtcagcctttcctcctcacagatggcccacagggacggccacaaaatgaaaatcggcggcaggcatgcccgttgtcatgacgggatcagcctgtcgccgatgtgcatgaggcggtgaatgacggcatccaccgctacgttttcctgcgcttacttcttggcagcggccttggccttggcagccttgatcttggcctgctgcttgtcaaacttcttccaagccttctcggccgtagcctt

SEQ ID NO: 4220 - DNA, 15785 bp, synthetic construct
  source 1..15785: mol_type = other DNA
  misc_feature 1..15785: note = Synthetic
tataactcaggggcggagaaaacaatgccgtcctcttcgttgtaactgaaagacacaccgtcaaccataagcagcgtggccactttgtgcttcacgctctgcgtctgccattctttgatttcacacatgttcttttaactgttaatttgttggtctcggcaaagtttcgtaactttgagcccctattcattattgaatacgctgcaaagatagtcaaaattttgaaacaagcaaagaaaatgagcgaaaaattgaccgtaaagagaaaaattttgtcttttttagagaaaataggtattcaaaaagaagaatactataaaaaaataggagttgctccttctaattttaaaggagtcggacttcaaagtatgccggggggtgagataatagtcaaaacattgactctttacccacagctttctgcagattggctgttacgtgataagggggatatgctcattcaaaattttgaaacaaacaaagaaaatgagcgaaaaatttctgaaaaaaataaaaattcttcagaaaaaattcctgttagcaactcgaaggctatcccacttataccgttcagtgcaatggcaggagccttaacgggggaaaagtctgtcctggaatacgagtgcgagcgttatgtggtaccggctttcagcggggctgactttcttatgccagtgaaaggcaacagcatgatgccgacatacatatcaggcgacatagtggcttgccagcgtgtacccatgtccggcttattcttccaatggaacaaaccctacgtcctcgacacggcacagggggcaattatcaaacgcataaagccgggatctgacaagcagcacgtcctcatcgtttccgacaacaaagaatatgatccgtttgaactaccatacgaggacatctatgccgtagcccttgttatcggcatcatccgcctcgaataatctggacgcagattattttttaaaacaatttttggaataattgatttttatcattaagtttgcaaaaatatggcaagtataatcagtaaatatatttcgcagagaatgagtgtcttggatctgaaaaaagaactcagtcgattgcgttctgaatataacaggttgactggacgcaacttgttcatctatgctgctgactttaacaaggggaagcaaggtatagacgtcagtcttatgcaagatgacttttatatgattcaggacattttgcgagagtctgacaagaagcaaattgacatttacctggaaactcctggaggaagtggagagtctgctgaggaaattgcaagattcctacactcaaaatttgaggaagtgaatttcgtgatagcaggggaagcaaaaagtgccggaaccatacttgccatgtgtgctaataatatttatatgtgcagcactggcagtttgggaccaatcgatgcacaggtaagagttggaagaagtacaatctctgcctatgactataagacttgggttgacgagagaagggaagaggccgcaaaaaaaggaaaattgaatccatttgatgctttgcttatttcacagatctccccaggtgaaatctatggcatcatgaattcgctgcaattcgcacaggatcttgtggaggaatggctgccgaaatacaaatttaaggactggataactacagaaactcgaggtcttcctgttactcaggaaatgaaagagaaaagggcaaagcaaatttccgagaaactgtgcaatcacatggattggcacacacatgggcgatccctcaaaatcgaagacctcaatgcagaactgagaattgaaaatattgacgataatcctaccctcgcgaatatagtctataggataaagactgttatccgattaatattcgacaccagtactgactttaaactatatttctgggaagattgcgaactggcaagatctgccaatgtggccagtactccattcaacaaacctgcagcacagaatgacgttaagagcatagaagtggtcgagttcggagttccatgtcctaaatgcggaaaagaacataaaataaagggataccctaacctttcaagcgcagatatacgaagactccatctgcaagtaaaccctttagtaaaagataatgacctcttggtctgtgatactccaggatgtgggtttacaatcgatttgaaaccaattaaaaatatgtttgaaaatcagttcaagaaaagagtcacactaaaatagcaaagcaatggaaaagaacgacaaacaaccaaaaggttttagcgaagtcctcgatttcatagaaaacacaaaagatgggaagtttacagaaggaggagtctctattacagaactcatgaaatgcaccatttcacgtgaagagattgcgtatatccaaaatgaaaacttccaacacaacgaaatcattttatatggcctaagttgaaaccctttgacgcatctaattggtaccgagttatagccctgccttgtgtagggcttttttgtcacccccatgctcccaggtgcccccatgaggggtattccccccacccaaacactacccaaatacacacgaaatcccccatttatggggctttacgccagattacacccccgacaaagttgcacgaaaagggtcagtttcctacactttactccatttttttgctcgttgcccccccctcacacggtatgcgtgggcaagagttttgtaaccccagtttcccgaaaatgtaaccccactttgtaaccccacctgtaaccccacccctcgtttttcgccaatttcgccctctgggaacggaacacggacttttccagacccaccgccttctaatgccatcagaacaccgttcaaacgtggacgcaatataaagcccacaaaggatttacccacacacaaacaaaaaaggccacacgcgtaaacgtgcagccctctgtgcgtaaatctatcgtcccacggacgtaaacgaatttgcctcaaacgtaaagcaaacgtaagcctatgtaaacgtttcgttttgtgccgacctcacagcctcaaccctcgcaactctttgtaaataaacggctttctgtgtttttcgtcccctctctcccttatacgcttcgttctgtgccccatagaaaagagcaaaataatccctaagttcaagagaaaatcaaaaaagaaattcccattcgaagacatagccaaggaattggctggtaagaaaaactattgttacttcaaagacaaggagcagaagccttataagttcaattacccgatggatacatcagtatccggaagtgtggtcaatgcccaacttgaggaaatcttcggcagcgattggaaaaacgccgtttgcgaggtctatactttgtctgacggcaagacacaagacgaaatcgtcaatgacgtctggcatgcattgttcttttatgacgatgaagaaaaactcaaaggttttgccaaaaaccgcttacaactcagtgatgaggagtcggagaaattctgcaaaataacactaccaagcgattacgcagcactcagcatgaaagccatccgaaaaatactgccttatatgcgcgactacggactgatttattcaaaggccgtctatttggcaaatttgggagaggtaattccacaagagatttgggaaaatgaggaggcacggaagtctgtgatagacgaagtgaaagatgtgatggaaaacgttgaaatcggcaaactttcaggaaatttaggaactgttgtcagagaatatttgagccaaaagtatggtgttgacgaaaatgctttgaataggttgtaccatccgtccatgttggaacattatccgcaacagcgttccaatagtgatggcatcttccaacttggcagtccgcgcatcaacagtgtacgcaacccgatggcgatgcattcgttattcaggttgagaaaagtggtcaatctgttattgaaagagggcaaaatagatgaaaagaccatcattcatatagagtttgcaagggaactgaatgatgccaacaaacggaaggctattaagtttctccaaaaaataaacgaaaacgaccgagatgcatgcagaaagaaaattgaggaattgggttatacctccgtttctgacacagacatcctgaaatatcaattgtgggaagagcaaggccaccaatgtctttatacaggcgagcaaatcggtgtgaaggacttcttgggagaaaatccgaaatacgatatagagcacaccataccgcgaagtgcgggaggtgacagtaccaaggaaaacatgaccttgtgtagcagtaagtttaatcgcgaagtaaaaagaaccaaactgcctacagcgttgccagattatgatgaaatcttgatgcgtattgagtttatgagagagaagtatgagagtctggacaagcaaataagggcaataaagcgcaagtcagcaacaaccaaggagcaaagggattcggatattcaaaagcggcatcaattaaagatgcagcgcgactattggaaaggcaagtacgaccgattcacgatggaagaggtgcccgaaggttttgctcgcaggcagggtgcaggcatcggcttgatttcgcgctatgctcgcctatatcttaagtcggtttttgagaaggtatatgtggttaagggtaatgctacagcggaattcagaaagatttggggtattcaggaagaatataccaagaaggagcgcgtgaatcatgttcatcactgtatagatgctataacgattgcttgcatagggcttgacgagcataacaaacttgctcatttttaccatcaggtggaagaatataggaacaacgaaaagaatagacctcaattcgtaaagccctggccgacatttacggaggatgtcatgaaaattcaagatgagttgcttgtggcgcactatagtcaggataatatgccgaaacatacacgaaagagggtaggcaaaacgtatatacaaggtgataccgcgcgtacatctcttcacaatgagacttattatggtgctattgaaaaggatgaggaggtgaaatatgtagtcaggaaaccgcttgatggcatggaagaaaaagatgtcaagaatatagtggatgacgtggtgcgccaaaaagtggaagatgctatagcaaaacacggaagtctgaaaaaagcagtggaatccacaatctggatgaatgaacaactgcaaatacctattaagaaagtacgcatttatgcaaaaaatgttgttagaccactgcaaatacgccagcagcgtgaccaatcaagaaaagaatacaaacgccagtaccatgtagagaatgaccgtaactatttgatggctatctatatcggtaaagataagaaagggaaagaaaaaagagactttgtggtggtaaacaatcttgaagcagctaaatattacagacgtagcaacaatgcggaaggaggtttagtgccagatgtgagcgaaaagaatggtttctcccttgcttactgcctgaagataggaacaatggtgctgctttatgaaaaatctccagaagaaatttggttgtccgataagaaagcttggcagagaagactatataaagttacgggactttcttctttggtgataagtagttatgtgtatggtacaatatcattgattcatcatcaagaggcaagaaggagcagtgaagtaaaactgaaaaatggtgcttatgcttcaaatgaggaattaagatctggcattaagatgtatcatacccaaattaatgccctcgttgaaggagttgattttgtactgaacgatttgggcgaaatcaagagactaagatgataaagcagactttaatatttacaactccagtgtctttgtctttaaaggattgccagttggttatctcaaagaaagaagacgataccattgtgacgcgtccgatagaagacatcggctttgtggtggtggacaatccgatggtaaagatgacagtgccattgataaatgctttgacagaaaacaatgtggctactatcttttgcgacagccgtcaaatgcccagttctatgctcttgacgctggagggtaattccactcagcaagaaagttatcggtttcagatagaggcaaaaaagagtaccaacaaacaactttggaaacaaatcatagaagcaaaaataaaaaaccagtcggcacttcttaaactagtgggtaaggatggcgacaaactaaagccatattatatgaatgtgaaatcaggggattccgacaacagagaaggcattgcttcacaaatttattggaaaaccttgtttggcaaggatttcctgagaagccgcgatggtttttcgccaaacaatctgctgaattatgggtatgccatacttcgtgcagcggtggcacgcgcgttggtggggtcgggactcctgcccgcttttggcatataccatcgcaatcgctacaatgcttttcctttggcagatgacattatggaaccataccgtccctttgtggatgaaatagtttaccaccaatatatggatgaagaagttgatagtcttaacaaggaggtaaaaatacaactgcttaaatgcctgacgtcagatgtaaaaatgaataaaatagtaagacctctgcagattgcattgtcaatgacaacggcatcgcttgtgagggtgtataaaggtcaggaaggtaaattggtgctcccggaaatgaaatgagtgaaattagactaaatgcatatcatatcatgtggctgttcgtatttttcgacttgccggtaactacgaagaaagaacgcaagcaagccgcacagtttcgtaaggaactgatgaaggatggctttgcgatgatgcaattttctgtgtatatccggcattgtgcttcttatgaaagtcagaatgtacatctcaaacggattaaggccattgtgcccccgaaaggaaagataagtgtactcagcgtaacagataaacaatatgggaatattctcaacttttggggcaaagaaaagaaagtaataagcgaacctgtacagttggaacttttttaatacttttgcaaaaagaaacctatatttttccatttcctaatacataaatacataagttatatactgaaaatcagtaaaataaagcgattaggttgtggtttgatgtaggaaccaaggatataacaacgagtgtgatggagtgtgagtcgtgtgtggtgttgtggtttgatgtaggaaccaaggatataacaacccgactgctgggtgacattcaggcggagctgttgtggtttgatgtaggaaccaaggatataacaactcttgtgagagacaactataatgaagattgttgtggtttgatgtaggaaccaaggatataacaactgacctgcgtcgtcccgtcgcagccgagacgttgtggtttgatgtaggaaccaaggatataacaacacgtgcacccgcatcatactgctcctgtggttgtggtttgatgtaggaaccaaggatataacaacctttcgaccagcagtaaggacagcggacatgttgtggtttgatgtaggaaccaaggatataacaacgtaacgcgcggctgtgtcttccaccacttgttgtggtttgatgtaggaaccaaggatataacaacgattttgagtatttagacgatgccgatttagttgtggtttgatgtaggaaccaaggatataacaaccgctcgaaacacttatgcttagtatgaatgttgtggtttgatgtaggaaccaaggatataacaacagtaatcgtgccacccttgcctgcaataggttgtggtttgatgtaggaaccaaggatataacaacccggattttccagatgtttcaggatttccggatttttcggaatttctcggttttggcttttgtgggggcttttcttttacggaaagtccgggatgtccggaaagtccgggatgtctggaaagtccgggatttctggaaggtcaggaaaatccggacaatctggaagtttgatgcgggcacaaaggctatatcaactttttatgtaaatttgtaggtgaaatcagcaatagaatatagaatgcttatggtgtcaaaagaaaagaacaagtcaaaagaaaagaacataagtctggaacgttacgaagatggcacaccgagcgttatgcgcaaggcgacagtctatacagagttatacttctaccgtaagagcgatgtgcttgttcaactcacaaaagaattctgcaatcgctttcttccccgttatggcgaccgcaccaaggaccagatgatacaggctgcgcgctccataaagcaaaatatcgctgaagggcttaccgacgggcaaacatccttcgagatggagataaaactgcttggcactgctaagggcagtaacagggaactcttggaggattaccaagactatattaagcagcataacattcccgaatgggcaaaggaaaacactggccgatacaatgttatgcgcaacttttgctatgagcaccacgacgaaaaagattaccgcccctatttcacacgctggaccgacgaggagatggcaaacgtcgctatctgcctgtgccacatggtggacaaagccctgaccactttccttaaaaaacgcgaccgcgagttcgtagaagaaggcggcataagggagcgtatgactgctgcccgccttgacgaacgcggtacacagaagcaaatcattgcacagcaggaacgcgaaatagcagaactaaaggcgaagattgcctctcagcaacgcgaaatagaagtgctcaaggctcagataaacaaggcggaagcggatagcaacgatttttccggatagtccggatgttccggatgtttcgggatttccggaaatttcgggcttaaggcgtcgtgattttcctgacgatgtcgaactgtgtccattcgggcacgagttgctgatagacatccttcaagtcgctgagggtgatgtctatctcgcggtaggtttcgcgaggattgtcggcaagattgtgccaaaagagccagtcgtaggcctggtgggaatacatgagacgggcaaggtcgccgtgactggctcctgcccaccagctgtatctcaggagtttgtcctgcccgctttcctgcagggcgcgtaccacctttttcgactcttcgatgttgatggcgcggtcggctgtgccatggagtatccagaggggtagtcgtccgagtcctgacttgtctttcagcgtggttccgccgcagatgggcatggcggctgctatgcggtcggggtaggtgccggcaaagtccatcacgccgtagccgccgagactcatgccgatggcatagaatcggttgctatcgacgtcgtagttctgctccacccattcgaggcattgcatgattttctcgggtttccacggtccgcccgggttttgtggtgcgatgatgaagcaggggaagtagagcccgcgctgcagggcatcgagaggaccgtatcgtctcactttctgcatgtcggtgccgcagaggcttctgccgtggaggaacacgaggacgggcactcgctcgccgtccaccacgtattccggcggtgcatagagccaaaagttgtagccgccttcagccgtagccttcatggcagccagttgaccccgctcctgtgccgagacttggagcgaggcgaaaaaggtgctgaggagcaatagtctgatgaaggagcgttgcataagagaggtcatacgaactttccttcgtcgtccatttgtgcctgattgatgtatgtgcgcaggatgtcggtgttgttgttcgggcagaccacgatgacgccttgctgcatcgccacgaggtagccgctgaggtccttcaggcagacgagtgtgccgttgggcacgctgatgacgttgtccttgcaattcgacaacatggcgatggctcctttatcaacagcattaccatccacgtccttcttcatcacattgcgcacactgtcccacgaaccgacatcagcccatccgaagtcgcattcgcgcacacagacattggtggattggtcgaggatgacgaggtcgatggagatgcgcaggctggcggggtagtactgattgatgagtcgtcgttcctcttctgccgtgagcacgcgcttctcttcgcgccagtgttctgccacaccgggcatgagttgctcaaggcggcgtgtcagtgtgggcagttggcagaggaacaatcccgtgttccatacgaattctccacaatcgacgaacatcctggcgtattcctcgctgggcttctcgctgaacgattttaccttgtatataggtgcttcttcgcttgtgagttcgcctttctgaatgtatccgtaggatgtgttgggcatggtgggctttgcgccgagtgcgaggatttcttcgtggtcctccacgtaattcagtccttctctgacatcctccttgaagcgttcctgattgatgatgatctggtcggctggcgaaacgatgatgttcgccttgggatcgatctgctcaatgtggaaggctgcccatgccacgggaggtgcagtggagagttgtacgggctcttcgagtatctggtcgcgcctgagttcaggcagttgctccaacacgaggtcaacgtacccggcatacgtggcaacaaagatgtgttccggtggaattatttctgcgaagcggtcgtacgtctgctgtagaagcgatctgccaatgccgaagaggtccatgaactgcttggggtatatctgtctgcttacaggccatagtcgcttgccggatcctcctgcgaggatgatgcaataatcgttgtgttttatcatttttgttcaacttttacaaggttgcggggcattgcttgttctgcccatctttttttgcaaatgtatgaattcctacttttataacgcaaaaaaaatgttattattttgttaaagggtcagagagttgcttaagcaggtgaaactttgccggtatgcgcaaaaaaaatgtttaaaaagtttttccgattggcgccgttgcattatctttgcactcgctaagcccagatggcggaattggtagacgcgttggtctcaaacaccaatgccgcaaggcgtgccggttcgatcccggctctgggtacaataaattagcacttaaagcactgcaatcagataggttgcggtgcttttaatttttgactattggtaaatcactggcaaaaagccctcttttcatgtttgtttttattaaggtgttgctgttttatttacaaaatcaaaaaaggttgtaatagtacaaccatttttcctataaatcaaccttatctattcgcagtttcaagagccctgccgggacagccacctctatggtgtcgccggctttcttgttgagcaacgcctgacctatgggcgactttatggagatttttccctcgcgcagattagcctcgtgggggctgacaatcgtatagttcatttttgcgccagtggtgaggttggtcatttctactttgctgagcagggctatgctgtcgctgttgagccgcgacttgtccatgacgcgcgcatacttcagcacattctgcttgaagcgtatgcggctcagcaggcgtgcctgttcgcgctttgctgcatgatactcgaaattctcgctgaggtcgcctttgtcgcgcgcttcagcaatagcatctttcaccttgggcagttcctcatgtatcatctgccgcaattcctctacaagtttgtcgtagccctcttgagacatgtattccatggttcattcattttttgcgaaaagcaaaggtaagtaaaaaggctgaaagccggaaatggggggcagccaaaataagacggctgccccacggagtgtttactcttgaaggggcagccgtcgttctaatcccaaattctattaccttttcatcattcttaaccttgcatattatattttttcacacattataggtatgttttgcgatagtggttttagaatccatccggtccgccaaaaccaccagggcctccgaatccgccagggcctccgaatccgccaggtccgccttggaagccgcctccgttcatgttaggcctgttgccgccacggcgcatgccgcggtcgttgaaaacgctgtacacctgctgtggggtgagtttttcgctgaatttcttatagtattcgcgtttcagccttactgcggcttcttcgcgtgcaaagccttcgagcacttttgctgtggcttcttcatcggtgagttctttcttcttcttatcgttgtctctgtctctgtttccgaatccccccgggaattgtgtgcccatcaaggtgtcgcggtattcggtatagagcgaaataaaccattgcttggtgtcgccgtcgagtttcatctcttttgctttctgttctgccatgcggccaatcatttccttacggtcgccacggccgcgacgtccgccctgatcgttttgggcagacatgcttgtagcaaacagtgctactgccataatcaataataattttttcatactgttttttttgttgttgaaatttgatttacatctattagacgcaaaaaagttgaaaaagtttgcacgcaatcgattaaagaaatgtttttatcgacaaaataagtttttttgagtgccgaatattccgatgactccgactatttctgtgtattccgaatactcggaagactatctgctgactttcgataaaattttttatctttgtgcgtcaaatacagtaatgatggcaaacgagaaggacctgaaactttattactccatcaacgaggtggctgaaatgttcggtatcaaggacaccactctccgtttctgggagcgtgagttccccaagcagatcaacccgaagaagacgagccgcaacgtgaggcaatacacaaaggacgacatcgagcagattcgtgtcatccacaatctcgtcaaggtgcgcggtctgaagatttctgctgcccgcgaactgctgaagaagaacaagagcggtgtgcagcaggaggcagaactcgtggcgcggttgcagaaaatacgtgccgagttgatagccataaagaaaaacctcgaagaactggaatagtccctgaataatcaattatttaagtttcgggagttccatttgctcgaagttaaagaatttgaagaagttatcgcttcgatcgaagttatcggagttaacgaagttaacgacgatacttaggtacgataaaagaaagaaaaaagaagacatcagcataaggtctcgtcgttaacttcaaggtgtttcgataacttcagaaagtagaatcaattataaaataaaaaacttttccccgtggcacaaaagtcaaaaaccgttttcgtctgctcaaattgcggctacgatgcgccgaaatggcagggcaaatgccccagttgcggacagtggaacacgttcaaggagatgaccataatgccggaacgtcgcagcgagaagatagcctccggtgtgctcgataacggacataagtcggagcccgtgcgtctgtcttccatctcggctgccgaggaaccgcgcatcgacacccatgatacggaactcaaccgtgtgcttggtggcggacttgtgccaggctcgctcacgctccttggcggtgagccgggcatcggcaaatccacccttctcctgcagaccatcctcggtatgcgcgacaaaaacgtgctctatgtgagcggcgaggagagcgagcggcaaatcaagttgcgcgccgacaggctgaaccatcagggcaccgactgcctgctgctctgcgaaacggagttggagcgcatattcgcacacatcaagaacacgcagcccgacatggtggtcatagattccatacagaccatctttacctccaccatcgactctgctccaggcaatatcacgcaaatccgggaatgcaccgctgccatactgaaatatgcaaaagaaagcagtgttcccgtcattctgattggacacatcaccaaagacggcaccattgccggaccgaaagtgctggaacacattgtcgatacggtgctgcagttcgaaggcgaccgccactacttctaccgcatcttgcgaagcataaagaaccgcttcggcagtacggcagaactcggcatctacgaaatgcgcagcgatggactcatcgccgtggaaaatccttcgcaagtgctcgtaaacgaagacaatgccgaactcagcggcgtggctgttgctgctgccatagagggtgcgcgtccattcctcatcgagacgcaagcccttgtcagtacggcggcttacggtacaccgcaacgctccagcacaggcttcgacacgcggcgactcaatatgctgcttgccgtactcgagaagcgcgtggggttcaaactggggcagaaggacgtcttcctcaatatagccggtggtatccgcgtgagcgaccctgccatcgacctgagcgtcattgcagccgtgctttcgagcaatgtggatacaggcatagagcgcagcgtgtgcctcacgggcgaagtggggctgagcggcgagatacgtcccgttacccgcatagcccagcgcatcagcgaggcacagaaactcggttttgagcggatgattgtaccggctgccaacgtgaaagggctcgacaagaaaggcatcaccatagaactcgttcccgtgaagcgcgtggaagaagccttgcgcgccttgttcggataagaattcgtcaagttatgatatcacttcgtctcccacctgaaattgcttatactcccagtcgtcttaaagccgcttgtgctgatgagatgggggtggatgtggcaagtattaaggacgtacgcatacttcgccgtagcatcgatgccaggcagaggcagatttttgtaaacctttctttagaagtttttatcgatgagcctgctcccgaactctattttgctccgatagtatatcccgatgtcaacggaaagcctgctgtcattgttgtaggtgcaggaccgggtggactttttgctgcattgcggctcatagaactcggtctgcgccccatagtgctggagcgaggcaaggacgtgcatgaacgccgtaaggacattgcgcttatttcgcgagagcacacggtaaacagcgagagcaactatagtttcggcgaaggcggagcaggtgctttttccgacggtaaactctatacgcggagcaagaagcgcggcaatgtagagaaaatacttcgtgtgttttgccaacatggagcatctactgacattctttgcgatgcccatcctcatatcggtacggacaaattgccgcgcatcatcgagcgcatgcgcgaacaaatcatcgcagcaggtggggaagtgcatttccagacacgcgctgatgcactcattatagaaaagcaagaagtcaggggagttgttgcttccgacggcagggcgtacgaaggtcccgtcattcttgccacggggcattcagcacgcgatgtttatcagatgctccaccgctcacaggttgccatagaggctaaaggacttgccgtgggcgtgcgtctggagcatccttcacatcttatagaccagatacaataccactcgcgcgagggtaggggaaaatatctccctgcggcagaatacagttttgtggcgcaatgcactggcgctgtgcagcagaaagcgaagaagcgtggcgcaagcgtacagaagggcggtggcgtgtcgcgcggagtgtacagtttctgtatgtgcccgggcggttttgtcgtgcctgctgcgagcggtgcggagcaactcgtcgtgaacggcatgagtccgtcgaacagaggttcggcatggagcaacagcggcatggtggtggagttgcatccggaggatatagacaacaacttt

SEQ ID NO: 4221 - DNA, 15719 bp, synthetic construct
  source 1..15719: mol_type = other DNA
  misc_feature 1..15719: note = Synthetic
ccgtcggcaatccatggctttgccgccgtctctttgatgctttgccgttagcaattttatgcgttgctgccggggtgcttttctggttgtttcagccctgctgggaggcacttcagggctcgtgtgcgattttctttaattacggtacaaagttacgacttttttctgagatatgcaagtaaatatagattttttttcgaaaaacggcgatttttttacaaacgccgtcacgccgtcacgccgtcacgccgtcacatttcaaaaaatcatgtttccgtcacttcaacctcaaatcaagttacattatatattatgtatataatatataatgtaaggtaaaggttcacattttttggctcccttctcctccctccttcaacaaatgaaaattgcaaatgtgacggcgtgacggcgtgacggcgtgacgcacaaagtcctcacgacttgtgccttttttgtgctgtgatgaaaaaagttgggggaaagtttggttagaaaggagaaaagtgcttaatttgcgaaagaaaaataaaacctgtatggaaggaactgaaatgagtgtagaaatacaaacaaataacgaaaaactgctacaactgtagcagatatcaaagaggccatcctgcaagggcagtatgaggcagccaagggagtgaatcgcatccaattggctgtatactttggcataggtaagtatatctcgcagcatacacgaaaaggagtatggggtactggcgctttagatacaatcagtcatcagttacgtagagaactgccaggattgagaggcttttcggccaccagcctcaggaatatgcgaaaattttatgagaactggattatgcttgatggtaattcagcaagtgcgcttgcagaattacaaagtgcagacaatcagaatgatataaaatcagcaagtacgcttgctggaaattcgacaaccgcaattgctgatatttcgtccatcgcaacggacgaaagaaatgcgatagacatctaccatacaatacaggcacccgtgacagaggatttcccgatagaggatttcttcagggtaccttttacgcatcatatcaggattattgaagggaccaaggagattgcggctcagtattactacattcacaggacagcggaggaaaacttgtcggaaaaagaagtgattcggttggcgaaagaaaatgcctatgcccatcgtgagcagatgcccagtaacttcacaaagaccatttccaatgttgcgatgatgcgtaaggctgttctttggtagagagcattggccagttgatggcaatggaggaagaagacaacgaccacaaggctgcagggctctaccgcgctatgtttcggcacgaaaccgatcttgacaagttggatcacaactatgccgaccacatattaagttatgcttcatgtggttgcgagaatgccattgaagattacaagaattatctccaatacataaagacgctgtatccgtcagagtatcttgaatatgccaaaatgttggaagacgctctaaaaacagatatagaggagaacaagaaatgaaccataaatggcagtcacgtagttgcaggcacgcctgaaacgattatagggttgctgaaataaggataatcggtaccacgagaataggcacaaagtcccacgacttgtgccttttttgtgctgtgatgaaccaaaagttggggaaaagtttggttagaagggagaaaagtgcttaatttgcaaatgcattgtgtttgcgagtgctgacccttgggacacagtgctggactcccatagaggaggacgtaaattgttgaccgactgaagtgaataaaataattggataaatatattaggtcaccccgttgggctgtgaagttcgatggggcattttaagaaaagaataaaattaaagatctggaaaatacaaattgcttttacttctcaactttcagtattttgacaaaaaagctcccaccgaagcgggagcataggttttacccttcggccataatggccttattgtgataagatgtaggaatcttacgctgcaaaattagagaaaagttttgtcatgcaaaatatttttcgttactttacacgcaaaattagaaatctttaacttaaactttatatgatggaacgaattttaggcattgatactggaacgaatagtcttggatgggctattgttgaaaagcatgatgatgaatataagttgttggagaaaggtacaaatatttttgccgaaggagtaaaaatagaaaagggtattgaatcatcgaaagcggcagaacgtacggaacatcgttctgtgcgcaaacattattggcgacgtaaggtgaggaagattcgtcttctaacgatattgacgaagaatcgtttgtgcccgcctgtctcaaatgcagatatgcgacaatggcgattgaagaaaatttatccaatagacgagaattttatggcctggcaacgtacagaagataaaggaggtgtgaatccttatcatttccgttatatctgtttaacacagaagttggatttgacgaatttgacacagcgttatatattgggacgcgccatttatcatctgaatcaacgtcgtggtttcttgagcaatcgcaaggaatccaccaaggagtcggaaggtgctgtaaaagatggaatttcagatctgacgaaagacatggagagtgcaggatgcacgtatttaggtgagtatttctatcgtctatatgagaagggtgagaaaatccgttcacattatactgcacgaaaagagcactatcttaaagagtttcgagctatttgcgagaaacaggaacttgatgcagaattagtggagaaattggagagagccatatttccccaacgacctttgaaatcgcaaaaggggcaagtgggtgtgtgtactttcgaaaaggggaaagcacgctgtcctatttcacacccgatgtacgaagagttccgtatgtatcagtttatcaacagcatcaaagtgacagctcgcacgttatatgagaatgaggagagaagcttgactgttgaagaaaaaagacgaatcattcctttgttcatgcgaaaatccaagactttcgagttcagacatattgccgagaaacttgtgggtaagaagaattgttgttataaggatgatgatgtagagggcgcctatcggtttaattatcagaaagactattcggtgccaagttgtactgtaaccaaacagttacaagatgtttttggtgaagaatggatggactctgtgtgtgaagtgtacaccttggctggcaagaagtcgcgctttgaaatcatgaatgatatttggcatgcactgttcttcttcgatgatgaagagaaattgagggagtttgccaagaatcgcttgcaattagatgaagctgatgccgagaagttcagtaatatatccttgcccaatgattatcctgcattgagtttgaaagcaattcgaaaaatactcccctacatgaaggactatggtttgatttattcccaggcagtgtttttgggtaatcttgtagaagtgcttcctcgtgatatgtggggagtaaaggaggtgcgagatgctgccatcgaaaacgtaattgagatgatgcagtcttatgacaagaagtttgaagcacgtacgatggaacaatgtgtgaaggattttctgcgtgaccgttaccatgtggatgatgctcaactcaaaaaactctaccacccttctatgatggatctttatccacgtgtccgtcctgatgatgatggtgtgtatcagttaggttcgccacgcattagcagtgtgcgcaatccgatggcgatgcactcactcttccgattgagaaaggtggtcaatcttttgctgaaagaagggaaaatagacgagaacacgaccatacatatagagttctcgcgtgatttgaatgatgccaatagacggaaagccattcaagattaccaaagaaagaatgagaaggaacgcgaagcttgtaaaaagaaaattcaagagtttggtattgctaatccgacagatagggatattctgaagtatcaattgtgggaagagcaaggtcataaatgtatctatacgggggacgaaatcggactggtggattttttaggtaataatccaaagtatgacatcgaacacaccattcctcgcagtgtaggtggagacagcacaaaagcaaacctcactctgtgcaatagcgaatacaatcgcaaaacaaagaaaaccaaacttccatcagagttggtggagcatgaagatatcatacagcgtatcgctggttggaaagaaaggtatgaggaactggataagcgcatccaaaagaaaaagggaagtagtgccagtacaaaagaagacagagataagattatcaaagaaaagcatctactatctctggaacgtgactattggcgtggtaagtatcagcgatttaccatgacatcagttcctgaaggtttctcacgtaggcagggaacggacattagtgtcatttctcgatatgcgcgcctctatctgaagtctgtcttcaaacaggtctatatcgtgaagggtatagccacttctgattttcggcagatatggggaatacaagaagaatacaccaagaaggagcgcgtgaatcatgcacatcattgtattgatgccatcaccattgcttgcattggcaagggtgagtatgataagttagcgcagtattaccatgctgacgaagcctttaagtggggcaaagccgttgacaaggcacaattcccaaaaccttggtcaacatttgtggaagatattaaggcagtccaagatgaacttctaattgctcattatacaaaggataacatggcaaagcatacccgtaaacgtggagagaggggttatatgcagggagatacggcaagagcatcgttacataatgatacatattatggtgccattcaagtgggcgacgaagtaaagtatgtggtacgtaagaattttgatagtcttgaagaaaaagacgtgaagaacattgtggatgttactgtacgacagaaggtggaagacgctattgccatgcatggaaatttgaaggatgcacgtgatgctggtatttggatgaatcgtgaaaagcatattcccatcaagaaagtgcgcatctttactccatcagtaacacgtcccatcaatattcggcagcagcgtgatcaatctcgatttgaatataagcggcaatatcatgtacagaacgaccgcaattatatgatggcgatttatattggatacgacaagagggggaaagagaagcgtgcgtttgaaatagtcaacaatattgatacggcaagataccataagcgtagcaatgacagtaatgatggtcttgtcccacagacgcatttggatagtggttatccattggcatattgtttaaagattggaacaatggttctgctgtatgatgaatcaccagaagaaatctgggatttagatagaaaggatttggtgaagaggttgtataaggtgacaggattgtcatcaatggttatctcatcatataattatggaacaataaatttggtgtatcatcaggatgcaagacaaagcacggagataaaattgaagaatggcatttataagacagacgaggagttccgtcctggtataaaaatgcttcacactcaaatcaaagctcttgtccaaggtgttgattttgaaatcaatgatttaggagagataaggaggatgatatgataaaacaaacactcatgtttactacgccagcctcattgtcaatgaagaatgctcaattggtcatcactcggaaagatacggatgaggtggtgacacgtcccattgaagacattggttttgtggtggtggctaatcaaatggtcaaaatgaccgtcccgctgttgaacgcattggctgacaataatgtgtttgtcatcttttgcgatgacaaacaaatgcctaagtcaatgttgatgacattagagggtaacacgacacagcaagagagttaccgctatcagatggatgccagtgagcccacaaagaaacgattgtggaaacaacttgtggaagcaaaggtgagaaatcaagcggatctgttgaatcgtgtaggtcaagacggtgatgtactgaaaccatattatatgaatgtgaagtcgggagacacggataatagggaaggtgccgctgctcgaatctattggagtctgcttttcgggaaaactttcaagagaaatagagagggggagccacctaatatgatgcttaactatggttatgccattttacgtgcagctgtggcaagggcacttgtcggctctgggttatatcctgcctttggcatctttcatcgtaatcgctataatgcttttcctttggcagatgatgtgatggagccatatcgtccatttgttgacgagattgtttatcgtttatatatggatggtgcagcggaggaaatgaccaattatgtgaagagtgaattgttgaaagtgttgtttgttgatgtacggatgggaaagatgaacagaccgttggaggttgcattatcgatgacaacagcctccttgctaaaagtctttaaggatgaagaaaccaaattagttcttccgaccataccatgagtgaatttcgtttgaatgcataccatattatgtggttattcgtgttctttgatttgcctgtcgttaccaagaaagaacgcaagatggcatcggtctttcgtaagaatttgatgaaggatggtttcaccatgttgcaatattctgtgtatattcggcattgtgcatcttacgagagtcagcaagtgcatacgaaacgggttaaagcgattcttccagagacaggtatggtaagcattttgagtgttacggataaacaatatagtgacattgttaattattggggaaagaaacagaaaaaactgaactcaaccccattacaattggaattattttagtaattttgcaaagaaaactatacatcaaaatccacttcgtagaagtaattcttcacacaagtgtttgattatcagtaagaatataagtctatgttgtggtttgatgtaggaaaagagacatatacaacaccaagaaagtggccgagaaggtgaaggcagttgtggtttgatgtaggaaaagagacatatacaacctggcttcatcctcgtttgggtggtggccgttgtggtttgatgtaggaaaagagacatatacaaccagaaggcgggactacgaatcaaagtacgggttgtggtttgatgtaggaaaagagacatatacaacaagcaccacggttacagccaccatttctgggttgtggtttgatgtaggaaaagagacatatacaaccctatatgctcactatcattatccgttcaagttgtggtttgatgtaggaaaagagacatatacaacctacaatgtgctggcatcactcttgtcaatgttgtggtttgatgtaggaaaagagacatatacaactaaggatgttctcaaacaactttcacgacagttgtggtttgatgtaggaaaagagacatatacaacttctgagtatttgtaaagttagtaccagagttgtggtttgatgtaggaaaagagacatatacaacacagattcagatgattgtcttgttgatgctgttgtggtttgatgtaggaaaagagacatatacaactgcaccgcattcattcatatcttacggatggttgtggtttgatgtaggaaaagagacatatacaacacccttgcccattcatgtgtgggagcattgttgtggtttgatgtaggaaaagagacatatacaactgatgtcaaatgcttcaacatcagcaatggttgtggtttgatgtaggaaaagagacatatacaacctgctacagtatcgaatacccctccactcgttgtggtttgatgtaggaaaagagacatatacaaccttcctctttatttagttgcacgaacgtaagttgtggtttgatgtaggaaaagagacatatacaacatacggatttgaacgtctctacaatcttgcgttgtggtttgatgtaggaaaagagacacagatcacgggactgactcgatgggagaaggaaaatgtaagaagtctaattcaccctcccaatgaagctttatctacagtaaagggtgaaatggccaaatggtcatttcatctttttttgagggggaagatgaaaaaactacttccacaatggttcatcctgccatcctttggggaatcccatggctgcaggatccacaactgggtattttgtcaaaagatatttgaagtcctgaacaaatgtgttctggggattgatgctattgatccagtaggtaatgcagcaaagacttggatagagcttgtctgaagaaaaatgacggtttgctatccagttgcctctcatccgctcattcgtccttggaaccatcgagaaatgagcattccaaagtcttgcgtgatgggcacaggtattgcgcacaatggtcaaggtggcgagccaactttgaagacatttgtgctgtggaatattgaagctacgcgctacctgcttcttcacagcgttgtcattcatgttcttgtagagctttgacaatgttccgaacgaagccgcttcaagcgtcttccaagcaggaggcatgtctggctcatcatatttcctgaaatgttctgctatgaattcgtcgtgggaacggctaagttctgtacgcagataattaagattttcattgaacaaatcttcatcttctgctaatgtgtcatcaaggaaccagaatgctccatgagccaaggagaagaaatgaatgatccttgttctgacggatatttctatttgctgaatggcagcaaagatgagcgtctttagttctgaatcaaaattgtagcgagccacgacatcctcaaaacgactgccgggacggaacaagtgggaggaactgttttgttccatagtacgccaatatccagcaagacggaaatagcttatattctccagaactatctgggctttttgttcatcggtaaagataagtccacgacctttcagaatagcaatttggtcgttgattgaaatgggttgcttgttatatctcattgccctatatataaaaaacgccccgccctggttcgctggtcttcgggaagcgtggcgggttctgttgggtgcaaaggtagaacatttatttgatacaaccaaaagattatcttatttttttgtgtgacgacaaaaaaagtgggcgttttgctgttgtgatttgacggaaaagatgtacctttgtagtcttttaccaacaactaaatcaaaggaaggaggacgatatgtcgcagaatacagatgaactgaaattgattattgatgtggcctcggaaaagggcgtgatgcaggagcgttgtactcaactggaaaaggagaataaacaacttgaggagaagaatgcggtgctgaaaaaagaattgatggagaaggaggcaatgcttcgtgagaaggaagaacgaatcaaggaactggaggagatgctgacctatagaactgagaacaaacagggatggaccggacaaccgctggtggtggtgaaccaatactacctgcttgaccgacccaagaccatcagctacgtgtgcagcctggatgctgaccaccgcatgtttgctggtcacatgttgatgcacacgatgcctgacagcacacccaagcaggtgtacgaccaggtgacggagatgacgcaattgacagccaatccgtcggagcgcattgcagatgcgatggagaaggtggctgagcagccgaagcaggaatataatgtgtatcctcaggcaggcagcacggcgaatgtggggtgtgaccagaagtatgcggagatgaggtcgtacctgccggaaacggggggtgagggtgagcctaaatccataacgtctaacccatcatccggaacctgacatggaagagaagaagacaaacatgcagcaggcgatcttcgtctatggcatggcgaacatcgggtgtgaccagaggaatgccacgttccagacgttggtgcaggggtgcgagaaacaggaggtgaaggaggctgttgaggaggcaaagctttcacccaaggctactggtggtggtcgtccaaagaagagtgggacacgtatcagacaagcgttcagctgcgagggcgaactggtgcgtgtggggatgttctatcaggggttgtgtgccttggaatggattgacgcgaagacggatcagcatgatttcatcgagctgttctctggtggtgaggtgagtcaacgaatcatctggaagggtggtgccaacacgctggccgagctgttcaggaggctcgtgaatgagcgtcagctggtgggtctgcccgagaagcagacgttgtgggtgatggtgagcagccacttctggaatcagaaacgtggggaagagtttgcgcccgaccagttgaggaagtcgcatgcacccaaggagaatgaccagacactgagctatctggtgaagattcttgacccggaagtatccatgaaggagatacgcgaaatgatgcagagacggcgttaattcatagcaaagacggcgcctcttgaaaggctgaaatttcaagtgtaatttttattagttccgcaaatggctaaatatcaagctgtttgcggattttttatgcctttatgaaaacatgagacggcgttaattgcagttttcgccgtttcggcctgcagtgttattatagaaaccctcgacacgggaggacgggggtgaaagtaataacaatttaatcattcgttttatggaaacaaaaacatttttggaaggttgcttcaagaagaacgtgaagacctcagtggaaaacttgagtgacggacaacagatggacgaacgtgctttcctcatcatggagtgcatcaagagaaaagtgagtccgacgctcttcaacatgctgtgcgaaatgctgtacgggttccgcaaggaagtgcagcagaagatggctaccaacctgagaaacttcgtgtgcagcaaggtggcaaccaccacaggcgtgttggcagtggacacagcattggaaatcagctacgtgctgattggcgcagaaaggaaacaggttcagagacccatcaccaactcgctgttggcatcgaagctgattgaatgtcagcagaggaagacacagaaggaggcacgtgagcaaatcaagttggaacttcctcgtgtgaagaatccatgcggcatcgagatcagaaagagctgcaccacgtgcatgcacagattcgaggatgacgaagagtgtcaaatgtgcaagctgacgggtgtgagcgtggatggtattgacttgtgttcaggctggaagatggcagagggctatcagcaagcgggcagaaagagaggcaagatcaagaagaaggagtacctgatgttcgtgcagatgcagcgagagcaagagcacaaagccatcaaacagggcattttgaaggaagaggactgcaagacgagcgaggaactgagggcgatgtatgaggaagagtttggaaacatctatgaaaattgaaaattaatatggctaaaaagaaaaagctgccgagggggttacgaaatcgaaaccctctcaacatcaggaagagcgaccagctttggcagggccagacagggaacgacggcacgttctgcatattcctgaacaatgcgtatgggtatcgagctgcatttcgcatcctgaagacctacaacaccaagtatcacatctacagcgtgcgtgaaatcatcaagaggtgggcgcctgaaagtgacgggaacaacaccagagggtacattcagcgtgtgtgcgagatcgcttgcctgcgtgaaacggacatcatcgtggctgactcgcaggatgtggtgcagcaggagaatgtgaagttcttggtacaggcaatggcttgtgtagagaacggatgcggtgaaagccaaatcagcatgaatgaaatagacgagggctactcactcgcgtttcctaaaacaaattaataaccacaacacaaactcaaaacaatgaagaagtacatttttatcgtgaatgccatcgagctgttgaagcagctggtgatgggcaagagaattgaaggtgttctgtatatggacggcaacacaggtggtataaccttcaaggcgtacaatcgcgtcagggacaagcatccaaaggatgtgatggtgcgcaagactccatacgggtgggtgaagcagtcgatgctacgaatcaagcgattcaccagcgtgccgattgacatgtgcccctcggagaaaatgcaggtgcttgaccatgagaacgcagtggcgaaggaggccatgctggagtgcgaactcgcatctgtcatctctcaactctaatctaataactctaaaccatagaaaacatgttgtgttatcaagaaaattttttcagttccacaaagcctgttgacgaagcgcagttcgctgcgctcgtcggggcaggcaagtggaaggacaccattgacaagttccgtgagacgggcgacccgtcgctgaagaggaagctgcctgccttcatcttccaggcgacatttgacgagaccacatcaaagactggcaagaagggacactggcgcaagcagacagccgcccgactgaccggactcgtggtgatggacatcgaccacgtggagcgtccgcaggataagtttgaggagtggaaggagctggactttgtccagttgggcattctgctcgtgtacatcacgcccagcggcaagggcttgaaggtggtcttcaaggccgacccagccaagggcaatctgattgacaaccagcacgcgatggcgcaggtcttgggcgtggaggtggacgagagctgtaaggatgcctcgcgcatgtcgttcatctgcaaggaagaggatgtgctgtatctggacaaggagctgttcacgtatgagaacaaggcgtttggcgagaagtacgatgccctttatcgcgatgggcacagcgcggctgagagaacgaacacggagaagattttgacgaacacggatctaacagatagaacggataaggaaaatgatccgtcaaatccgagcaatccgtgttcagagaagaccttcaagggcatcccctacgccaccatcatcgagaggtggtggaagatgcagggaggtgtaccgcaggagggagagcgcaatgtgaagctctatcagctggcagtcaatctgcgtgccatctgcgacaacagcaagtcgctgctcatgcaggtgatgccccgcttgggactcgacgagcaggagctgcagagcatcgttgattcggcctgcaaggagacccccaagggcatctcgaaggcgatgagggagattgtcggcttggctgacgccaacgcccaaccctccaacctcaacgcacagctagaggattggggcaggcagattgaggcactgtttccgaagttccctgtgctcaaggacatctgcaagggcttgaagaagaatcagtatccagcggccgtgttcgtggctggtgggctgatgatgacgctgatgacgagatgcacttatcgcttctatcatcgtccagaagaactgaggagactgaacaactcgaccctgatcatcggcgaccctgcatcgggcaagagtttcgcgaccaggctctacaagctgctgactgcacccatcgtggcagccgaccaggtgggcaagaacgccatcaatgcctaccgcgaggagatgcgcacgaagggggcgaacaaggacaagcccaagaagccgaaggtagtggtgaggattcaccctgccagaacctccaacgcccagttcattcaggacatggtgaacgctgtggagacggtggatggggaaccgatgcacctgcacatgctgacgttcgacacggagctggacaacacggtctctgtgcagaagggcggctcatggattgacaagcagtcgttggagctgaaagccttccacaatgaggaggacggtcaggcgtactcgaacaacgacagcatcttccaagacttcaacgtgttctggaactacatctacacgggcacgcccatcgccctgaagaagaaggtgaacgaggcgaacttcggcaacggtcttgctacacgcctgacctgcattcccctgccatcgaccaacttcaggatgatggaacgcgagagcaatgtggacatcgagagcgatgaacgtctctctgcgtgcgctatgaagctcgacaggacgaagggtgagctgtccgtgcaaaggattgtggatgccctctacgactggacggcacgccgcatggaggatgcagaggagaacaattccaaggcagacgagatgctgctgaaacgctgcgcctatcacggactgaatttctcagctcccttcatcgtactgcgccattgggagagcctgcatgaggacggtcagtattggtgtggcacgttcgagacagacgaggtcgattggcagttagcggaactgctggtgaacatccagttcgcctgccagcgtcacttcttcggaaatctggcagagaagtacttcgactgtcaggagcacgaagccagcgtgaacgtgaaacgtcagcagaagagcatcctggcattcgagcgcctgcctgaggaattcaccaatgaagacgtcatgcgctgcttcaacctcagcagcgatagtgctacacgtatgcgtatcaagcgtctgacggacgatcacctggtggaacagatgggcacattcaaggaaaatggcaccaccaagtcgagatatagaaagacgggagtgttcatgctctgacgccgtcacgccgtcacgccgtcacatttggaaaattgctatgcgctgggcgaagttcctaacaaaccagcccatgcccgtcctgagtggatgggcttctttgttatttgttgaataccagttatgttgtccaagaatgattcgagaactatacggtggaaatattcagcttttccacgatccagatgaacatgctgtagatggcgatgtcgatgcctacgatgtaggctgactggagacctccgacatagaggccgtagttgatgaggcagatgacgatgaagagggtgatgatgactgcgagggtttggtgcatgtcaagtcccatctgcatgatgcggtggtggatgtgggtcttgtctgcctcgaacatgctcctgcctctgaatttacgccacagacctacacggatgacatcaatgcatggaaggaataccagggtgaaggagatgaggagggattcctcacgataggagaagccgaggggttcctgttccatttggtatttgatggcgaggtaagcgattacataacccaggaagagactgcctgagtcgcccatgaacgttttaagtcgtcccaccttgccgtacatgttgaagaagaagaaggcaagggtggctccagccagactggtgctgatgatgctgaagaggtgggcgtggagttcatggtagaggtatgcgaaggaggccaagatcaggaatgcgagtcctgaggccagtccgtcgatgccgtcgatgaggttgatggcgttgacgatgagcaggatgacgaacacggtgatgggatagccaagccagatgggtatctcatggatgccgaaaagtccgtgcaggttgttgatcatcaggttgcacagcgggaagaggagggctgcgaaggtttggatgatgaacttatgagtggctttcatgcccctcagatcgtcgaagatgccgatgaggtacaccatgatggctccgatgaccatca

SEQ ID NO: 4222 - DNA, 15516 bp, synthetic construct
  source 1..15516: mol_type = other DNA
  misc_feature 1..15516: note = Synthetic
agggtctcaatatcgtgaggtatagcgacggcaccatcaagaaagaagccgtccactaacccttttctcccagaagaaatggctgtttgataggtggtgttctcacaagttagttcctcgatagcgcgtaatatggtgtccgcactgcaagtgcgaagggatggatgaagagacaaatgcctcatgaggtgagttgtcacatcttcgacacatgagccgccacaaagatagacgcacatcaaagaacgcaggatctcgctattctgatagccataccatttgcatctcgtccccaatgtggagtctatggtttgagctaaaagagcatcaaattgctccatgattggaaaaattcctccaaaaggagtgagtttctcggattttatttgtacatttgccatgtcattcggagattttgctatacttgtttgcagcactaaggtaggtgaaaaatctgacatggcatcatcccaagcaccctatagttgctcaggtacttataaaaacaactaactcatagtactgcggaaattagagtataaaaagaatcacatcgaattatgaaatccgcaaataaagaaataggatttggcaaacaaactattgctaaggttttcgaggagtggtacactgttccttcatatcaaagacattacgtatgggaaagcgacaacgtgaatgacatgttggatgactttgcgtctaattatatagaacatgccaaggaggaatatttcctcggctcctacattattcaaagtaaaagcaacaacaatgacctgcttgatggacagcagcgtatcactaccttgtttctcttgtttgctttcttgcgcgactatgctggttcttcagaggatgtcaaggtcaactgcgttgacttgatattccaaaaggccaataagattaagcaaattcccgaacggatacgcctttcttatgagattcgtggcaatgtgaggaagttcattgaggaatacttaatgacgcctggaagtattacgcagcattgggacgatattgtcaagaaagccaatgacaaaaaagaatgcacgtctattcaaagaatgtgcaatgcattggtttgctacaacgagttttttaccaatcataaagaaatagatttagattcctttctcatattcatcctcaacaatgttgtgatgatctatatatcggcagactcgttagaggatgcatttcgcctcttctccgtgatgaatgatcgtggccaaaaactgagcaatgctgatattctaaaatcatccaatcttgaaaaaatcgaggatggcagcgaaatgaacgagtatgcgcgcgaatgggaaaacatgcaggaggatttgggtaatgattttgaccgtttccttgcctatgtacgaacgatgctgctcaaaaagcgccaaaagacgaatctgcttgacgaatatgagaaacagatttttaaagcaggaaaaatcaaacagggaagagattttttcaactatgtctttagggcgtatgaggattataacaagttgatcaacttggcaggcaatgaagataccgagtattgttcgttgataagaatcctcatcgagtgtatgccttcgaccaattggattcctgtcattttggcgtatggaagaaaatttggagacaatgggcttcttgaattttcacagaaggtagcctgtaaaaacattgcagatgcagtatgtggcaaaagcccatcgtatcgcatcgacatcttgaatagtatcatccacttgatagaagagtctggaaaaccctccgatgtacttgacgctcaaggatattattcatttaatgaacatgtatttatggcaaatatccaatcagagatatacggcagacgatacacctatgcgctcctgatgcttcttgaatacaaatacaaggacaagtctgaatggaaagatttcggaacgacatccattgagcatattcttccacagaatcctaaaactaccagccagtgggtgaaggactttagcgaggaacagagaagctactatacacataggataggaaacctgtgcctgattggacgcagaaagaattcttcccttggcaatcttgattatcaggagaaactaaaaaaatatttcgagaagaatatcggatcctttgcaagctcacaaaaaatataccaaacatatccgaacgcatggacacctgaaaccgtgaaggaaaatcaagaaagagtcatacaggatctgatggaaatatttggtatcaagagtccaagtaccatcatagacgactctacatacatggagcagcaaagatctgtttaccctaatgcttatcaaccatggacagaatcagatgacgagagattagttgccctatacaacgaaggcaaatctattagcgaactcgcacaaatgtttcttagaaatcatggcgctataagatccaggattcgtaaattaaccggagaacggttctaataagcaacgacgcaatgcaggatatcagccttcgtatcggatcaatccatttggtctgatgactcatttgccgtcatcttttcgccccaaatcccaacgactttagggaattttttacgagaaaacctccatcaagtagccaacacggcgacctgcaaaagggttgccacattagatagtttaagcctatctacaattgggacgcctgaaagtggagagccttaccttttattagctcaaataaacaaaacagccctctcggcaagctataaaaaaagaaaactcccaccgaagcgggagtataggttttacccttcggccattgctggccttattgtgataagatgtaggaaatcttattctggatgcaaaaataccactttatttttgtttaaacaaattttttattgtaattttaccgaaaaatttaaaaccgcatcaaaaatgactaaaatacttggcattgacacaggcacgaacagccttggatgggctatcgtagaaaagaaggcagagcaatactgcctgcttgataagggagtgaatattttccaagagggagtcaacatcgacaaggacaacgagtcttccaaagcggcagaaaggacgggctaccgtgctatccgagtacgctactatcgcataaagctacgcaaaatcaggcttctgcacatcttgacccagcaccacctttgtcccccactcacctcctgggagctgcgccaatggcgactaaagagcatatacccaaccgatgagttgttcatgcaatggcagcgcacggacgaggagaaagggcaaaacccatacgcctatcgacatctatgcctgcatgagaaactggatttgacccaggttgcgaaccgctacatcctcggtcgcgttttctatcactttgcccagcgccgtggctttctcagcaaccgcaaggatcagagtggtgaggacgtgggcgtcgtgaatgacggtatcagtgccctctccgaagaaatgcgggaagcgggatgcgaataccttggcgattatttctaccagctctatgagaaaggcaaaaagatacgcaaacactacaccgcacgcaacgaacactacctcaaagagtttcatgccatctgcgaaaagcagcaattggacgcctcgctcgtgtcggagttggagaaggccatttttacccagcggcctttgaaatctcaaaaaagacaagtgggcaagtgcgtatttgagaaaaacaaagccaaatgtcctgcctcccaccccttgtacgaggagtttagaatgttgtctttcatcaaccatatcaaaataaaaacaccaaaggaagatgagctccgaccgttgaaccacgaggagcgcgagaagattcttccgcttttctttaggaagaccaagaaaacctttaatttcgaggatattgccaagaagttggctcctaaaaagctctacggattctacaagaaggccgctgatacggaaatgccgtatctcttcaactatccgatggatacttccgtctctggttgtcccgtcacagcggcgctacaagatattttcggtgacgattggctcgactccatctgcgaggtctatacgctggccgatggtaaaagccggcttgagatcctcaacgacatctggcatgcacttttcttctattccgaccaagacaagctggctgagtttgccaaggtgcgcctacagcttgacgacgaacaagcccaggccttcagcaacatcaaccttccctccgcctatgcttcgctaagcctcaaggcaatttgcaagatcctcccctacctcagaagaggacttgtctattcccatgcggtttttttaggcaatctttgcgaagtgatgcctgcctatgaatggggaatcgaggaaatgcgccaagctgccattgactgcgtcatcaaagagataaacagctatgaccccaaaacagacggacgcactctagagacgtgcatcaaagagtatctaaaagaaaggtatcatgtctcagacgaaaatctcaaaaagctctaccatccctcgatgttagagacttaccctcgtgtgcgccctggtcaagacggaatatatcaactcggatctccacgcaccgacagcgttcgcaacccgatggccatgcgatcccttttctgccttcgcaagctcgtcaaccgtctcttgaaagagggaaagatagaccaagagacggagattcacatcgagttttcgcgtgagctgaacgatgccaacaagcggagcgccctcaagcggtatggcagggacaaccaaaaggcacacgacacagcccgaaagcacatcgtcgaggattacaaggcagaaacaggcaaagcaatagaaccgacacccacggacattttgaaatatgaactatgggaagagcagcagcatatttgcttatacacaggtcagcagattcgcatatctgattttatcggacccaatccgaaatttgacatcgagcacaccttgccccgaagcagaggcggagacagcaccaagatgaacctgactctttgtgacagccgcttcaaccgcgatgtgaaaaagacacatctgcctaccgaacttgccaaccacgatgaaatcatggcccgcatagctatatggcaggaaaaatacgaggagctgagccaacagattcgcaaacagaaacgcaaatcacaggctgcgacaaccaaggagcaaaaagacaaagccatcagctaccgccattacctggaactccagcgtgactatttgcgcggaaaacatgaacgtttcacgatggaaagcgtgcccgaaggattcaacaggcgacagggtgtggatatcggcatcatctcaaaatacgcccggctctatctgaagtcggtcttcaagcgagtgtatcctgtaaagggcctcgccacatctgatttccgaaagatatggggacttcaggacatttacagcgccaaggagcgcgtgaaccatgtccaccattgcatagacgccatcgtcgtagcctgtatcggactggacgaatatggcaaactggccgagtactatcacgatgaggaaaagcatgagtagtacggtgcgtccaaagccacttttgccaagccctggccgacattcgtcgaggacgtgaggcggatgcaaaacgaactgctcgtttatcaccacactcccgacaacatggccaagcagggccgtcgcagaatcctcatcaatgggaaaaaggtcctggcaaagggagacgccgtgcgtggctcactccacaaggagacttactatggcgcaatagagcgcgaaggtgaggtcaaatatgtgaaacgtgtagagctgtcacaactggaagaaaagaacatcaagtatatcgtggatgacaccgtgaggcaaatcgtccaagaggccgtcgatcgcttgggcttcacagaagccatggcttccaccatttggatgaacgaggagaagcagatacccatcaaaaaggtacgctgctatacgccccaagtcacccaaccacttcatatccgctaccagcgggatgtctctgacaaagagtacaagcgcaaatatcatgtggtaaatgacaaaaactatctcctcgccatctatataggggctgacaagaaaggaaaagagaaacgagactttgagttggtcaacaacctccaggcggccaaatactaccggacgagcaacgataggacaggctctggcgatccgatagtccccgtcaagagtagccatgactatccgttggcctatacattgaagatcggcacgatgctcttgctttacgagaactcacctgccgagctttacgaagcctctcaaacagaactgaacaggcgtctgtataaggtgacagggctttcttccatgaccgtgggcactcgcagctacggggtgattgtaatgaaataccacacggaagcccgacaaagcaaggacttgaaaggcaagaacggtgcctatcaaactggtgaggagctgcgtcctgtcattagaatgcttcacacccagataaaagcggcggtacaaggcgttcacttccgtatcaacgagttaggtgagatcaaatggcttgcgcggtatgattaagcagaccctcttcttctccacgccagtgtcgctttccttaaagaactaccaaatggtcatttcctggaaagacagagcagacaaggtgacgcgccccatagaggacatgggatgcgtcgtgttggaaaaccaacaaattagcgtcaccttgccgctcttgaacgaactggtgaaaaacaacgtggccgtcgtcctgtgcgacaacaagcagatgccgacggccatgcttcaatgtttggacggaaatacgacacaagcggaaagcctcaaatatcaactggccgtcggagaagcaacaaagaaacaggcttggaagcaaatcatcgaggctaaaatcaagaatcaggcagttgtacttcggcactacggaaaacggagtgagctactaacaccatattataaaaacgtgaagagtggcgacacggacaaccgcgagggtcttgcggccaaacagtattggacagaactgttcggtggatgcttcagacgggatcgggaaggaggttcccccaacgacttgctcaattatggctacgccattttgcgagcggcaaccacccgtgcattaataggctcaggactgctacccaacttgggtatcttccacaaaagcagatacaacgcctttccattggccgacgacgtgatggaaccctatcgtccttatgtggacgaaattgtctattcgctttacgaaggtggagtttacgagctcaacaaagagtctaaatccgccatactccacttgttgacgtacgacgtggacatgggaaaagtcacgcgtcccctacaaattgccttgactttcaccactgcttctttggccaaactgtatgctggagaaatcaaaaaactaactcttcctatcatgacatgaccgaataccgtctcaatgcctaccatataatgtggatgtttgtatttttcgacttacccgtcacaacaaaaaaagagagaaaagccgctgcgctctttcgtaagaacttggagaaagatggattctccatgatgcagttttctgtctatatccgccattgcgcgtcgcgagagagccttgcggttcaccttaagcgtgtcaggtccttgcttcccgcgactggcaaagtctccatcttgtccgtaactgacaaacaatttggagacatctacaacttttgggggaaaccaaaaaacgccaatcaaagtaaaatccacaataaagtcatcagtgagcctatccaattagaatttttttaatatatttgcagtaggaatcgtcctgcacggccatttcttagaagcccaaaacgaagtatcttactgattaccagtagatttacgactataggttgtggtttgatgtaggaacaagatgataaacaacgcattaccgctgaacaaaacaccacgacagttgtggtttgatgtaggaacaagatgataaacaaccaaagataaacaaagttgcacaatcgacattgttgtggtttgatgtaggaacaagatgataaacaacattcctgagtttgatggacttggctaccaagttgtggtttgatgtaggaacaagatgataaacaaccttttcgcatgcttcccggtctcgctaagtgttgtggtttgatgtaggaacaagatgataaacaacgaataataggaagtgtaaaagtctgtgaggttgtggtttgatgtaggaacaagatgataaacaactgggccttaagattgcgcttagaattaccgttgtggtttgatgtaggaacaagatgataaacaacctgggcttttgccattctcaccatccttgcgttgtggtttgatgtaggaacaagatgataaacaacttacagggttatatacattatgaccttacagttgtggtttgatgtaggaacaagatgataaacaaccagagagcaaagaatagcacgctgagagggttgtggtttgatgtaggaacaagatgataaacaacaaacacataggcgcatagacaatgatatgggttgtggtttgatgtaggaacaagatgataaacaactacttggcaaacaccttttccacgttgtggttgtggtttgatgtaggaacaagatgataaacaactgaccattttcagaatttcaaggtttatgggttgtggtttgatgtaggaacaagatgataaacaacagcgtagacgtcttcacgagagaggaccgggttgtggtttgatgtaggaacaagatgataaacaacgcagaggtaagattagaggtactgttgccagttgtggtttgatgtaggaacaagatgataaacaacttcttgttggatttctcccaaggtttctcggttgtggtttgatgtaggaacaagatgataaacaactcaagtttgagaataaactcggagttgagggttgtggtttgatgtaggaacaagatgataaacaactcatgcgaattctcggcccgagagttgagcgttgtggtttgatgtaggaacaagatgataaacaacccttttgcaaccaatcaacctgaaaaatagttgtggtttgatgtaggaacaagatgataaacaacgttcttggattgaatacgcttacaaagtatgttgtggtttgatgtaggaacaagatgataaacaacggctaaactcgtcacatttcggaaacacggttgtggtttgatgtaggaacaagatgataaacaactttgaggagcagcgcgcgcaggacagtcaggttgtggtttgatgtaggaacaagatgataaacaacagctggttctcagatacttttacaactgtagttgtggtttgatgtaggaacaagatgataaacaactgttcaacgagcgataagtctatacataatgttgtggtttgatgtaggaacaagatgataaacaactcttgaacttatcaccaggaagaacctcgggttgtggtttgatgtaggaacaagatgataaacaaccaaagaacggtcatcaatattagaataaacgttgtggtttgatgtaggaacaagatgataaacaacaggagagtaccttcaatgtctatgacaaacgcatcgatcgcgccaactcggaactgtaaaagctcatcatcggacagacgatgaccatcgaggacggcagcagcctctcacaatcaaaaacacacctcgaggtgttcgagaacctggttgaaagcgactgcaccatgctgcgcgacatcgtgaacaaccagcttatcccgcgcatggtaaagcacggcttccctatcaagggaatgcgcttcaaatgggatgatgctgtcgattacacaccagagcagcaggtggcatacgagaccatggttgccgaccgctacgaagtggacccgtcctactttgcagagaaatacagtatgcctgtaggcgaaccagcccatgttaccgacaggaggggataataacgatgagggagacgatggtaacagcgagccgcaagacgacgagaagaaacagcagcaaaacacgcacggcagttttttcgattgagccccagtgattacctggggctgcaccaacgctatgcccgtctgttaggcgatactccacaaaccttgtcgctgtcgaaagagcaggagcaggtacgcaagcagctctctgaactgtccgacggcatgatgcacacgctctattcccagaacggttcggagttccgcattgaggtgttggcagaaccgaaggttcaggagttcatcaacgcccatgccggcgctttggattcctctttcaagcaagtggaaatgtctgatgtcatgcgcaagcgcctccaacggtctgactatatcttctctggcatgaaaacgttccacgaactcaacgaggcgttcctgtccttgctggattctaatggcaacagaaagacgttcgaagcctttttgaatgatgttcgaaagatcgacaagacctacaactccaactatctccgtgcggagtacaacttcgtacagtcgtctgcggagatggcagccaagtgggaacggttctcggaggacggcgaccgctacaacctccagtaccgcacggcaaacgatggcaaggtgcgtccggaacacgctgcgcttaatggcgtgacgcttccgccgtcagacccgttctgggaggaatactatccacccaacggatggaactgccgttgcaccgtagtgcaggttcgcaagtctaaataccctgccacagcccatgaggaggcgatggcactgggcgaggaagctctgcagcgcgacacaaagggtatcttccatttcaatccaggaaaacagaataaaaccgtacccgactacaatccttatacgattcgtcgttgccgtgactgcgatgtcgctaagggaaagttgaaactgaccttcgtgccggacaatgagttatgtgccgcttgtagttttcttcatgaatgcgttggcaatcgtgaaaagacacaagctgcaatcttacgtaaacattatatagataaagaaatggctccactgcttgataaaaaagtccaaaaacgattaccgaatggaaacaatataaaaatcggatttgacaagaaaggaaacaagcatttgtattctgatacaatggccagaactcgccgtgtgagtgccgatgaattaaaagacatagacatcatgcttgataatgccacatatttggatgaagcagcacactacccgacacacaacaatccatttgattacttctactatttcaaggctacgactgcagatggacaaagcgtaaggttgaatatcgggcgagaaacgcacagaaggaacgatgggcgtattattgtgaaatacatttgctattccatcaacaatataaatgaataaaagcatctcaggcgacctcttagcttgttacgcagttcggccattccatcaatgctttgctgcaaaggtaataacaaattttcaaaacacatcaagttatggaagaaaaaatacatgatgataaaaaaagaacaatctcaatgccgcagtagagcacatactgcgcttgccgatagaagtaaaatcccaatgcacaacaaccacgggaagattctggcaagccatgaagcgataggtgaggaaacctgtcccacaacatccaaagagtcttcttgatattgccgtaagcaattcgagagtgctctcaactttagtttgtactgcaaaaagcaatacaacacacccgcaaggacagtcagtaacagaaataacacactcgctactgtcaagcagcgaagaagaatactcccttgtgacatatcgccaaaaacagcgattatgcctattaaagttgcggctatgcctgactgatggcgtattaacgattcatgctgaagctccactttctctttggcttcaaacagctcttgaacaaagccattccagccttctgtatcatgtagtactgtcatcttttttagatgcaaaggtataacgtttcattcaaaattttcaacgatgaacaaaattttctcatttctgaagaaaagcaactgctacaagcatctaatcggcggtttgctggtcggtctgtgtgcattgtcgccatgggcagccatctattctgccatcatcgcagcctcatgtctcgaactcaaagacaagctccacggctgtcaatgggactggatagactgggcctgcacagtactcggaggcatcattgcgatgtcgctttggctcattgtgtagcgcccggccattttttacaccgagaatgagtaactttgcagcctggtagagtttcccataggccgcgtggtctatcgcgggtacaacaatgcgaacgcgaatggcggtgtctcgtttgcgaatgcgaacaacgatgcctcgaatgcgaacacgaatgtcggctcgcgcctggaaatctagctaatcggcgtacaacgatggggacgtgtccccgatgcggtgccgagggaaacgagccacagcaaaagcacctcgacgaggtggaaagctgaaacatcaagtgtcgggcaatggagtttggtaggtcggcaacgattcgaagaagtctggcccggggaaggaaggtccttatcttccatgcagaaaagaccatgcacagagaaggctatatcatgcaagaggtgacgtcctacggcaatatgtcggaggcgtttgtaacgatataagtttttttacgaaatccatccacttattcaaaaaatagtcttatatttgcatattggaataaaaacatagagaaacgatgaacagaatagaccttcgtaaagcaatgttggacgacaataatttccgtatgaaaaagatgatcattttccttatgttgctctgcatacagatttctgcttctgtatgtcacgcacaggtgaacgattggaagaattatctttcaaaggcatgggtcagaaacattgttgtagatggcgacaaactttatctgggaacggatggcggtctggctatttacgacaaaaacactggtcgatgccaattccttgatagaacaaatggattggcagacaacaatatcgttggactggctcaccacaatggcaagtggtggataggtggcaaatacacaggcatgagcatttatgatgaaaactcatttcagaataggcagttcccctttgcacttcaaagctgtttcgcctttgatgatgctttagataaggtgtatattggagcaatacacgatatctatatcttgaaagataattactatacggtttacactcccgaccccaaagcagacatacatccctatcctgctatccaatctcttgttcttgataaaaacggtacactgtggtttggtggctttacgtttggtttcctttcctccaatggaaataccacgcttctaaactgtggcgcaagtgaagttaacaatataataatcgacgataaagacaacaaatggttggcaactaacagagggttaatcaagtatgacgtcacatctttcacttcgtacaacacttcaggcggacaactgtcaagtaacaatgttaacggattagctttcgacacgaatcgtaatttatggatgggaaattggaacgtacttgtcaaatatgacggaaaacaattctcctcttacccgcttccttcaaactacagcaacgactggatatgcgacattgcacccgatggtaacgatgtatgggtagcaacacgatttcatggattgctcagattctatgacggcacgtttgaacagacagaactggagaagaatatattgacacagaacctgatgcacgaggtttccacagtcgacgagaaaggcaacgtgtgctttgcatccaatgattatcttgcccaatacacagagaaaggggaatggaaacacctgtttcctaatgcaaaggactattaccctgctattaacgcagctgcatacgataagcgaggacgtttgtgggttgcacccaataatagcgataccatactggctgttatagaaaatgccgatacaactgttttcaaacgagataacacgccatttcaaacagggcagttaaaacaactggaattcgatagcaaaaaccatttatgggttggagcatcaaatggcttatataaatacgacggcgtacaatggtctcaatacaactcttcaaattcgccaatgccaggcgacatgataacatccctcgcttttgataagagcgacagggtatgggttggaatcgcggaccttggagtgtgctgttttgatgggcataattgggtgtgtcatgatacgataaattcccctattccatataattatgttgactgtatcgctgttgattcgcataacagagtatggatgaatagtagatatagtaggaatggaatgcctgtaatgggtaaagattatggtggtggattggtttgctacgatggcacgaattggaaaatctataaccaatataactccaacataggcggcaactgcatcgtggatattgcaatagacaagcatgatgccctatggatggcagtatctgatataggtcttgtacgcttcgatggggaaaaccaatgggatgcttacacaatctacaacagtgggctggctaatccgtggccaattcaggtgcagatagatgtcaagcgagatatgatttggctcagctatgaagcatcgggaggcatatcttccgccaagatgaatcaaggcacaggtgcagaaggaatatttgtaacgccaaatggtgcaaaagctatttacactattgagggacgcaaagtaaaagctatgacaccagggcagatttatatcatgcgagacgagaacgggaaaacaacaaaagttcttgctcggtagtatcaatagccaaaaaaatatgggaatactcgattttatatacacgggcgtgatagcgcactttctgaaaaagagactgggcggatcgggccatcattccgcacacgaccatcacgaccacgcgcacgagcatcatggggatcatgaggactacgaccatgaggacagttggcgtgaggacgaagccttggaccacggcgaccacggcgaccacgacctcgacgatgtcatctacaacaaatacatccacgaagactatgaccacgactgcgaggactgcgacctcgacgactttgaccaggacggctacgaccacgacgactacggagagcacgatctggacggctggtatggcgacgaatactaaacgccgaggctgaaaaaaaagaggctggtggggggaaaggcaaccatgacctttcccccaccagcctgatgggccgcggggtgtggcggcggaaggaatcctactttacttcagcacctcgacggagcgcttgacgaagtcgttgagcgcggcgcccttgagcataccgttctggagaagggcgagatcgaccaactgatggatcagggtgttgtccttggcatagtcggcgacgatctggcgcttcttgccgcgctggtcctccagggccttctccgtctgggagaggtcgtccttgtcggcctgggagatttcctcgggcttcttgtccttctgggcctggcgcagggcgg

SEQ ID NO: 4223 - DNA, 15353 bp, synthetic construct
  misc_feature 1..15353: note = Synthetic
  source 1..15353: mol_type = other DNA
ggccacattcggtgtctgcgccgtgtaagcatacaccgttacgcccagttgccggacaggcttgtcggtagctagcaaagtcggcgataccggctccatttcatccgaagtcagcagacagccaaaagtcctgttcagcaaagggtcttcagcaaccggatggtccagcttctgcaattccagattatccttccagatagagcgagcattccggtgcatccatgccacagcatgttcggaaggcgggagtatgctgtccttctccacataaatatcaccctgcactccatatgccgactgcacctcaatccccttcagaagccgtcgttcggttctccagggctcagcagcaactttagccgagatgggctgctcactttccaccgacagctcgacggccggattgaaagcatcaatccacacattcacagccactctgtccttcccctcgccggcatcgatgtacatcacaccgtcctttactttaagctcctgacgatatttctgccccttccggaaaggattcggcgaaagctgaagacgcaccttgcccagcttgaacagtcgtccgttttcactccacgcatcggttttagaaagatagaattgcaggtcgccgttttcctccacccagagattgatacccaggtcgccattgcccataggcatatttcccagcgagttgagcgagggactgtcccacaccacgctgtagcggtcgacagctttcaggttttcagaaagaggtgcggtatgcgtcgtgcatccggtaacggtccatgtcagacagcctgccgccagcagacccatcagtttcatagtttttcggttcatcattattcaaggtatttattgtttttcatacagtaacgagctttaaagatagacatattttctttgacaagccgttctttcacagtttttcacgcatcattttttcccatccacaattctgctgataatgaccgacacaaaagatatatctgtaaaaatggtagttttttccgatttatggttacagcgattgtccgccattcgggataactttgtatcagaacggagaagacagcaagacatttttaaaatattccacgtatgaacaagattatgttaacattggcagcggtaatgacactccatcttgccgcctgcgcacagaacaaaggaggaaatgatatgcaaaccgaaagcaaaacgctggtagtttatttctctgctaccggcaatacggcccaggcagcacggatgattgcagatgccacaaaaggtacgctgtacgaaatcgtgccccagcagccctacacttcggccgacctgaactggaacaacaagcagtcacgcagctcgcaggaaatgaacaacccgcaggctcgcccgaaactcaaggaaggcaaggcggctgtcggcacagctgacgttgttttcatcggctatcccatctggtggaatcaggctccgcgtgtggtaaacacgtttatcgagagcaacgacctgaagggtaaaaggcttatcccgtttgccacatcgggtggaagcagcataaccaacagcgtgaaagagttgaagcgtacttatcccaccttgcaatgggaagacggaaagctgctgaacagagccagccgcaatacggtgcagaactggacgcgcgaggttatggctgaataatgaaacttatcggttagatttttttacccctgtttccggtcgtgagaaggtctgttgatctgacggctggaggcaggggttattgcgttataggggaatgggataatcaaatctatcatccgatttgctggagtatgaaaaacaatgctgtgtttttagtttctcatttaaatgatgaaccttttgcataaatgacatgaatgtgcgtcatttttatgatgtacgttggacatggctgtgaggtagtggagaggtatggatgcaatgatttctgcctatcaaaatttctataaaaaggtgacaaagatttattggttagtccataaaatccattaaatttgctagaaacgacaataaaagaaaagcattgtgattaaattttgaaaaataaaaaactcccaccgaagcgggagtataggattaaaccttcggcccgaaggcctttattgtgataagatgtagaaatcttatgactacaaaggtaaaaagtatttttgtttatacaaactggaatcacataaacttgaatctaaacaatcaaaaaatgaaagaacgaattttaggaattgatacaggtacaaacagcatagggtggtcaatcgtagactatgacagtgaacttttggaaaataagtatacacttattaataaaggcgttaatatttttcaagaaggagtaaaaatagaaaaaggaatagaatcgtctaaggcagcagaacgaaccgaacacaagcatcaacgagtgggatactggcgaagaaaagtccgaaaaatcaaattactcagattattgataaaacatgatttatgtcccccactcaccacagacgaattaaaaaactggcgttccaagaagcaatatccattaaatgaagcttttatggaatggcagcgtactaatgataatgaaaaccggaacccatattattacagaaatttatgcctaagccaaaagttagatttgtcagatatacataaccggcatatcattggtcgtgctatatatcacttaaaccaacgacgtggttttttaagtaaccgcaaagaagaaaccaaggaaagtgaaggagctgttaaggaaggtatcaatgccattacaaatgagatgcagagtcatggtgtagaatgtttaggacaatatttttacatactttaccagcaaaaaggaaaaatacgttctaactataccagtaggatagatcattatgaaaaagaattactagctatttgtaagaaacaggagctaccggaagagctgaccaatgaacttagaaaaatcataattacacagcgccctttaaaatcacaaaaacaaaatgtcgggaaatgtgtatttgaaccctccaagtcaagatgtccggtatcacacccattatatgaacaatatagaatgtacgcattcatcaataatataaagatacaagggccaaatgacaaccagcttcgtgaattaaacaatgtagaaaaaaatgcaataatacctctttttctgcgcaaatcaaaaaaagactttaagttcgaagatattgcaaaaaaattatctggcactaaaaaagatttttgctattacaaagacaaaccagagaaagcatatcgttttaatcatcacatggatactaccatatccggttgtccggttattgcgcagttgtccgaagtttttggtgtaaaagagaatatagatgaatggttagaaagagcctgtgaggtttatacaaacggagccggtaaaaacagatacgaaataatgaacgatatatggcatgcgttattcttttttgacgatgatgagaaactgaagatatttgccatggaaaaactgcaacttgatgaagtccatgctatacagttcagtaaaatacgcattccatctgattatgcttctttatcattaaaagctatcagaaaaatactgccttatatgaagcaatatggcatgatttattcgcatgctgtttttttggctaatctttcacatataatcaagtgtcaaacagacaaagaggcacttttacctatgctgcctcgtgaagaggccgaagatattgtaaaagctttttatgaatttgacccttcgatgtcggcactccgtacacaagaagaatacgttaaacattatatcgcatataaatatcatttagatgaggagaatgagcgcaaattgaaaaagctataccacccatctatgatagaaacatttcctaaaatacggcaaaagacaccagatggatattatcagctgaaatctccaaggacgggaagtatgcgtaaccctatggcaatgcattctttgttcagactacgccatgtcatcaataaattattgcaaaaaggaaaaattgacgaggacactatcattaaaatagaatttgccagagaacttaacgactacaatcagagaacagctataaaacagtggcaaaacattctagaaaagcaaaataaagaagcatacgagaaaatcaaagaacattttggtaatgactatattcctagtacaaccgatttgctcaaatataaattgtgggaggaacaacagcacatttgtctgtacaccggtaaatctatcgggatagaaaaacttttcagttcaactgaatttgatatagaacatactatcccccgtagtgtaggaggcgactcaactgatatgaatttaacgatatgcgacagccatttcaatagagaagtaaaaaaagcacaaataccatcacaactggcaaaccatgaggatattttagaacgaatatcgagttggaaatccaagattgaaaaattggataaagaaatccggaaaatcaatacaaaaggaattagcgataaagaaacaaaagaccacagaattcaaaaacggcatctccttattttggaacgtgattattggaaaggaaaatacagccgattcgtaatgcaagaagttccagaaggattttcacgcagacaaggagtagacataagtgtaatttccaaatatgcacggctctatcttaaatcattgttccaccatgtatatatagtgaaaggtctcataacatccgactttagaaaaatatgggggctacaagacgaatatgataaaaaagcccgccataatcattgccatcatgcaatagatgctataacaatagcatgtattggtaaagcagaatacgacaagttagcacagtattatcatgataaagaacgttatgactggagtttaagcagccagaaagctgtatttcctaaaccttggaaaacttttacagaagatgtaaaacacatagacgagacactgctggtcagccattatactgctgataatatcaaaaaacgtacccgaaaaaaaattcggataaacggaaaagataccaataagtatatggaaggagatacagccagggtttcattgcaccaagacacctattatggtgctattgaacgtgcaggtgagatcagatatgtagtgagaaaacctatagatcaaacagaccctaaacagattgttgataatgttgtgcgagaaaaagtcatggccgctatatccgaatacggaagtctaaaaaaagccgtagaagcaggtatatggatgaacaaagaaaaagggatacgaataaataaggcaagagtatatgctactcaaataaaacgccctcttgatattcgcagacaacgagacgcaatcaaagaatataaacagatgtatcatgtggctaatgattcaaactatataatgggaatttatgtcggtgcagacaaaaaaggtaaagaaaaacgaacctttaaattagtaaacagcctagatgctgtaaaattttacaacagtggccttaaagagcagaatatagacattctgcactatgaggataagaacggatatgcattaaagtggaaattaaaaataggctcaatggtgcttttatacgaggatactccatctgaaatttatgacctggacttaaaagctctaagcaaacgactctataaaataaccggaatgtcatcaatggttgtttcaggcaacagttatggtacattaagcctagtattccaccaagaagctagaccatctacagaattttcttctaaaaatggtatctataaagcaaacgaaatattaaggccaggaattactttattacatactcaattcaaaggactggtacaagaccaggattttgcaataaatgaaattggcgaaattatttttttttgacaaatgattaagcaaactttatttttttctacacctgtttctctttcacttaaatacaaccagatagaaataagctttaaagagagcgaagaaattattacaagaccgatagaagatgtcggtcttgtaataattgaaaacccaatggttcacattacagtacctttgctaaatgcattagcaaacagcaatgttactgtagttttttgtgataataaatgcatgcccaatacaatgcttatgcctttggagtcaaattccatacaacaagaagtatatagatttcaaacagaagtgacccaacccacgaaaaaacgcatttggaaagaaatcattgaaaataaaatcagaaaccaagctactttattagatatattaggtttggatggaagcctgctgaaaccttattatatgaatgttttatcgggcgacagtaacaacagagaaggcatagcagctaaaatatattggcaacaaatttttggtaaagaatttattcgcaaacgtgaaggcgcatacccaaataccatactaaattatggatatacaatattaagagctgctgttaccagagctttattaggttcaggattattccctgcatttggtctatttcatcggaatagatataatgcatttccactagcagacgatataatggaaccttaccggccatttgttgattttgcagttaagcaaatttatgatttctcttcacataatgaaatcaacaaagaaattaaacaggttttgacacaagttctttatacagatgtaaaaatcaaaaaacaaatccatcccttacaaattgcattatccataacgacagcttcccttgtccgagcattaaaagataaaaaagaaaatattatttatccgacattcgtatgacagagttacgcttaaatgcttatcatattatgtggctattcgtattttttgatttacctgtaactacaaaacaagaacaaaagattgcttcagatttcagaaagaatcttttaaaagaaggattcaccatgatgcaattttctgtgtatatacggcactgtgcatcacacgaaagtcttgtcgtacataaacgacgaataaaatcaatgatgcccagttctggaaaaattagtatgcttgctgttactgacaaacaatatgctgatattgaaactatttttggcaaaacagcaaaaaaagaaataaaagcacctatacaattggagtttttttaatatttttgtatggactagattagaaattaagccacttcatatagacaatatagaatgtaatcacttatattacaatctattataaaatatatgttgtggtttgatgtagaaaattaaagatatacaaccgctttcttgatggccttggaaggagttggttgtggtttgatgtagaaaatgactatatccgaaaaaatttactacatttgtaacaccctccacaaaagacatcaaattatggacaaaatagaaataaaaggatacaaatcttttaaggacctaaagctagaactaaaacccatcaatatactgataggtgccaacggttcaggaaagagcaactttctgtctttcttcgagtttctgaatcgcctgtacgaacagaaacttactgaatatgtcgctttgggaggcggcatagacaagtatttctttcaaggcagcaaagtgacggatgcaatttatgcaaaaatagatttcgtagacaatttctatttatttgagcttaaagaaggtgacaacaggtttgttgtatcccaagaaggattaggctatcataacaattattatgacattgcacaatttcgtaatgaagccaatatcaagccctatgatggactgttaaggggcagctatataaaaaagtatttgtccgagataaaaaaatatcacttccacgataccgggaaaagttcaccctttacaaaagaaagccacatagtaaacgatgtgtattatctgtatgagaaaggtgaaaatatagcagctttcctgtatgcaataagacaaaatgagcctgtggtttataaacgtatagtccgtgttatccaaagcatagctccttacttcagtgatttttatttcaatgtaagcgcagctgatacggtccgtatccagtggacagataaattctgttccaccatttatggccctactgacctatcggacgggacgatacgttttattgccctgactacactatttctgcaacctgttccaccaaaggttatcatcatcgatgagccggaattgggattgcacccgctggccatacaaaagcttgcaggaatgataaaatcagcagctgcaaaagggacccaagttatcgttgcgacacaaagtgctgacctcataagcaattttgatgcagaggatatcattaccataaaccagacagaaggggcttcagtcatgaataggctgtcttcggaagaacttaatacatggttggaaagttactttaggagactttgacagataactattcatcaaaatagaatatgaaaagaaaacactccctagcgataaccgcactgctcctccccttatctggctttgcacaggaaaagggattaaatgtggtatttataatggccgacgacctgggtctgaacgatacaggctacacaggaagtgattactacgaaacgcccaatattgaccagctttcaaaagagggaatggcattcacgaatgcatattcatcggcagccaattcagcacccagcagggcctgctttatgagcggaatgtacacccccaggcatggaatttttacggtaagtcctcccgacagaggagacaggagcaaacggaaactgattgccgttcccaatacggaggacctgcgaacggacatcatgactttgggcgagctcttccaccggaacggctacagatgcggtcatgtgggcaaatggcatctgggagatgataaagacggcacgggacctctttcgaggggatttgatgtgaatatagccggcggacgggcaggtacccctactcgtattactatccgtattgcaacagaaagaacgagtgtcatgtcggcctcgaaaagggtactccgggcgaatatcttaccgacagacttactacggaggcggttaatttcataaaagagtcgaccaaaggaggcaagccgttttttctgtatatggctcatcatgccgtccatacgccgattacagctccaaaggatatcgtcgacaagtataaaaagaaaccgaaaggcaggtatcacaccaatcctgtatatgctgcaatggtcgagacattggacaacagcgtgggaagaatatgcgccacaattgattctttgggattgagcgggaatacaatcattgtatttaattctgacaacggtggctccgaaccggttactgacaattacaccgtcaggggcggaaaaggtatgccgtatgaaggcgggaaccgagtgcctttgattattagatggcctcatgccaccaaagccggaagtgtatccgactgtccggtaagcaacattgatttctttcctacgtttcagacttatctcgagggaaaagccggaaatcagcttgacggcaccgacttgtatcctctgctgacgatgcgggaaaaaagtatcaaaagggatttgttctggcattttccggcatatctggaatcgtatacagacgatagcgacggattcagggctaagccttatacttcactccgctccggtaaatggaaactgatctattactacgagaacggaaatgtagaactttttaatcttgaagaagacccgaaagaggagcataatgtagcggacaggcataagaaaatggcggctgaaatgaaagctaaaatctttgaatggattaaaaagaccaatgcgcctgtggctactgagctgaatccttattataagggtaacttataaatgcagctatctgaaagcaaaagtttcccctcacttatccccttccttccccctcaaaaaaaattttttcatttttttcttcccccgaatagggttttttttatgcccctgcgttatgtagtcgaaaagctcagaaaagaaacgatagaaatacaactaaacgagcttacaattacaactaaacgagtataaacttttaaaaactaaacgagctatgaaatttaaatttatcgcattatctttgtttgcagtagcaagtgttaacgcagtgaatgcccagactactggtgcaggtaaattccagcaggaaagcaagcatgagttccgtctgggtgtgagcgacggactgacaatggggtcggtcaacgttctgggtatgggtatcgaggatgccattaccggcaacaagcgctcggacgaaaactacagccttacttacgggctgggttaccgctatgcgctgaaccgctttaaggtgggtgccgacctgggattctcgcacatgaacagcaaactgacgctgagcggcgaccagacaccttctatcaaggagaaggaactgaacttcctggtgctgcctactgcggagtttacttactataaaaagggactggtagagttgtacggtacggctgcagccggtatcaacctgaaccgccatacggaaacaggtctgaccgaagccggaaaacggacaacccgcaaagcggaccttactacaagctttgcttatcaggtgaacccgattgctatccgtgtgggcaacaaccgtatcggtggtttcctcgaagcgggtctgggcaacaagggtttcgtcaccgcaggtgtcagcctgaagttctaatactttaaaatacaacagttgttgccatgaatgccaacaggaaagaacagttcaaaataaggtttgagacacattaccccagactatgccagatagcctgcgggtatgtggcctgccgcgaggatgcggaggatattgtgcaggagctttttgtgggtatctggaaccgggaggcggacttgatgccggaaaaggattttgcagcgtacatcaccacagcggtgaaaaacagctgtatctcgtttctgcggaagaagcaggacagcaccgtgtcgattgacgaccatccggcggcggccagtacgctgcccgaggagttgctgaacgaggctctaagccagctgccgcccaagtgcagggagattttcctgatggctaaacagaagggcatgaagtataaggagattgccgcagcgctggagttgtcggaaaagaccatcgaaaaccagatgacgaaggccatcaagttgctccgcgagtttgtaagccgccacggctctgtgctgctggttgtggctgtcattgttttatctgtcattgctaactgtgaataaagatgaagactgaagaatatatcaatagactgctgtcacggcatttctgcggcgaggagctgacagcagaacagcagtccgtagtggacgagtggatagatgcgaaccgggaagagtaccgcagactgcaacggctgattgggaacgccggccgacagattcccgtggactttgatgcagctgcggcctggaagcggattgagccgcaactgacggaaaagcgggcagtacgcatacctttcctccgccgagagagtacgctgtttgccatagctgcttcactggtggtggcactggtagtgggagcgtatttcctgacgcttaccccggaagcagaattgctgcaatttgccaatgccggacaggtggaaaaggtcatctggctgcccgacagctcgcaggtaaagctggcacccgatgcacggcttacattccgcaacggggaggtgcgacaggcgcaactggaggggaaggctttcttccgtgtgaagaagcagcacgggaaaccgttccgcgtgtctacgccgcacttgcaggtggaggtgctggggacttcgttcctcgtgaatgcctcgcccgaagaggtgccgggggtttatgtggagacgggcaaggtaaaggtgtcggcgcaggagcgtgacgtcatcttgcaggccagtcagatggtggaggtgacgggacacgacttgcaggtgcaaccaattgaacagccgtaccgttattttggtgtagaggaccgcgagctggtgttcaagaatacgcccatccaggaggtaactgccgaagtggagaagtacaccggcgtacgcattgagctgggcccgggtttcgaaaagacggccgtaaccacgcgtatccgtacgcttgaagcagagagcatcgctgccgagctggcatttctgtgcggatgccgttgcgacacgctgactgccagcaaggcctacagactttatttcccttaacctgtatcttttttaactgattatataatgaacagaaggtacctgaccggatatttctttctgtttttcctgctggggggcttaccggccacagcccagcagaaaaacggagaagtgcacaacgtagcagaggagctgatcacagtggacggctcttctgctacgttggcgtgctggctggagcgcatcgagcgtgagaaacagctgacgcttgcctataatgcgtcgctgctggacctggaacgggtttgccatattgcccgtccgggtacgctcacggtgaaggcgctgctcggcgagttgttccgggagtaccggatgaaggtgttgccgacagccggaaggaagctggtgctgcagctcatcccgcggcagacgtaccagctgtcgggcacggcgaaggaggcagagagcggcgaacggctgtatggtgcagtggtgtcgctggaggacggatacggcaaccgctcgtttgcgatgacggacgacaacggactgttcggcatggaggtgcccgaggggacgtaccgcatgcgtatttcgtacatgggctatacgccttctgcaacaggagcaactgagtattcagaccgaccgcacgctgcatgcatccctgaagccgatgtcgttcgaaatgcagggggtgacggtgaaagcacgccgtgcggccaacgagctggatgcgctggtaccgtccaaccatctggccatgagcagcaacgacctgttttcgcaaatctggattctaccgggtgtagcgggggtacctacgcaatttaactttcaggtggatggtggaaataccgacgagaatctgctgctggtggacggggtgccggtcattcatgccggacatatcaatccgcaactgcccaccttcaacggggatgccatcaagagtatgacttttcacaaggggttcttccctacccgtctggagggcaagctgtcatcggtaacggaagtcaagctcaaggaaggaaatctgcaggaacaccagcgcacgctgacgctggatatgccggcagcctcagccacgctggagggaccgattatccgcaataagatgtcgtatgtggtgagcctgcgccgcagctggctggattttttcgacagtctgctgtcgtaagaggaacgcctcaaccatgcctcgtacgactatacggccaaagtggtgtacaacaccagcgagagcagttcgctgcaactgctgacttacggctcgcgcgacaattacctgtggccggacgagaacggcaaggagtatacgggcctgcgctgggacaaccagatttatcaagcggcctatcatacccgtctgggaaaggtggaaagccgcacggcggtctattatacctcgcacctcaaccgggccgatgccagtctgctgggcatagccgaagagggttatgtacataacaatatccgcacagtcaatgcctcggcagagttcggtatccgtcctgacgaccagtaccaggcacactggggtgcccgctatacgcacgaggcatacgagtggaccgtgcccgaagatgcctcgcgcatgcgccgtgagccggtgcatcagttctcgctgttctacgataacgacctgcgcattgcccgccacctgtatgcacaggtgggtgtgcactttgtggggtatctgccgcagaagcatgagcattattacagcatccagccgcgtttctcgctgcgttatatgccttccgagcggaatctgttctacctcaacttctcgaagatggagcaattctatcattacctgcgcatggacaacctctcttttcccaccgacttccgcatgcccagcatcgaaggctacaagccgcgctcgtccgaacattacgaggcgggatggaagcatttctttggcaacggtcgcatggagctgtcggctcactacaagacgcgacggaacgtgctggctttccggccggagttcttcatggaggattacgactggaacaactatatcatggcgggcgacggcaacagctatggggtgaaactcagcgtgcaggcagaatggccgcgctggacagcccaagcttcctacggctatatccgaagctgggagtggttcgacgattaccagtccggcaaacggattccttcggtctacgacattccgcaccgcctgaacggagcgctctcctacaagttgggaacacgctcgacagtaacgctgggaggtatgctcagctcgggaagggtgaaagatgccgacgaagacttcggtccgctgcccgaaaacagcttccgcggcagccgtgaggtgatgcgataccgggtggatgccggatatacgtacaagcgggatttcggcggcaagctcctgctgctgcgggccggtctgtacaacattgtgggcaatccgccggaagaagaaattctggatttctattccgtacactggcaccgccactgtatgccttatgccggagtaagcttcaaattctgagtgctagagctggtgcagagtgtattttttcttttttgcatttcatttttagaactgttttccgtacattcgcacataacaaaaaacctgaaacattatgatacacattgtaaaagcgactacggaagacattcctgtcatccgccaactggccgaacaggcttttcccgacacttaccgcgaaattctcagtccggaacagattgactacatgatggaatggatgtactctaccgaaagtctgcaccggcagatggaagaagaaggccatacctattatatcgcccgtgtggacggagagcccgtcggctacgtgtccatccgtcaggaaggcgagcataccttccatctcgagaaaatctatattctggctacctacaagggacgccatctgggccgcatgctgttcgagcaggcgcagaaagccatcaaggaactgcatccgggaccctgcaccatgcaactcaacgtcaaccgccacaatcccgcgctgggcttttacaagcacatgggcatgaaaaaggccgacgagggagacttccccatcggccagggttattacatgaacgattatatcatgtccatcgatctctgacatttttgtctgtcagcacatcagcaaagaggtcgcgtccttccagctgcagcaaccactgcttccagcgtatgccggccgcaaaaccgcccagcttgccccgcacgcagataacgcggtgacaaggggtaatcagcatcagcggattgc

SEQ ID NO: 4224 - DNA, 15129 bp, synthetic construct
  source 1..15129: mol_type = other DNA
  misc_feature 1..15129: note = Synthetic
tttttaatgaatctgttcttacgagtgcggtttctcgccatggcaaatcatgcagcatgtttgctctcttggcttaccgagatcgttcttataacgcggaaaatgaactatagcttttttaatttctgtaaaggtacaatttattttattatcgccccctaacgggcaagccatgcctcaggattgagtttggcggtttccttacgtaactggaactgcaggatgttatctgaccccacggcgcccaaagcctgccgggtccttaccttctgccccttgtggacactcaccgacttgaggttgcagtaaaccgagatataagctccatgacgcacaaggacattccacatgcccccatagccaaagacggcacttacctcaccatcataaatactacgagccacgcagcctgtcttgcccaaaaggttgattcccttattgtcgagagtgacacccgaaagcccctgcacattgtattgtccgaaatggctcacaatcttgtaagagccagaaatcggcatgggaaggcgaccacggttggcctcgaagcctccgctcagcatgcggtccaccgaactgagagtagcagcatcattggcttcccgtcgggcattcgccagctccttgcggttgcgtgcctcgtcggtctttgccttcaactcggcagcccgtcggtcggcctctgccgcacgggcagcctgttcagcccttgcctgtcggttggcttgttcggcagcctcgcgagcagcttcctccgcacgagcacgtgccttctcctgcgctctggccttggcacgattctcttcttgctgacgagcttcctcctgtgccttacgagccaattcctgagccttacggctctcttctgccgcacgctgacgtgcaagctctgcctcacgttccttgcgtctggcttcctctatacgacgggcattctcacgcgcctcggcttccgcctgtgccttgcgacgagccagctcctcacgccgtcgctgtgcagcagcacgagcttcggccttgcgcttagcctcggcggcagcacgtgcgcgggctttttccacctcgacggctatcagtcggtctatctgcgcattgatggcagcgtccttcttgcgctgttcggctatgaccgcttggatggttttctgctgtttctgcagtccctgcaccacttgctgttgctcggtttgcttgccttcgagctcagtcttctccagctgtcccttgtacaagaggttgttcttatgccccttcgccgcctgcagctgcttatgtttttcggtcacctgcttctgcttggccttcaccgcctctccctgcgccttctgatagtcggaatactgccgtatgaacgacaggcgtcgatacatctgggtgaggttcttggcactgaagatgaacatgagcttgtcttgcacggagtggtggcgcgtcatatagcgcatggaacggatgtacttgttctttctgtcttgcaactgctgctcaagggtcttgagttgggtattgagcatgcctatgttgccatcgatgtgatgaatatcctgctggatgccatcgatgttcttctgtcgctggcctatctcgccattgagcaccatgaggtcttgcaggcgcttcttcacgtcggcctggttgcgacggagagctctctcctgctccttgattttcttttggatattggcacgctgcccctgcaggcctcgtatggaagcattgctataagaagtggcaggggtcttccctgtacgggtggaagccttggactgatgcctcttcgcagatttctttttaggggtattctttgaaacccttgtcgtttttgcggtcgtggcggccttcttcctttgcgcagtcttttgggcataaggagacaaggcaaacgacaaggcgagaaccatcaataatacatgtttcatttacagactcattattttgttcagcacgtcttctgccgacacttgcttgtacttgctcgagatctcggaacgcgactcccagttgtcgtcggtcttcacctcgttcatcttgataaccatattgacctcctgcttctggcgagtagcgttggtggtaagggtcatatcgagcaaggccggaaacatcttgactcctacaggacggaagtcgccatagcggatgtgcactcccgacgtgccatgttgcgaactgacgtacttcacgtcagccttgtctatacgacccgtggtacggttggatgtccagacatacgtcatgtcgccattcttcaaggtgacaggtacctcgtcgccctcaacagccaagttggcatcaaacttcctcaaatcggactccttcacctgcttggctccaggcaggagcaactgattccagaacaacgcctgcaacgaatagaaagtgatgccctgcttctggagaaagtccacttgattataatcagccttgatgtattgtttatggtaacggtcgatgatgagcacataatcgggcgtaaactccaagcgaccaatctcgaagcccaagattggagcatagagctgcagacgtatcacatcgtccttgcgcatccggagggcgccgtcaaccgatattttcttctctcccatgcggatggtgaagttcatgctgcccgtaatgttcttggcatacacctgattgtcggacaccttctgtacaaaagccagtttctgcacacgttcagtctgtacgcctttcacctcctggcgaggcatgtccttgttgttcacgccatcggagatgatctgtttctttatgccacaagacatgaacaacatgaacaacacaaggggcaggcagagtgccgcccgtttcattattttgtttttttccattttcgcttgtattttacgatttcgctttctgtcacatatttcctgcactcaatcttcaccttcagggcatcagaatccgggttgccattctgtgcctgccgccaatatgccacagcctgatcggtaagcccgttcatggcataaatatctcctgcatgctctatgatggtgctgctgtccgacgttgtgtcgcagcacgccaaggactggtcgatatagtttttggcctcggcataacgttcctccataaaaagaatccacgcataggtgtcaagataggtggagttcttgggctcggccttgatggtcttgtagctcatcagctcggccttctgcaagttcttgcccgtctggctgatgtagtaggcataattgttgagaccgggaatgttgtcgggtttccagtgcaggcaagagtcgtaagcggcaaaagcctccgcctgtcggttcttgccatgaaggatgtcacccatgatcatataaaggtcggacaccaagtcgggggagctcttgctgttgatttgtcctataccgcggcggaactcgtcgagcgtggcatcttcctcgtgcttcatgtagtgcgccattccgccaaagtagtagaacaccatctcctcgggattgtattcgtgggcgatctccgactggcggattacctcgtcgtagtctttccgttcccacaggttctgtataagttgcatgcgcgacgcactgcggtcgggagctatctcgagcaccttgcggtaagcggcgtcgaccgtgtccatcggcatcttcttgatgttcatataggcggcgcgaaactcagcgatgtccaccgaaggcttgggctggctcagcattctgtcgaagagggcgatgacctgggtggaatcggcgccatggctctcgttgtcttgtatgaacgagcgtatcatcatcatcttggtgtcgatgtcggtcttcccccccaacaggatgcggtcgagcatggtgcgagcctgttccttctgccccgtggcgttgtaataatcgtagagcgacatctgggcatacgagttgtccggctcttcctcaagcacctgcatgaacaacttgtaggcctccttctggcgctggtgctccatgagccagttgcctaacatggttttgtaaaccatgtcgagggggtgagtctcggtaagcgacttgagttccttgtaggcagacttcgggtcgttcatcaactcgtagatgtgcatcttctcgagagtgaacttctcgctctcaccttcctccgtctccaagcggttgagagttcttagcatctggggatattccttctgttgctgataaaggcgcaacagcatgtagagcgcatcggtattgtcgtgattttgtgcaaagatgccctcgtaggcatctatcgccttgtcgtattgctgattggcaacataatattgcgccatacgttcgcgaaagataagattggaaggtgccagggtgatggcacgcgcaaggcaatcttgagccaacgaatcttgcttcatctgctgataatacatcgactcatagaaatatacctcagcagcacgtggattaatcttgcgggcatgctcaaagagttcgaaggcatcgccgtatctacccaacgcctgaagacgggctgcctcctcaaagaaataatcgtaacgcttacgttcattgtccgacaacacgtaggaagcctgcaagggcaaagccgccgcaaatagcacaagccacgagactcccaaaatggtttgtctcaaaatatttgctttactcacaacaatctggattaacatattccttgtttctctacttcacttcacacccgtatgaccatagccacctgcgccccgctcggtttcatcgagtgtctccacctcgatgaattccgcattttcatgcttggctataaccatctgggctatgcgctcgccatcgttgacaacgaagtctgtctgcgagaaattgacgagcagaaccatgatttcgccccgatagtcggcatcgatggtgccaggagtgttgagcacggtgatgccatgcttcaaagccaaaccgctccgaggacgtatctgagcctcgaagcccgctggcaaagccatgtaaagacccgtgggcacaagacggcgctccatggggtgaagcacgaccgactcgtcgatattggcacgcagatccatgcctgcactctggggcgtggcataagcaggcagcggctgatggccgcggttgataatttgtactttcatcatgattaatcttttaagatgcaaaaataatgcttttcgggcacatttaggcattttcacgccgaaaatgatagattttataaaaaataaatgcttttttattttgtattgtgcaaggattggtgtatttttgcgatatggaatggatgaaactcatatctaacaagcgattcggacaagaacacaaacatgccgagcgccacgacgacaggtcggagttcaagcgcgactacgaccgtctcatcttctcgtcggctttcagacgactgcagaacaagacacaggtattcccattgccaggctccatctttgtccacaaccgactgacccacagcctggaagtatcgagcgtgggcatgtcgctgggcaacgacatctcgaagcgcatcatggagaaacgtcccgagctgaaggacaccctcttcgaggagataggcaccatcgtgagcgcagcctgcctggcgcacgacttgggcaaccctcccttcggccattctggcgagaaagccatacagacattcttcagcgagggggcggggaaggttgtaagggagttggtatcgccagagttctggcaagacatcacccacttcgagggcaacgccaatgccttccgcatactcacccaccagttcaagggaagacgcaagggcggcttcgtcatgacctactccatgctggcttccatcgtgaaatatccattcgcaagccagctggcaggcagccacggcaagtttggattcttctcgtcggagagggcatcctaccagaaagtggccgatgaattgggcgttttccgcaagtcgaaacctggcgagcctctcagatacgcccgtcatcccttggtttacctggtagaggctgccgacgacatctgctatgagatcatggacatcgaggattcccacaagctcaagattctttctttcgaagagacggaacggctgctgttgggcttcttcgacgagggaacccaaatcaagataaaggaacgcatcaaagaagagggagtgaccgacgagaacgagaaggtggtgtacatgcgtgccagtgccatcggcagactggagaacgaatgcgtggccgctttcctggagcatgaagaggagatactgggagggaccttcgagggaagcctcatagaccacatccccgagcggcagcgagatgcctacaaagactgcgagaagacttcattctcgaaaatctaccacagcaagcccgtgctcgacatcgagctatcgggttacaaaatcatggccacgctcatggaggtgttcgtcaacgcagccatcaccccccaacgcttcgactcgcgacaactgctgcggcgagtcagcagccagtacgacatcaacaacgagaacatggaggagcgcatcatggcggtgatagactacatcagcggaatgaccgacatctacgccctcgacatctaccagaagataaacggcatcagcctgcccatcgtataggcagaagaaatagacagtcaaccatattttcacagttaagtatatctttttgtaaattcctcaacagcaataatactaaaaagaaaacaaaacatgagactaaacaagactttacttactttcagcttggcagccgccctcttgcagatgccagccacagccgacgctctggcagcaggagtagctggcagtaagaacccactcttgcaaaagagcagccttccgttcggcgctcccgacttcagcaagattcaggaaagcgactatctgcctgccatcgaaactgccatcaagcaacagcgtgagaacatccagaaaatcgtgaacaacaagaaaaagcctaccttccagaacaccatcctcgcctacgaggagagcggtgtgctactcgacaaggtaaccagcgtattcttcggactcaccagcgctcacaagactccagtcatcgcagagactcaaaagaaggttacacctctgcttactgagctcgaaaacgagatttcattcaatcagaaactcttcgatcgcatcaagtatgtctatgacaacgagtataaaaagctcaaaggcgaagaccaacgactcaccgaggtcatctacaagagcttcgtccgctcaggcgccttgctctcccctgggaagatggagcgtatgaaggctatcaactcccgtatctccgagctccagcaacaatggggcaaccttcttcctgccgccaccaatgcagccgtagtttgggtacaaaacaaagaggaactatctggcctcagcgaagccgacatcgcccagtgcaagaaagatgccgagagccgtggcggaaaggcgccttactgcatcgtcatcgtgaacaccacccagcaacccatcctcaccaatctccagaaccgtgaactccgaaagaaggtttatgaggcaagcatccatcgcgccgatgccaccaacccagacttcaacaccttccctatcgtaaccgagatggccaagctacgtgccgagaaaggacagttgatgggatacaagaactacgccgactattcactcgaaaagacaatggcgaagaactcgaagaacgtgaacgactttttgaaccaactcatcaaggaatatactccgaaggcaaaggctgagacacaggcgatagaggaatacgcccaaaagaccgagggcaaggacttcaaacttcagccttacgaccgcttctactattctgcgaagatgaagaaggagatgctcaacatcaccgacgacgaggtgaagccttacttcaacatcgacagcgtgctggtgaacggcgtgttctatgccgcccatcgcgtgtatggactgaacttcaaacagcgcaaggacatcccgacttatcatcccgacatgaaagtgttcgaggtgagcgacaagaacggcaagcctctcgcactcttctacagcgactacttccgtcgccctaccaagcgaggaggtgcctggatgagcagcttcgccaagcagagcaagctgcgtggacagttgcctatcatctacaatgtatgcaactatgccaaggcacccgaaggtcagccatcgctcattacctgggacgaggtttgcaccctgttccatgagttcggccatgctcttcatggcattctctccaactgcaagtacaacaccctttcaggtacagccgtggcccgcgacttcgtggagatgccatctcagttcaacgagtcgtttgcctccattcctgagatattcgaccactacgctcgccataccgagacaggaaagccgatgccaaccgacctaaaggagcgtatgctgaagagcatcaacttccaaacagcctatgcactcggcgagaacctcgcagccacctgcttagacttggcatggcacgagttgactcccgatgagattccatccgattacatggcaggagcctttgagaaagaagcactctacaacgtaggcctgctcgacaaccaaatacctcctcgctactccaccacttatttcaaccacgtatggggcggaggctatgccgcaggctactacagctatctttggaccgaggtgctcgccgtcaacatcgccgatttcttctccaagcatggtgcgctcaacccagccgtaggccaggcattcagagacaagattctgagccgaggcaacaccaaggaccagatggagatgttcaccgacttcactggcatgaagagcccggatgcatcaggcttgctaaaagcaagaggattgtaacatcggaacatatcagcacagaattgctatatcccaaaagctcgcaagaactcataacgtttcttgcgagctttttaattatatcaacagtgccgaataaaaaagacacaatctaaaattctctcatataaaaaaaatgtgtatccactatttctcatatcatatctacccaaatctaatattccccaacttttttatgttaaatatcatttacacatcgttacaaattctttttttttagtatatttgtcaacaaataaatctattattatattaatatggctaatgacgagttttctatacgattaaaaggagctatgggacttacatcttgctttaagaatccaatatctaagagcaaggtctcaacaatagaagatactataaaagctgccgataaactcagagaaaatggcattgcggtgacggtcctatcaccagtgttcttcgcctattggagcgcaaaggcatcaagatactatccgccgaacttccaacctacgtatatggcctgagcacctgagctgacaaagtgcatccattgatacttcttgacctccgcccgaaaaagacaacagtcgaaagacttcgattcacagtctgtcatgagctcgcccatctacttctaacccagcccaaagattccaaactgaatacagaaaagcaatgtgacctctttgcaggcttcttcctcatccccaagaatgcctttatagaagagttgggcaaataacatcgaagccagattacccaagaagagatgatagacatcaaggacacatatggcatttcactacaagccgccattatttcagctatatattatggcattatcactccagaatgcaaacgatggtggcatggtgaatacctagagaacaatccatgggaaaaagaaaatagggcactacgctttccctgagaccacaggacgagagaaaagaattggatcgataataaaagatataacaccaaaagaaatatcgacatcattataaaagaagaaaacttgaaagaaaaaaaggaaagtatataaaaacgaagctcccaccgaagcgggagtataggttttacaccttcggcaattactgccttattgtgataagatgtaggaaatcttattttctgctgcaaagatataataaatagtttagctatgcaagaaaacaactgtttttttacaaaaaataatatataaacatataaaacaaagaaaaatatgaaaaaaatactaggaattgatactggaaccaacagccttggatgggctattgttgaaaagaaagcagacgaatataaactgcttgataaaggcgtgaacatctttcaagaaggtgtaaaaatagaaaaaggcatcgagtcttccaaagcagccgaaagaacagcccatcgtgcgacaagagtaagatattaccgtatcaaattgcgcaaaatacgtttactgcgtattttgagtgacaaccacttatgccctcctcttacaagtgaagaattggcagcttggagactcaagaaagagtatccacagaacgaactatttatgcagtggcagcgtacggatgacaattccgaaaagactccttacacatgcaggcacaagtgtcttcataccaagctcgattttaatagtattactgatagatacattttaggacgtgccttttatcatatcgtccagcgtcgaggtttcttaagtaatcgcaaagaccaaggtggtgatgactcgggtaaagtaaaagagggcataagtacgctcactcaaaaaatgcaaaaagctggatacgattaccttggtgattatttttactcactctacaacaaaggcaagaagattcgcaatcactacacagcacgcaatgaacactatttaaatgagttcaaagctatttgcaaaaagcaagagctaaacaaagaactggggcaaaagactgtagacagcatagaaaaagccatattcgaccaaagacctttaaagtcacaaaaaggtcaggttggtaaatgcatatttgagaagaataagacaaaatgtccttcatcacatcctcttttcgaggagtttaggatgttggctttcataaacaacatcaagattaaaacaccaagagacgaagagatgcgtcctttaaacgaagaagagcgcacactcatcatgcctttattttttcgaaagtccaagaaacaatttgactttgaagatattgcgaagaaactagctcctaagaaatcgtatggtttctacaaaaagagtaccgactctgaaatgccttatcttttcaactatccaatagatacctctgtatctggcaaccctgttacagcaaccttaaaggatatttttggcgataattggctggataccatctgcgaagtatatacattaggagagggaaaaagccgcttagagataatgaacgacgtctggcatgccttgtttttttactctgacaaggacaagcttacagaatttgctactactcgcctacagttgaacgatgaagaggctaagagattcagcgacatctccctgcctacctcgtatgcttctttaagtttgaaagctatctgcaagattcttccttatctaagaagaggtttgatttactctcattcagtctttttaggcaatttatgtgaagttatgccatcttatgagtggggaatcaaagagatacgtgaagctgctattgataacataatcaacgagatggcaaagtatgctacaaatgacgagcgtactttcgagacatgcatcaaggaatacttgaaagagaaatacaatgtcaacgatgatagtcttaagaaactttatcacccttctatgatggaaccttatcctatggttcgacatacaaacctacacggaatatatcaattgggctcgccaagaattgacagtgtgcgcaatcctatggctatgcgttccatgtttagattgcgcaagttagtgaaccgtctgttagaagagggaaagatagaccaagacacagaaatccatatagaatttgctcgtgagctgaacgatgccaataaacgaaatgcaatagctgcgtttaccaaggaaaatcagacagccaatgatgaagcaaaaaagagcatcaagaagctttataaagaggaaactggtatcgaaatcgaaccaagcgactctgaggcattgaaatatattctctgggaagaacaagagcatatatgtctatatacaggaaaacaaatcagaatatcagattttattggagccaatccaatgtttgatatagagcacaccatccctcgcagtgtcggtggcgatagtaccaaaatgaatctaactctttgcgacagccgtttcaatagagatatcaagaagactcatttaccaacggaattagcaaatcatgatgagattatggcacgtatcaatgtttggaaagagaaatatgaagctcttgaccagcaaatacgtaaacaaaagaaactagctaaaggatcatctacaaaagagcaaaaagatactatcattcgcaaacgccatcttttagaacttcgtcgtgattattggcgtggaaaatatatgcgttttaccatggagagtgtgcctgaaggatttagccgtcgacaaggcacagacatcagcgtgatttccaagtacgctcgcctatacttgaaatcattatttaaacatgtttttacggtaaaaggaatagcaacttctgatttccgaaagatatggggaatccaagacatctatagcaagaaagaacgtgtcaatcatgttcaccattgcatagatgccattgtcatcgcatgcatagggcttgatgagtataacaagttgggagcgtactaccatgatgaggaaaatcatgaatggtatggggctaccaaagcttcattcatcaagccttggccgaggttcgtggaagacataaataaagttcaagacgaacttcttgtatatcactacacaccagacaacatgccaaaacaaggacgtagaagaatcaaaattgatggcaaaaaaatattgtgcaaaggagatgcggctcgaggttcattacacaacgacacctattatggtgctattgaaaatgatggtatggtgaaatatgtcaagcgaatagaccttgcatcgctcaaagagagcgacgtaaagaatatcgtagataacacagttagggaacttattgagaatgctatcaaagagaaaggatttaagaaagcgatgggcagcacgatttggatgaataaagaaaagcaaattcctataaaaaaggtaagatgctacaccccttcagtcactaagccattgaatattcgtaaacaacgtgatcttccaagaaaagtatataagcaagaatttcatgttgcaaatgatagcaattacttgttggccatgtatattggcaaagacaacaagggaaaagaaaaacgagatttcgaacttgttaatatgttacaggcagctcaatatttcaaaacgagtaatgacaaaaaagcttcaggcaataatatggtccctgtaaagagcaaacatgactatccatttgcttatacattaaagatcggcactatggttttgctgtacgaaaaaaatccttctgaaatttgggaaaactcaagacaagagcaagcaaaacgcttatataagattacggggctttcttccatgaccattaatgatggtcgcgcatatgcaacaataaaaatgagacatcatgaagaagctcgtcaaagcaaagatgtaaaagcaaagaatggagcatacaaacaaggagaagggtttcgaccagctatcattatgcttcagacacaaataaaagccttagtacaaggctatgactttgagataaatgaattaggtgaaatcaaaagattaagataattatgattaagcaaacattattcttctcaactccagtttgcctttcactcaagaattgccaactattgatttcttggaaagacagcaacgacaaagtaacacgacctatcgaagatttaggatgcatagtcttagaaaatcaaatgataagcattaccctgccactcctcaacgagttggtgaagaataatgttgctgtcatcttatgtgacaacaaaatgatgccaatctccatgcttcaaagtctagatgcaaacacaacacaagctgaaagcttaaaatttcaactggctgctagcgagcccatgaaaaagcaagcatggaaacaaattattgaaacaaaaataagaaatcaagcctcaacattgtctcttgtaggtaaaaaaggagaaatcttaaagccctacttcactaatgtgaaaagtggggattcagacaacagggaaggtcttgcggcaagggcatattggaatgcgctttttggcaacactttcaagcgagaaagagaaggagtttctccaaactctttgctcaattatggatattctattttgcgtgctgcaactgccagagctctccttggttcgggattattacctaatttaggtatattccataaaagcagatataatgcatttccattggcagatgatgttatggaaccataccgcccatacgttgatgaaatcgtgttcggcctccacagtaaaggcattacagaactcaacaaagactccaaggcgaagttgttgcgtatagtaaattgcgatgtcaacatcgggaaaataaagcgcccattacaaatagcattaactattacaaccgcctctatagtgaaatattatgcaggtgaaattaagaaactatccttaccattcatcacatgacagaatacagacttaacgcctatcatattatgtggctattcgtattttttgatttaccagttaccacgaaaaaggaaatgaaagctgctacgctttttcgcaagaacttggagaaagacggtttttccatgatgcaattctctgtctatatccggcattgcgcctcacgagaaagtttggaggtacatataaaacgagtcaaatcattacttcccgaaacagggaaagttagtgtattaagcgttaccgataaacaatatggtgacatatacaacttctgggggagacctaaaagtataaataaaagtaaaataacaaaaaaagttatcagagaacctattcagctggaatttttttagtacctttgtttaaaaattgccctacatagccatttcttattaggaatatatttgtggttattgctgattttcagcacattcactgccataggttgtggtttgatgtaggaaagcaaagacatacaactttgcatttatgtggctgcatttaattattgttgtggtttgatgtaggaaagcaaagacatacaacactttgataatttgtacaattgaattatggttgtggtttgatgtagga

SEQ ID NO: 4225 - DNA, 15008 bp, synthetic construct
  source 1..15008: mol_type = other DNA
  misc_feature 1..15008: note = Synthetic
tatcgacgaggtcgtacacattattagaaatagtaagaccccgagtgatgcccagcataacctggaggagcgtttcaatttggatgagctgcagtcaaaggctatcgtagatatgcgtctgtctcagttgacaggtctgcgtgttgaccagttgcatcaggagttcgacgacttgcagaaactcattgccgacttgcaggaaatccttgacaaccccgagcgttgcaagcaggtgatgaaggacgagctgcaggaagtgaaagagaaatatggtgacgagcgtcgtacggagattattcctttcgaccacgagttcaatgccgaggacttctatcccgacgatcctgtggtgattaccatttcccacatgggttatatcaagcgcaccaagctcgatgagttccatgagcagggcaggggtggtgtcggtgccaaggctgcccgccaccgtgacaacgatttcaccgagtatatctatcctgccacgatgcataacacactgctcttcttcacccagaagggacgctgctactggcagaagtgctatgagatccctgagggtgataagaactcaaagggccgtgccatccagaatatgctgaatatcgagccggatgatgccatcaatgcagtattgcgtatcaagaacttcaatgatacagagttcctgaactcacactatgtggtgttcgccacgaagaatggtgtcatcaagaagacttgtctggaggcttacagccgtccacgtaccaatggtgttatcgccatcaatatcaacgagggcgacaaggtggtaggtgttcgtctgaccaatggacacaacgagttgctgctcgccaaccgcaatggtcgtgccgtccgtttcaacgaagaccaggtacgtaccatgggacgtgtctcaactggtgttatcggaatgcgtcttgacggtggtgacgacgaagttgtcggcatggtatgcgtcaacgacccgcaggcagagaccatcatggttgtcagtgagaatggttatggaaagcgctcagagatagaggactaccgtaagaccaatcgtggcacgaagggtgtgaagaccttggcgattaccgagaagacgggtcgcttggttgctatcaaggtagtgactgacgagaatgacctcatgatcatcaataagagtggtatcctcatccgtctgaaagtcgctgatgtacgagtgatgggacgagctacccagggagtccgtctgatcaacctgacgaagaagaacgacactattgccagtgtctgcaaggtgacatccagtcaggaagaggatgtagaagaggcagagattgtcgatgaggaagaagagaattaatccgaatactcagaatactcagaaaataaatagtttaaccaatattaaaagcttatgaaaaaagtaatgatgatggcattggcactcgtagcaagtgctacagcctttgccggtgacagtgacgctttgaaggctattaagaaatcaaagaactatgctgatgccgctcagcttatgaagacctcacagctcgctaacgacgaggagcgtgccgaagcatacaataaactggtagacctcgccatggaaaaggtgggtaaggagacgggtactatcgcccagaaccaggcagctgctcagttgggtacaggcaaggaggaggcatacgacaccctcggactgggtgatgccatctgcaatgccattgccgcagctatcgagtgtaacaagtatgaccagcttcccaatgcaaaaggtaaggttaagccacaatatgatgagaagaacgcacagcgcatctgggctgtacgcactcacttggtgaatatcggtcaggaagaggctcgtaagaacaataatgccgctgtattgaaatactggggtgctttccttgactcagacgctgatcctctctttgccgctcaggaccatgagcaagagaagggatatatcggacaggtagccttcttcgctggacgctatgcctttgatgctaagcagatggagcgtgccgacaagtacttcgatatcgctatgaaggatcccgagatgaagaaagacgctctgacctttaagttgtacgctgcaggcagcaacctcaagagcaaggaggattctctgaagtatattgatcagctgaagaccctttataacaatgatcctgagaatgacgttctcctcgacaagctgttcactatgtacgatggtatgaaggacaaggctgcacagacagcactgctcgacaaccacctcgcaaagtatcctaacagcttcgccgctcttgccaacaagggtatgatggctatcgctgacaataatgctgaagaaggtgctaactggctccgcaaggctgctgcgtcaagtcctgagaatcctgttatccagacctacctgggtacctgtctgagtgtacaggctggtcagacagatgatgccgccaagcgtaaggctctctaccaggaggctgtacaggctctcgacaaagctaagcagctcgaccccaacaagcagcaggctaactggggatataaccgctatcaggcatactatggactctatggtgctgatgaccccaagaccaaggatgctgaactggacactaaataaatagaaataatacttgcagatgaagaagcaaaaaacaatggtgctgcttctccttctgctcatgataacaccgtgcctgagggctcagaagaaagagctcagtcaggcacggtcttatatcaagagtgggaaggattttgacaaggcggagaaactgatgaccgacttgttgaaaaaggattcagctaaccgaaccaacgagaaaatctacctgacatggtttcaggctgtcacagaacaatataaggcagccaatgagaaactgtatctgaagcagaaatatgacaccgctgctttcttcaatctgacacgccggctctatagcattgctgagacactggatacgctggatgcccgacctgacgaaaaggggagggtgaagatacgctatcgtgaagaccatgctgagatgctcgaccagttacgccctaacctctattttggaggcacctatttcctgaggaaggaggagcttccaaccgcctacgatttcttcaaaacgtatctggatgctgccggtaagccgctctttaccggctatgactatcaggagaaggacaagaggatgccggaagcagcctattgggcttcttatgctgggtataagatgcaggatgccgtaaagacactgaaatatttcgactgggcagtgaaggatgaggaaagggcaaaatttgtgatgcagtatgcttgtgaggcatataactggcaaaaggatgagcaggcatatctcttcatgctcaaacggggatttgacaattatcctgatttcccttacttcttccctagactggttgattactataatgcgaaagagcgtccggactctgcattgtattatgcggaggaggcactggaggagtacccggatggtcaaattttccttcttgccaagtcgcttgccttattgaatctggaacgttacgacgagtgtatcaaggtgagtgagcatttgattgctcttaacgactcacttcccgagccatatttcaatattgctactgcaaaactgaaccaggtgctggcactcgaccggcggaaccagcctcgtgtctaccgttcgcagatgcataaactgtatgcggaggcacgtccctatatggaggcataccggaaactggctcctgacgagaaacagaaatgggcaccggctctttatcgtatctacctcaatctgaatatgggcaagcaatttgaggagatagacaagatcatgcgcaagctctaatgctaaaaaatcgaaaataaataccattgtcgtatttgttttcgatttttttcttatctttgtaagtcaatatgtgcaactgaatctaaaacaaattatattatttgaagtattatggaaaataacgaactcattgctcagtgtgaggcacgggcaaaagaatggctctctccagcctttgacgaggagacacgtaaggaagtacaggctatgttggacaatcccgacaagacagcccttgtggacgctttctatcagaatctggaatttggtacgggtggactccgtggtatcatgggtgccggtactaaccgcatgaataagtatatcgtaggtatggctactcagggctttgccaactatatcctgaaggctttccccggcaagcagtgctctgttgtcgttggtcatgactgccgtaacaacggacgtatgttcgctgagaccgttgctgacatcttctctgccaacggcatcaaggtttatctctttgagagcctccgtcctacaccggagatctctttcgctatccgtgagctgggtgcccaggctggtgtgaacgtcaccgcttcccacaaccctcgtgagtataatggctacaaggcttactgggatgatggcgcacaggtgctgtctccacacgatacgggtatcatcgacgaggtgaacaaggtgactatcaacgacgtgaagtttgagggtaacaaggaacttatcgagattatcggtggtgagatggactgggactatatccaggctgtccatgaggctatgattgaccaggaggtcatcaaccgtcagaaggacctcaatatcgtatactccgctatgcacggcacgggtcgtcatatcgttcccatggcactgcgctcttggggcttccagaacatccatgtcgttcccgagcagatggtagtggatggtaacttccccaccgtcgtttctcctaaccccgagaatccggaggctatgacactgggtatgaaactgggtacccgtctgaatgccgacctcgtgattgcctctgaccccgatgccgaccgtctcgctatcgttgtccgcaacccgaagggcgagtgggagattatcaatggtaaccagacggcaatgatgttctgctggtatatcatcaccaaccgtaagaagctgggtctgatgaagggtaacgagttcctcgtgaagaccatcgtgacctctgaggttatcgcacagattgccaagaagaacaatgttgagctgttcgacgagttcactggcttcaagtggattgcctaccgtatccgtgtcaacgagggtaagaagaagtatatcggcggtggtgaggagagcttcggcttcctgccattcgacaaggtacgtgacaaggatgctcctgcctctatctgtcttatctgtgagattgccgcatgggctaaggatcagggcaagacactctacgacctgctgatggacatctacgctgagtatggcttctcgaaggagaccaccatcaatgtggtgaagccgggtaagagtggtgccgacgagatcaagcagatgatggaggacttccgtaagaatcctcccacggaactgggtggctctaaggtttgtgtatggaaggacttccgttctctggagcagaagaatgccgacggcacgacctgtaagattgacatgccagctacgtctaacgtgctgcagtggttctgtgaggatggcacgaagatcagtgtccgtccttccggtaccgagccaaagatcaagttctactgcgagatcaaggatccttccttcaagtgtgccggctgctacgagcgttgcaccaatgctgctatggagaaggttgccgctatcaagaagagtctgaacctcgactaatagtataaggaagaaaaaggagggtgtgtcaaaatgaagtgaaccccgaaaagttggacattaaattaaacattaattattcaactctctatagtagtgagctcggtattgtgccgggctcattccttttagtgcaaacatattttgcgaaatgtcatgcatggtagaaaaaaatgtgtatctttgtagcgtgataaaacaattttcgagaaaaatctattcaaaaagtgatgactatgaactgtaaactattaatgttgggagtactgctcgtccttacggcatgcggtgggaagaaggagcagaagagtgaagataacggtgtcaacaagcatacggaggagtatatccttcagcgcatagacaccatctataagaccgtaggtaaagcaattgttgatgctgagggaaaccgggtggattacatcgcaagcgacttcaatcgtgacagtgcttactgttctcaacgctactatgcgctgatgcagcaggcgttggaggtgtgtgagaaaacaggtgaagtcctttatgactatgaccattgggtatgcggacaggatttctctgaggactggagctacaaagtgaagaaaatctatcaggtcacggattccacggcactcgtcgacctcactatccataatttcaatgacaaggaaacgaccatcgcccttcgttttgagcgtgatgactggtatattgatgatttcagtccttccgaggatggagaggatgacaaggcttatctccgccgggtgattcagcagggggaggaggctcagggagcggaactgacattcgataatatggctggcatctatgatgatgagaagcaggagagccgcttttgtctgatgagcgacggtacagcaacatggggaatgattggaagtctgaattttacggaatatacctacaggatcagtggcaatacgatctgtctgaaaccgaaagatgtagactcagaagaggattgctacaaatatgaccccaagacccgcacgctgaagaacgagcaaggttccgtctattatcggcaggaagagtagggggaaggaagaaaacaaaatcattatatatcagaccgagggcggacaaacacagatagatgttcgtttggagaatgacaccgtgtggctgacacaggcacagatggcagagctgtttcagaaagacaggactgtaataacccgccatataaataatgtcttcaaagaaggtgaattagaaaaagaacaggtatgtgcaaaatttgcacacaccactcggcagggtgctctatttggttacgaaaaaccattcgttcagtgatggtaaaaagcgcattgccgccacattattcctttggtttctcaacaacaatcgaattctctatcgtgaagatggttcaaagcgtattgtagacaacaccctcgttgccctcacactgatgattgcggaaagccgaacggaggagaaggacgtgatggtgaaagtggtagtgaatctgattactcagcagaacaattaagaagaataaatggatttgctaaaaattagtatctttacagaggcactatgaaagatttcagattcttggcataaaggtataaaaaactcccaccgaagcgggagtataggttttacccttcggccattatggccttattgtgataagatgtaggatatcttattgtttgcaaaaatagtaaatagttttgtaatttcaaaatttatttgtatctttaccgcattatttaacaaaaaatattactactatggagagaatattaggcatagatacaggtactaatagtttaggttgggctattattgagaaagaagatggtgttactaaactgatagataaaggaacaaatatattttcggaaggcgttaaaatagagaaaggcattgagtcttcgaaagctgcagaacggacagaacatcgttctgttcgtaaacactattggcgtcgtaaggttaggaaaattcgtttgctagcgatattgagtgataatcatctgtgtcctccattagataaatccagtttacggcaatggagattaaaaaaagtctatccagaaaatgagttatttatggaatggcagcggacagaggataaagctaatgtaaatccctataaatttagatatatttgtttgacgcagaaattggatttgacagatattactcaacgatacattttgggacgtgcattgtatcatataaatcaaagaagagggttccttagcaatcgtaaagaaacgacaaaagaatcagagggttctgtgaaagaagggataaatgctttaactgaggagatggcagcggcagattgtaaatatctaggtgaatatttctatcaactgtatcaaaaaggtgagaagataaggaatcattatacagcacggaaggaacattatttgaaagagtttcgtgccatttgttccaaacaagaattggatgcagatttagtatcgaaacttgaaaaggtaatttttgatcaacgaccactgaaatctcagaaaggacatgttggaccgtgtacttttgagaaaggaaaatcacgctgtccatcatctcatcccttatacgaggattttagaatgtatgcattcattaataatataaaagtgcaagtccataccttatacgaaaatgcagaaagaggtttgacggacgaagaaaaacgaaatatcattcccttatttaaacgtaagtcaaaaaggacttttccatttgaggatatcgctaagaaattagcaggaaagaataactattgctattacaagagtaatgaagaaaagccatataaattcaattatcaaatggacacattggtgtcaggaagtgtagtaaatgcacaattagaagaaatatttggtgaggattggttgagtaatgcttgtgaagtatatacacttgcaaaagaaaagactcgtttccagattatgaatgatatttggcatgtgctattcttctacgatgacaatgaaaaattaaaagaatttgcagttaatcgtttgcaacttaatgatgaacaggcagagagattctctaaaatatccatccctaatgattacgcagcactgagtctgaaagctatccgaaagattcttccttatatgcgtgactatggattgatatattcagaagcggtttttcttgctaatctaatagaggttataccacaccacatatggacaataaaagagatgcgtgaagtagttattgaaaatgtgatagaggtaatgcagtcctatgataaaaaccgtattgatggtcttacgttagagcagtgcgtgaaagctttcttacaggaaagatataatgtcgatgatagcaatcttaggaagctgtatcatccctcaatgatggaactttatcctcgtcagagacccaataatgaaggtatctatcaattggggtctcctcgcatcagtagtgtgaagaacccaatggcaatgcattctttgttccgattgcgtaaagttgtgaatcttttattagcagagggaaaagtcacgccagaaacaaagatacatatagaattttcccgagacttaaatgatgcaaacaagagaaaagcccttcaaacattacaaaaacaaaatgaaaaggatagggaagagtgtaggaaaaaaatagcagaacatatatctaatcctacagatgctgatatccttaaatatcagttatgggaagagcaaagccataaatgtatttatacaggtgaagaaattagaattgcagatttcttgggtgatgagccaaaatatgacattgaacacacgattcctcgtagtgcgggaggtgatagtaccaaaatgaatctgacactttgtagtaatcgttttaatcgtgatataaagaaaacaagacttccttcacaattggcgaatcatgatgatatccttgaaaggatttctggatggaaggataagtatgaggacttagagagacagatacgaaaaatcaacactaaaggtgctacttccaaagaagaaaaagacaaacaaattcaacgaaaacaccaattgaaagaacaatgtaaatattggaaaggcaaatatgaacgttttataatgacggaagttccagaaggtttctctcgtcgtcagggtacagacattagtgtcatatctcgttatgcccgattgtatttaaagtctgtgttcaaacatgtttatatagtaaaaggacttgctacctctaaattcagagagatgtggggcttgcaggatgaatataccaagaaagaaagggttaaccatgtacatcattgtattgatgctatcactatagcttgtattgataaggctgcttatgataaattagcagaatattatcataaatatgatgagtataagtataacaagggtgaaagacctagctttgaactgccttggacttcatttgttagtgatgtcaagaatatacaagatgaactattaattgctcattactctaaagatagtatgcccaagcaagctaagcgttatgtcaaaaatagtaagggagataagattttgacacaaggggatactgctagagcttcgttgcacaatgatacctattatggtgccatagaagttgacggaatggtaaaatatgtggttcgtaagagtcttgatggtttagatgaaaaagacgtaaagaatatcgttgatggagaggttcgttctaaagtagagaatgctattcaccttcatggttctttgaaaaaggctttggaggaagttatatggatgaatgaagagaaacgaatccctattaagaaagtacgcatatttacgggttctgttactcgaccaataaatatccgccaacagcgtgatttatctaaacatgaatataaacgtcagtaccatgtgcagaacgatcgtaactatatgatggcaatctatgtggggctggataaaaaaggaaaagagaaacgtgaatttgagcttgtcaacaatataactgcagcttacttttatcgtaggagtaacgacaagataccaacagataatcaacttgttccattaaggagtaaaagcggctatgaactaaggtataagttgaaaattggcactatggtgattctctatgaaaataacccagaagaagtatgggaacttgataaaaggaatcttcaaaaaagactgtataaagtgacaggaatgtcgtcaatggtcttacaggataaatattattttggtactatagaattagtgcatcatcaagatgcccgtccaagtacggaaattaaaaagaaaaatggagaatttaaagccaatgaagagtttaggaatggtgtcaagttactccatactcaatttaatgctcttgttcaagggattgactttgaaattaatgatttaggcgagataaggaggttaatatgattaaacaaacgttgatgtttacatcaccagtctatttgtctttgaaagatcatcaattggtagtcacattcaaagataataaagatactgttacacgacctattgaagatataggctttgtaataatcgaaaaccaggaggttggcatttctgtgccagcacttaatgaattagcagagaataatgtatcagtagtcttttgtgacagaaaaaagatgcctcaaactatgctaatgccccttgaaggtaatacaacacaacaggaaagttacaaatatcaaatagaagcaacggcttcaatgaaaaagaatatttggaaacaacttgtagaaagtaaaatcaaaaaccaggctttattattgaataaggtaggtaagaatggtgatgtgttgaagcaatattatatgaatgtgaaatctggagatacagacaatcgtgaaggtgcggcagcacgggaatattggagtcagatttttgaagaaggtttcagaagggatcgagacggattaccacccaataacctattgaattatggatatacaatactgcgtgcagccgtagcccgtgctttaataggttcaggtttatatcctgcatttggtgtctttcatcgcaatcgatataatgcatttcctttggctgacgatgtaatggagccttatcgaccatttgtcgatgaaattgtatatcatttgtattatgatggttctgttagtgaacttgacaatcaatccaaaggaactttattaagagtattattctctgatgtgaagatgggaaaggtaactcgccctttggaaaatgccttatctttaacaacggcatctctactaaaaatatataaaggagaaacggataaattgtttttgcctgttattacatgagtgaaaatcgtttaaatgcataccatattatgtggttgtttgtcttttttgacttaccagtagttacaaagaaagagcgaaagattgcgtctcttttccggaagaatcttatgaaagacggttttgtgatgttacaatactctgtatatattagacattgtgcttcttatgaaagccaagcggttcacataaaaagagtaaaggctatagttccagaaacaggaatggtaagtattttaagtgtgacagataagcaatatggtgatattgtgaacttttgggggaaggaaaaaaagaaaaaagtgccaacggaacctttgcaattggagtttttttaataattttgtagcgtaaatccttatcataagccacttcttagggataaatattggtgtaagttcctgtaatacagttgaataacatacctaagttgtggtttgatgtaggaatagagtgataaacaacttaatttcgtatctttgcacccaagtttcagttgtggtttgatgtaggaatagagtgataaacaactttaccgatggtgatgccaatgccctcaagttgtggtttgatgtaggaatagagtgataaacaacgatagtgagccagacgataagcctaagaaggttgtggtttgatgtaggaatagagtgataaacaacgttggggatgacccaagaatcaatcagacagttgtggtttgatgtaggaatagagtgataaacaacttatctttgcaccgaaccaccaaccttcgcgttgtggtttgatgtaggaatagagtgataaacaactacatgggtggtggatcgttacaatgaagagttgtggtttgatgtaggaatagagtgataaacaacgcggcagcaaatttttcactcttcactctgttgtggtttgatgtaggaatagagtgataaacaacatgcctttcagtacatgcagccacacatcggttgtggtttgatgtaggaatagagtgataaacaacctttgccaagcgttagcgcgttgcggtttcgttgtggtttgatgtaggaatagagtgataaacaaccatttccttaacatctgttagtagttgcagttgtggtttgatgtaggaatagagtgataaacaaccattacgtaaacagcagcatagccaagtagttgtggtttgatgtaggaatagagtgataaacaacctataaagttggcaaccgttaccgagaattgttgtggtttgatgtaggaatagagtgataaacaacacggttacgaatatcttacctatctgaaagttgtggtttgatgtaggaatagagtgataaacaacttaaatttttatattatgtcacgttttgaagttgtggtttgatgtaggaatagagtgataaacaacgcgagaaccacaaaacggatattgatattagttgtggtttgatgtaggaatagagtgataaacaactctgaacctcaacaacggcaacgccaacaagttgtggtttgatgtaggaatagagtgataaacaacgccatgacagaggcaatgaacagaaatatcgttgtggtttgatgtaggaatagagtgataaacaacaggtgtaggagattcgtcacccagcagggtgttgtggtttgatgtaggaatagagtgataaacaacaaagtagtattaatcaaaaaaacaaaggagttgtggtttgatgtaggaatagagtgataaacaacttgcaacaaaaggaacgaaagacagaaaagttgtggtttgatgtaggaatagagtgataaacaaccaagaacaagatacaccatcgtactggcaggttgtggtttgatgtaggaatagagtgataaacaacacatcaccgcttacataaagcaatccacacgttgtggtttgatgtaggaatagagtgataaacaacagatatatcgttatataaacgctatcataagttgtggtttgatgtaggaatagagtgataaacaacgaataattccacaagagccatacaactcatgttgtggtttgatgtaggaatagagtgataaacaacagataacggtcaaaggaacatagaaataatgttgtggtttgatgtaggaatagagtgataaacaacttaggttttagaaattatattggacttgaggttgtggtttgatgtaggaatagagtgataaacaaccaaataccaacaaataaggatggataatcgttgtggtttgatgtaggaatagagtgataaacaacacctggtttccacttcgacatcgtcaataagttgtggtttgatgtaggaatagagtgataaacaacttctcaggtttaaacatatcaccttgcgcagttgtggtttgatgtaggaatagagtgataaacaacatccaaaattagatttatagcgcacgcacagttgtggtttgatgtaggaatagagtgataaacaacttattatatataatatatatacccacagagttgtggtttgatgtaggaatagagtgataaacaactcggcattccttttcgaagttgtgttgaaggttgtggtttgatgtaggaatagagtgataaacaacttcttccggatggacatctgccaaacaagagttgtggtttgatgtaggaatagagtgataaacaacggagctggcgcaagaccggcacaacttcaagttgtggtttgatgtaggaatagagtgataaacaacgcggagggcgttttttattattaactttttgttgtggtttgatgtaggaatagagtgataaacaacatactttgtactcttgacttgcatctgcatgttgtggtttgatgtaggaatagagtgataaacaacgaatttgtgacatatataaagtaaacccacgttgtggtttgatgtaggaatagagtgataaacaaccgggtaaaaaattgaatcattagaatgtagttgtggtttgatgtaggaatagagtgataaacaatgaagtgaacccagaaagttggacacaacttgagagttcacatgagttatagtttagaagaaaagcttgaagcgattgctttagtagagcaaggtga

SEQ ID NO: 4226 - DNA, 14124 bp, synthetic construct
  misc_feature 1..14124: note = Synthetic
  source 1..14124: mol_type = other DNA
ctttatacccagggcgttgccctgggctaagagcttctgccccttcagggcgtgcttccaccactttgagataactcaataactccccttggagaaatcattgcccactaaagcacttgtcttaactcctttaactccttaactcctttaactcctgtgaaacctcctgtgaaatctcctttgaaatcacctccatattgtttttgcaaaaataggaaatagttttcaattagccaaacattcttactcttttcactgatttcttaataaatatttggcagtctcatagaaaagccatacctttgtcgagtctaagaatttcaattcaaataacacaaagacatatgttccgactgaagacattaacgatattaggcagcaaggccgcgctatccaccctccccgagggcaagctgctcatcaatacgatcaacgcccattcctacaacacagccctgaaggatcccctctttgccgaggccctgtcgtgtggcgacgtactcatccccgatggagtgagcatcgtgaaagcctgccgatggataggagcgaagtcgcagcctcgtgagcgcatcgcaggctgggatctcttcgactacgagatgaaccgtctcgaacgtgagagtgaagcatcaaccgccaaaggcgaaagtcctaagacagtgatgtttatgggaagctctcagaaagtactcgacctgatagtgaagcgagccgccgaggtatatccccatctcaaggtagccacctattcacccccttacaagcccgagttcaccgacgaggacaaccgcgccatcatcaccgccatccatgcctccaatcccgacctgctgtggataggcatgacagctccgaagcaagagaagtggacctattcccgctggtcagagctcgacatccactgtcatgtaggcaccatcggagccgtcttcgacttctttgcgggcaccgtagcgcgtgcccccttatggtggcagaaccatggtctcgaatggctctaccgtctcctgaaagaaccccgccgcatgtggcgtcgttacatcctcggcaacaccctcttcctcaagaacatgttgaccgagaaactctccaaataacccttggcagcaatccccagcaccagcaagcatcgagcattagcatcaagtgggctctcagcaagcatcaagcatcgagtgagcactcagcaagcagcaatcatcgagcaagcagcagcatgagcagcaagtatcgggcaaccacccagtatcgagcaagctgcaatgagcaagcaaactgcaaccaagtccttgagtgaaagcgggttcatccccgcacaaaaaaaacgtagctctgctgctggcgaagacctctgatggtccgccaaccttatagcgaagcggtttgagcaccgagtagggcggtttcctcttcttccctgaggggagaagaccgagatgagaggtggaccctcccttaagggtaagggaggactggtgggttttcgaaagaacttaaggtttaagggaatcctggtgggttttcgagaaaatcactattatgtcaagaaaaagcaaatataaatgcaagaaatgcggctacgccacggacatatatgaaggccgtggcttcatgggccaacacatagaagccatgacctgccccgactgccacaacatagtcccccttgtcgtaggcggcgtcataggagatgccgcccccagcttcaactcccttgtagccagactctgcctccgttgcggttccgaccgcatacacctctgggatcaccacacatgcccccgttgtggaggtgagatgcaacccactggcgactccgaattttggacgtaagaagccccaaagcagcctgtctgtattattccaataccataaaacatcagtttctaattttaaaatatgtgaattcttcttctttttagacaaaaagcattacttttacagcgaaaaatgcactaaccactataatcctgcctcatattttaaaatgtaagaattatacaaagtagtgtgataacgatattattttgtaaatagtaaattatgtcgaatatcattttaaatcctggtgtttacgaaacactgatttcccaagcaatccaagataagctcgatgaattatccgagtctaagttcttggttaagaaagagaatattgacagcgcagaatcttataagatgctggctgaatatttgacggaaatagtttcaggcatcttaaaaggttatttcaggcgcaaagatgccaatgatacgatttctgcacaagtagaagtcgtcaatcgtattcttaaatttatagaacacgaatggaatgctgagggaatagaaaccacaccagatttactttcagaagaaaataagctatttttccttcgaggcatttacgacaaggtgggatatactaatgaacaagtcgcagcgaaagtcaagaaccaacccatttctggatatagagtaagcaatctgtttactggtggaaacgatctttccatggatgaagaagtaagacgagatatccagacagcagatgaaatagatttgttagtatcctttatcaagtttgagggtctacgactaattattgattcactacgtgagttagttcagcgtactggtaccagattacgagtcatgacaaccacttatatgggtgccacagacccaaaagcagtgcgaaagttgtatgacctaagagagttgggcaatgttgagatacgtgcttctttcaataccgagcaggaacgtttacatgctaagtcttatatctttacccgtaaaacaaatttcgacactgcatatattggttcgagcaatctcagccggtctgctttgactaagggattggagtggaatttgcgtgtcacgaccatagagaatccacatattatcaataagaccaaagctacgtttgatagttattggaatagtgatgattttgagaagcttgatacagaagaagcgcttcgtcgatttgaagagtctatctggaacgagcgccatgtcagctatggtcagcagacagatagtgaatacgttacacgttttgaacgtaagactcatcagataaaggtgctcgagaaattacagtttgagcgcaacattgttcatagttataaaaacctcatcatagctgccacaggtacaggcaagacagctattagtgcttttgatttcaaagattataacaagaaattcaagaaagaacatggacgaaatgcacgattattgtttgtagtgcatcgagaaaagattctcaatcaagctcgcagtacttattgctctgtcttggtagacagtaattttggagagatatggacaggtaagacaaaaccaggttataatagtagtcttgaacatctgtttattaccatccagaccttgaataataactgggtcacctttgaacgtatgggaccagattattatgattacatcgtcatagatgaggtacatcatagtgctgcaggtagttatcgtgaactctttaatagatttaagcccgagatatttgtaggtcttactgctactccagaacgaatggatggcaaagagattcgccccgatttcaataatcgttttgctgcagaaatccgtttgcaggaagcgcttaatcaacagctcttgtcacctttcgattatttctgtgtcacagacgatagtgtagacttaagcaggcttgcctgcaaaggcgacaaatatgatgtatcccagctaaatcaggtgtataataacaatgcacagcgttttggtattatacagaaagccttggacaattacgtgaatgatccgcatgaatgtaaggccgtttgtttctgttgtagcatagaccatgctaattatatggataccatgttccgaagtcatggatacaaatcaatggctgtcacttcacgcaattcctcagagttaagccatgcctcaatgatgcttgcacatggagaaatcaactatctctgtgtagcagatatcatgaacgagggtgtcgatattcccgagatagatacagtcttgtttttgcgtcctaccgaatcgttgaccatattcttgcagcagctgggtcgaggattacgattggctgatggcaagacctgtcttacagtgctcgattttgtagctcaggccaaccagtcgtataattacgagagtcgttttcgtgctctcgtaggacgttcctctcagagtatagagaaggagataaagaatggctttatcttcttgccacgtggttgtaccatcacgatggagaaacgagcacaatcatatattcttaaaaatattcatgaagccatatttaatctttcccggttgagaagagaatgtctttctttcactcagaacacggggcaagatcttacttatgagaacttcattaataactttgatcttgactggcgaatcgtctataaatcaccggggtcgtgggctcgcttaaagaagcagtcgggcatagatgtgcccgactttgatgagcaaagcaagtacacgaagttgttggaaggcggcttggctcgtctcttccataccaacagctatcagtatcttgaatatcttctgaaactgataagcaacggaatggttcatccttcaaatgctacggctcgagaagataaattcttccagttgttctattatactgtatggatggatgacattcaaaaagtaaacaaactatatcagcaatcttttgcgagttgttctgatgctgttcgttccgtagccagtcttaagtggtttatggaggaacttagttttatggtttcacttcgtcatagtcagttgaaccaaaccaccaactggctaaaggtagatgatcaagctgaaatagaactctatggctgctatagctcagacgagattcacttactcttggagaataaactgggacgctggcaggtattgggcacacaatataataaggagcgcaaatttgccatggtctttgtgacattgaataaatccgataaggaatattcgcccagcacactatatgaagattatgccatatcgcccgagcagttccactggcaatcaatgaacaaagttcgtcagaatagtgaagagggacagcgtatcattcagcagcgtgagaatggatggaagttcctgctctttgtccgtgattcaaagcaggacgaatatggaatgacaaatgcgtactattgtcttggatttatggactttgacagctgtcataatgaatgccctatgaatgtcatttgggatatgcaacaatctattccaggatttattcttgaatcggctaaggctgtataacgacacgagatatgaaacaaatagaagtagttgccgccatcatctgcaatggcggcaaaatatttgccacccaacgaggatatggcgaatggaaagactggtgggagttccctggtggtaagatagaaataggagagagtcccgaacaggcactctgtcgtgaaatacgtgaggagttggctacagaaatatccgtaggtaatttgcttcataccgtagagtacgattatccccatttccatctcacgatgcattgttatctgtgtaaagtagagagtggcaacctcacccttttagaacatgaagcagccaaatggttgtccttagataatctgcaaagtgtcaactggttgcccgcagatagggaagtgttggagtatttggagaaataagaaagatggactaaatagaagttgcacagaatcgtataaaaaaaactcccaccgaagcgggagtataggtttaacaccttcggcagcaattaccgccttattgtgataagatgtaggaaatcttattctgaaggcaaaaatataacaaaaaacttgtttatccaaattatttgctgtacttttacaaaaaattaataattcattctataaaataatgaaagtatgactaaaattttaggaattgacacaggaactaatagtcttggatgggctattgttgagaagcagaccgatggatatcatttgcttgataaaggtgtaaacatcttccaagaaggtgtcaaaatcgaaaaaggaaaagagtcttctaaagcagcagagcgtacggctcataaagcagcaagagtaagaaactatcgcataaaattacgtaagatccgtctgcttcgtgttttaagtgattcccatttgtgtccaccactttctaaggccgaactttctgcatggcgactcaagaaagagtatcccaagaatgaattgtttatgcaatggcaaagtactgatgatgcattagaaaagacaccatacgcatgtagacacaagtgcctacatgagagtcttgattttagtagcatgactgatagatatatcttaggacgtgccttttatcacatgattcagcgacgtggctttttaagcaatcgtaaagatcagagtggtgatgatacaggaaaggtaaaagaaagtatcagcaacctgactcaagagatgcatgatgctggttatgagtatcttggagattatttttattctctttataaaagaggagagaagattcgtaatcattatactgcacgcaatgagcattatcttagtgaatttaaagccatttgtgaaaagcaagatttagctaagaatcttggtcaagaggtggtaagtcaaatagaaaaagctatcttcgaccagcgtcccttaaagtcacaaaaggggcaagtgggcaaatgtgtgtttgagaaaaacaagaccaaatgcccctcttctcatcctatgtacgaagagtatagaatgctctctttcatcaataatattaaaatcctaacgccaaaagatgatgcattacgacctttgtctgcagaggaacgagaacttatcatgcctttgttcatccgtaaatcgaagaagcaatttgattttgaagatatagcaaagaaactggcacccaagaagcaatatggatttttcaaaaagagtgccgatgctggtatgccgtatcttttcaattatcctatggatacatctgtttctggttgtcctgtaacagccgcactgaaagatatctttggcgacaactggattgatggcctttgcgaaacctatacgctggctgagggtaaaagtcgtttggatattattaatgatatttggcatgcattattcttttatacagataatacaaaacttgcagagtttgctaagaatcgtttacaattgagcgatgaagaagccaagaagttttgcgaaatttctttgccagctgattatgcttcattaagtttgaaagctatttgtaagattcttccttatctaagaagaggtttgatttattctcatgctgtctttttgggtaatttgtgtgaagtaatgccgcaatacgaatggaatatagaggaaatgcgtgaagcagccattgataatattatccacgaaatgaaccagatcgattctaaggatgcacgtacttttgaggtttgtattaaagaatatctgagggagcagtatcatgtatctgatgagaaactcaaaaagttgtaccatccttcgatgatggaggtatatccaagagtacaacatactaacaatcacggtgtttatcagcttggatcacctcgaattgatagcgttcgtaacccaatggctatgcgctctatgtttagattgcgcaaattggtaaaccgcttgttggaagagggaaagatagattcggataccgaaattcatatagagtttgcacgtgagctgaatgatgctaacaagcgtaatgctattgctgcttttacaaaggaaaatcaaaatgcaaatgatgatgccagaaagcagattattgctcttttcaagaaagaaacaggaaaggatatcgcccccacagataatgatgtcttgaaatatgttctttggaaagagcagaaacacatttgcctgtatacaggaaagcagatagctatttctgatcttgtaggggcaaatccaaagtttgatattgaacatacgattcctcgtagtgttggtggcgatagtacgaaaatgaacctgacactttgtgatagtcgtttcaatagagaagtcaagaaaaccaagttgccaacagagttgtctaattacgatgagattatgactcgtattcaaggctggaaagatgaatatgaatctcttgaagctcaaattcgtaagcaaaagaagttatcaaaaggtgcaacgactaaagaacagaaagataatatcatacgtaaacgtcatttattagaacttcgtcgtgattattggaaaggaaagtacctacgtttcacgatggagagtgtacctgaaggttttagtcgtcgtcaaggtactgatatcagtgtgatttcaaagtatgcacgtctttacctaaaatcactattcaagcatgtctataccgttaagggtattgcaacttccaatttcagaaaaatctggggtatacaagatatttatagcaaaaaagaacgcgttaaccatgtgcatcattgcatagatgccattgtaatagcttgtacaggcttggatgaatataataagttgggtgcatattatcatgatgaagaaaatcatgaatggtatggtaagtctaaggcttattttaaaaagccatggccaacttttgttgaagatatcaaaaaggtgcaagatgaaatcttggtttatcattatacaccagataatatgccaaagcaaggacgtcgtagaattaaaatcaatggtcaaaaagtgctttgcaagggtgatgctgcgagaggttctttacataatgatacatactatggtgctatagagaacgatggtcaagtgaagtacgttaaacgaatagacttgacatcactcaaagagagtgatgtgaaaaatatagtagacgatactgtaagagagattataaaagcagctatcaaatgctttagttcaaggctatgattttgagattaacgaacttggagaaattaaaagattaaggtaatatgattaagcagacattattcttttcaactcccgtttgtctttcgcttaagaattgccagattgtaatttcttggaaagactgcgacgataaggtaactcgtcctattgaagatatagggtgtgtcgttttagaaaatcaaatgataaacattaccttgccgcttcttaacgagttggtaaagaataatgttgctgtcatattatgtgataacaagatgatgccgacatctatgttacagagtttagacgcaaatactacgcaagctgaaagttttaaatttcagcttgctgttagtgaacctatgaaaaagcaagcctggaaacaaataattgagtcaaaaattaaaaatcaggcttccattttgtcccttacaggaaaaagtggtgatgtattaaaaccatattttagtaacgtcaaaagcggagattctgataacagagaaggattagcagctaaaatatattggaatatgctctttggtcattcttttaagagagaacgtgatggaagtactcccaatgaactattgaattatggatattccattttgcgagcagcaacagctcgggctttacttggatccggtttattgccaaatttgggtatatttcataagagtagatacaatgcttttccactggcagatgacgttatggaaccttatcgtccttttgttgacgaaattgtttatactcttttcagcaaagacgtaaccgatttaaataaagattcaaaatccgaattattgcgggtgctaaattgtgatgtaaatattggaaaagtaaagcgtccattacaaatagctttaactattactacagcctctctcgttaaatattattctggtcaagtaaaaaaactgtctttgcccatcattatatgacagaagatagacttaatgcatatcatattatgtggctatttgtattcttcgatttaccagttaccactaaaaaagacatgaaagcagcttctctgtttcgtaagaacttagaaaaagatggtttctccatgatgcaattttctgtttatattcgtcattgtgcttcgagagaaagtttagaagtacatattaaacgtgtgaaatccttattgcctgaatctggaaaggttagtatactgagtgttacagataagcaatatggtgatatttataatttctgggggaagcctaaaagtattaataagagtaaaattacgaaaaaagtaatcagtgaacctattcaactggaatttttttagtaaatttgcaaatagaaaaaagtcctactcgccatttcttacaagaaatatggttattattacctgattatcagtatattcgtttctttaggttgtggtttgatgtaggaatataaagatatacaactatgagcttacaattaagagcctgtaccttgttgtggtttgatgtaggaatataaagatatacaactgagagttaacatcgatgcactcaaggcagttgtggtttgatgtaggaatataaagatatacaactgtattactttttttgttttgcatgatgtggttgtggtttgatgtaggaatataaagatatacaactgctggctgtcacctttcccttgaagactagttgtggtttgatgtaggaatataaagatatacaacagagaatcatgcttgacaagatcaagggcgttgtggtttgatgtaggaatataaagatatacaacgtagaaatatgagatgaagcaacaggtgagttgtggtttgatgtaggaatataaagatatacaaccacggcgtgaccttccttgacggtggcccggttgtggtttgatgtaggaatataaagatatacaacgaatataaaacaggtacatgaccagctaagttgtggtttgatgtaggaatataaagatatacaacgccaagcggaaaaatatgattacagaagagttgtggtttgatgtaggaatataaagatatacaactatcctatttttgtaaatcagtggtcagggttgtggtttgatgtaggaatataaagatatacaacgcacgcgcatataacaaatatggcttaccagttgtggtttgatgtaggaatataaagatatacaactatcctatttttgtaaatcagtggtcagggttgtggtttgatgtaggaatataaagatatacaacgcacgcgcatataacaaatatggcttaccagttgtggtttgatgtaggaatataaagatatacaaccgtgatcctgactttaatgagttgatgacggttgtggtttgatgtaggaatataaagatatacaacactcgttagggtttacccattgataaaaggttgtggtttgatgtaggaatataaagatatacaacaagatacggaattgtgaaggctctatatggttgtggtttgatgtaggaatataaagatatacaaccttatgcaatcgaggtaaagggtaagatagttgtggtttgatgtaggaatataaagatatacaacatcgacttctttgaactctatgtcaacacagttgtggtttgatgtaggaatataaagatatacaaccatagcatgaatattgaagataccttcggagttgtggtttgatgtaggaatataaagatatacaaccggtagtctggagccttttagggtatcacgttgtggtttgatgtaggaatataattatgttaacaagtgaacctgctatttatgttgaataataatgcaggtcacttgcataataaaagagtgtgcgattatcgaaagtttctgttgatgaatcttcagaaataagtgatggcgtgtttctttacttttcaataattagttggagtatgcgttatttgtaatgttaattttttaattatttgatatatgagaaaatcggagaggatattcaactttgaaatggaggagagggaaggtaaggtgctgctcacaacgaaggaatggccgtatagtgtgctgcaggtggtgccggctacgccagagacgtttgatgaggtggtggagggatgctcaaatgtgtattgatgccttgaaggatgctatggcgcaagcggctgttttttattattctaatgttattttgtcatagtttttggctatgacaaaataatattttttcttaaaagaggaggattttatttagaaaatcaacctgtccttttttagccataataagggattttttctaaaatcaccccgtccctctttaccattaaaaagggggtctttcgaaaacccaccagtcctcccttacccttaagggagggtccacctctcatctcggtcttctcccctcagggaagaagaggaaaccgccctactcggtgctcaaaccgcttcgctataaggttggcggaccatcagaggtcttcgccagcagcggagctgcattttgcggtatgcgaccgcatggatatgagagagcgaagaagctgcagaaaggccatgaagcccaatacgccctcctatatgattgaaattacccagcacgccctgaaggggcagaagctcttagcccagggcatcgccctgggtatgatgtcagtcagaatgcgccctgtaagggcaaaagctttaaaatacacataataaaaatggtaaatcagttgcgatatgtaaagcttttgcccttacaggacgccaggtttgcgaacataaaaaacccagggcggtgccctgggctaagagcttttgggccttcagcccgtacttaaaccacttgcgaaacttgagtaaggtagttaagggagttaaggagtttcagatgtggaaatggatctccttgagccatttgcgggtgtcgaaacagggacaggccttgcggacgccggggaggtcgcagtgaccgaggatctcggcatcggggaagtcgacgcagaggctgcggagcaattcttccatggtgatcttctgagcttcggtacgggtgtcggcaggacgacccttggcatcgagtccgccttcgtagcagatgcctatgctgttcttgttgaagtggagggcgtgggcgcctacttcgttctcgggtcggcaggggtagagggtgccgtcgcgggtgatgtagtagtgatagccgacgctgctatagccacgggctttatggcaggcttcgagctgctcgatggtgaaactctgggtgactctcgtcgcgctgcaatgcagcacgatgagagagatgttacggtgatttttcattgtcgttagatttttttggttaacaaacgatggggtggtcgtctacattctgccgcagctggtgacgcagaaggcgccggcaatggcggtgagaacggtgatgacgaagttgatgatgttttttaatgtttcttttttcataatggtttaatttttttaatggttaatgtttttttcgaggagaattttcaggagttaagggagttaagacattactctccttcgccgcctgtattctcgccacctgaagggttgctgcctgtgccgccggaagggttgctgtcagagccgccggaaggggtagtggtgcctccgcctgtggtgccgcctggcttcgtggtggaagaggtgacgaggatgtcggctgcatccttgagggtggcgtcgaggtcgagacggctgttggtgagcttgcctgtggcacgggcacggagcttgacgccctctatgttctttgccacggtgaaggattccttcgtgtcggctcccttcttgggtcggatgccaatggagaaaatggcgaggtcgtcaatcttcacggagtagccgctgaggacgagttccttgacgcacttcaccatgtcggtgaggatgccgcgtacggctcctgccgagaagggtgtgttgtggctcgacatgtgctcggcgagttggtcgatgctgatggttgcggtgactgcaggacgggcatagtacttgccgtacgttcctggaaactttttgttgttgttttttactaacttgtagagaatcatagttcttttagattttggttaatgtattacttgagtgcactaagttcattctctctgaatgacaatgcaaagatacgatgattttatttggcaatgatgccaaataaaacatgtcatgagaaatggtgccaaatgatgcgaaatgatgctttttgattgcatcatttcgcaaaatccaccagtcctcccttagccttaagtttttttcgaaaacccaccagtcctcccttacccttaagggagggtccacctctcatct

SEQ ID NO: 4227 - DNA, 14106 bp, synthetic construct
  source 1..14106: mol_type = other DNA
  misc_feature 1..14106: note = Synthetic
tttaatttttaaaaacactgctgtaatttttgccagcgctgttttaatttttgccagcgctgttttaatttttgccagcactgttttaatttttgccagcactgttttaatttttgccagcgctgttgttattagaaaaaaaactcctccgttgaggacgaaggaccataacctgctgttttcacaacgtaataatccttattgtaatttgcaaaaagatagtgtcgtaaaggtaaatttttcagatagttctatgttgttattccaatacaaatatgtaaatttggggcgttatttaataaaacatgcttgtaaatactaccaataaaaaaactcccaccgaagcgggagtataggttttacccttcggccattatggccttattgtgataagatgtaggaatcttattgtttgcaaagttaggaagactggatgaaaaaacaaaataactaaaaacatttattttaagatttaactataattacgaaatatggaaagaatactgggtattgacactggaacaaatagccttggttgggccattgtcgataaggaagaagggaaatcgacgcttatagcgaaaggaacgaatatcttcacagaaggcgtaaaaatagaaaaaggtatagagtcttcaaaggctgctgagcgaacaaagtatcgttctgttcggaagcactattggagaaggaaaataagaaaaataagattgctgaccatattgagtgagaatcatttgtgtcctcccttggataaatcaatcctgcgtcagtggagattaaagaaattatatcctgacaatgaacttttcatggaatggcagcggacagaagacaaagcgcaagtcaatccttacaagttccgttatatttgtttgacccagaaacttgacatgtctgatatcgttcagcgttatatgttaggccgtgctttatatcatctgaatcagcgtcgtgggttcctgagcaaccgtaaggaagccaccagagaatcggaaggtgcgttaaaagaaggaattagtgccttatctgaagaaatgaaagaagcaggatgcgagtatctgggagaatacttttatcagttataccagaaaggtgaaaagataaggaatcattatacagccagaaaagagcattatctgaaagagtatcgtgctatttgcgagaaacagggattggaggctgcacttgtaaagaagttggaacatgctatttttgaccagcgcccacttaagtcgcaaaagggacaagtcggcacatgtacatttgaaaaaggaaagtctcgatgtccatcttcgcatcctttgtatgaagattttagaatgtatagttttcttaataatataaaggtacaagttaatacactatacgagaattgtgaacgtgggttgactaatgaagaaaaggcccgaataattcctttatttaagcgtaagtcaaagcggacattcttgtttgaggacatcgcgaagaaactggcaggcaagaacaattattgctactacaaaagtaatgaggataagccttataagtttaactatcagatggatactctagtgtcaggtagcattgtaaatgcccagctggaagaaatctttggggaggactggctgacctgtgtatgtgaagtatatacgcaagccaataacaaaactcgtttccagataatgaacgatatatggcatacgttgttcttctatgatgacgacgaaaaattaaagagttttgccgtcaatcgtttacaattggatgatgaacaggcggataagttcagtaagatttctatgccaaatgattatgctgcgctcagtctaaaagccattcggaagatattaccttatatgcgtgactatggtttgatatactcagaggcagtttttcttgccaatcttgttgagattatgtctcgatatatctggagtgtaaaggaaatgcgcgaagcagcaatagaaaatgtaatagaggtgatgcattcctatgataagaataatattgacggtatgacgttggaacagtgcgtaaaggcgttcttgcacgagcgatacaacgtcagtgacgtggatttaaggaaactgtatcatccttctatgatggacctctatcctcgtcagcgccctagagagaatggtgtctatcagttaggttcgccccgtattagtagtgtcaagaatccaatggctatgcgctcgctattcagattgcgtaagatagtcaatctactgcttaaagagcgaaaaataacaccagatactaaaattcatattgagttttcgcgtgatttgaatgatgctaatcgtcgttgggctattcaaacatggcagcgtgaaaatgagaaagacagagagaaatgtcgcaaggagatagagaaatatatagcaaatcctaccgatacagatattcttaagtatcaactttgggaagagcagaaccataaatgtctttatacgggggaagaaattcgtctgacagactttttaggtaataatcccaggtatgatattgagcatactattcctcgtagtgcaggaggtgacagcacgaaagcaaacttgacgctttgtagttgcaggtataacagagatgtaaagaaaacaaaattgcctacgcagttgagcgagcatgatgaaatattggaaagaatagcggattggaaagaacggtatgaagacttggatagacagattagaaaaataagtaccaaggggatatcgtcgaaagaagaaaaggataaaataattaaaaggcgtcatctgttatccttgcagcgagattactggcgtggaaagtatcagcgattcacgatgaaagaagttccagaaggtttctcacgccgtcaggggacagatatcagtgtcatatctcgttatgctcgtatgtatctgaaatcagtatttaagcaggtatatatagtaaaaggtgttgcaacgtcagattttcgtaagatttggggcatacaagaggagtacacgaagaaagaacgagtcaatcatgttcatcattgcattgatgccattacgattgcctgcatagacaaatcggaatatgacaagttggctcagttctatcaccagtctgatgaatacaagttcggtagaggtgagaagcctcagtttgaaaaaccttggccgtcgtttgtcagcgacatcaagcaaatacaggacgaattgctgatagcacattacaccaaagacaatatgtccaaacaggctaaacgttatgtccgtgacagccatggagataaggtgttgacacagggagatgtcgctcgctcatcattgcataatgaaacttactatggtgctatcaatgtggatggcgttgttaagtatgttgttaggaaaagcctggatggattagatgagaaagatgttaagaatattgtagatggggaggttcgtgctaaggttgaacatgccattcgacttcacggttctcttaagaaggcattggaaaactccatttggatgaacgaagaaaagcaaatacccataaaaaaagttcgcatatttacaggttctgtcactcgtcccatccatattcgacagcagcgtgacctgtcgaagcatgactataaacggcaataccatgtgcagaatgaccgcaactacatgatggccatttatgttgggcaagataataaaggaaaggagaaacgggaatttgaactcgttaacaacattacagcggcaaacttctataggaagagcaatgataaagtaccgacgaacaaccaactactacctatttatagtaaaagtggctatgaacttaaatatagattgaagattggaacaatggtgcttctctatgaaaatagtcctgaggaagtctgggaacttgataggaaaaacttgcaaaagaggttatataaagtgactggaatgtcgtcgatgattattcagggtaaatttgagtatgggacgatagaaatggttcatcatcaaaatgcaaaaccaagttctgaaattaaaaagattaatggggagtataaatctgatgaggattttcggccggggattaagatgcttcattcccaaataaaagttttggtccagggcgtagattttgagattaacgatttaggtgagataagtaggttgatatgataaagcaaacattaatgtttacatcaccagtgtatttgtctttgaaagaccgccaactggtaattaccttcaaggataataaagatacagtgacacgaccaattgaggatattggctttgttgttattgaaaatccagaagtcacagtgtcggttcctgtgctcaacgagttggctgacaataatgtttcagttatcttctgcgataaaaagaagatgccgaagtccatgcttatgacactggatggcaattccactcagcaggaaagttacaagtatcagatagatgcatctgcaccgacaaagaagaatgtttggaggcaactggtagagtcgaaaatcaggaaccagtcattgttactgcataaggtcggtaagaatggtgacgtgctgaaacagtattatatgaatgtaaagtctggtgacgcagacaatcgtgagggggctgctgcaagagaatattggagtcggctcttcgacgacggattcaagagagagcgcgatggattgccaccaaacaatttgctaaactatggatataccatattgcgtgcagcagttgcacgtgctctgatatgttcgggtttatatccagcctttggcgtattccatcgtaatcggtacaatgcttttccattggcagatgatgtcatggaaccatatcgcccgtttattgatgaaattgtataccacctttattatgatggagcagttagtgaacttgacaaccaaactaaaagaaggttgttaagggtgctcttctctgatgtgaaaatgggaaaggttacccggccattggaaaatgcactttctatgacgacagcatctctactcaaaatgttcaagggcgaaacagataagttgacattaccgatattggtatgagcgaaaaccgtttaaatgcatatcacattatgtggctattcgttttcttcgatttgcctgtggtgacaaaaaaagaacgaaagacagccacactatttagaaaaaatctgatgaaagacggtttcgtgatgttgcaatactccgtctatattcgacattgtgcatcatacgagagccagacagttcatatcaaacgggtgaaagccattgttccagagactggtatggttagcatacttagcgttaccgataagcaatatggtgatattgttaacttctggggaaaggagaaaaagaaaaaaacgccaacagaacctcttcagttggaatttttttagtaatttcgccacgtaattccttctcaaatggccacttcgtaggcgaaaatcgcatctaagtgccttgtaattagaaatatatacaacctaggttgtggtttgatgtaggaatagagtcataaacaacgagagaaatcggctaagagattataatgcgttgtggtttgatgtaggaatagagtcataaacaacttcgggcgttccgacaagtgagtattgccggttgtggtttgatgtaggaatagagtcataaacaacagttatttccttgttagcacctgccttaacgttgtggtttgatgtaggaatagagtcataaacaactgcagcagattggttatggtatcggtgtgtgttgtggtttgatgtaggaatagagtcataaacaaccaaaacataggagaaaaacgtatgaattatgttgtggtttgatgtaggaatagagtcataaacaacaaatagagaataatgagaataatagagaagttgtggtttgatgtaggaatagagtcataaacaactaaataaattaattgttgccatttcttaagttgtggtttgatgtaggaatagagtcataaacaacggtgcaccccgttcgctctccgactacaaggtgactcctgttgatgagattagagagggtttgaaagcactctcctcagaaatagaggtcgaagaaatgatttaatccagctatggccaagagacatgagataagaaacagcactgccgagttcctcatcttccaattggagaataaggaacaaggcattgaggtgatgtatgccgatgagacaatatggtgtacacagaaggcgatgggaatgttatttgattgtgacagaagtgtcataacgaagcatttgaaaaacgtctttgagtctggagaattggttgagaacgcagtatgtgcaaaatttgcacatactgcttcagatgggaaaacttatcagacacaattctatagcctcgacgcagttattgccgtgggctatcgcgtcaactccatccgtgccacacagttccgtcagtgggctgatatttgcctttggtatcatttaatattcaacttgcggtaaggtattatatttttgaaaaaacaggctaataagcctgttcgtggactcccttgacggcgcggccactggggtcgttgagaccgcggaaggcggcatcccattcaagtgctgtggcggtgctgcaggcaacgcttgcctctgagggaacactgcgtgcggcagagtcggaggggaagtgctcagcaaagatgctgcggtaatagtattcctctttgtttcttggcggattgatggggaagcgctcagcagcgtgggccatctgctcgtcggagactgctgccgccgtcacggctttcagtgtgtcaatccacgagtagccgacgccgtcgctgaactgttctttctgtcgccatgccacttcgtggggcagcatgtcggcaaaggcttcacgtacgatcttcttttcgatgataaaactttcctcgctatttggagagaggttgggagaaaggccacacatcttggcctcaggatttgtgcgcattgcgacatcgagaaactctttgtcgagaaacggcacgcgcccctctacgccccaggccgaaaggctcttgttggctcgcagacagtcgtagagatggagtttggagagtttgcgcacggtctcttcgtggaaatccttggccgaaggagccttgtggaagtagaggtagccgccgaatatctcgtcggcgccctcgccggagagcaccatcttgatgcccattgattttatgacgcgcgccagaagatacatcggagtagaggcgcgtacggtggtcacgtcgtaggtctcaatgaagtagatgacgtcgcggatagcgtcgaggccttcctgaatggtatagttgatctcgtggtgtaccgtaccgatatggtcggctaccaggcgggccttggccaggtcgggggcgcctttcaggcctacggcaaacgagtgcagacgcggccagtaggctttcgacttgctgtcgtcctcaatgcgcatagaagaatatttctcggcaacggcagagacaatcgaggagtcaagccctccagacagaaggacgccgtaaggaacgtcggacatcaactggcgcttgacggctgactcaagtgcgtcgcggatggctgcggcactggcgtcattgtcctttacggcatcatattgcatccagtcgcgatggtaataagaagcaatgggtaagttgctataaaagtagtggcccggtggaaatggctcgtagcgttcgcactggccctcaagggctttcagttcggaggcgacgtagatggtaccgtcgctgtcgtagccgatatataaaggtatcacgccaatggggtcgcgggcaatgagaaactcatcgcgctcttcgtcgtagagcacgaaggcaaagatgccgttgagttcttcaagcatagaggtaatgggtgagagaatacccttgtcactattcgttattcccttatcttttatctcttccatcttatttcttgcctcttgatagagggccagtattacctcgcagtcggagcctgtctggaagtcgtagcggcctgcaaagcgccggcggatttcctgatgattgtatatctcgccgttgacagccaacacctgtaggcccccacctgtcccgtccgaaggacgtgggctatacagcggctggctaccgctttcagggtcgacaatgctcagccgctcatgggcaaggactgcagaaccgccacagtaaatgccgctccagtctgggccgcgatgacggattttctgactcatgcgcaatgctttctgacgtagtgcctgcgtctgttcctttacatttaatatcgctactattccacacataattttttcgatatttcgttatcacgttattgcgttatttcgttatcacgttatttcgattataaataagagagataaaggtaattggtctgggctggatactcagcggccagagtgtctatctggttgacagtgggagagaggcccagcatctttcgccatttgcgcacgatgagtcctgcctgctccattttcattctgtcgcccaaacctaaggcgcgtgctatctgaaagtcggaaaatccgtaagtcttcgcagcacgcagcagcatgaatacctctggcgactggaggtgctccttgaattcgctcggttccataaactctgcaatctcagagagataagccgtctctctcaactgtaaatcgatgtcgacgatgtgcttcaatttctgcagaaaccagcggtcgatcatcgtcaactggtgtatctgctctatgctgtgccctatctgcaatgcctttgagagtgtgaagatgcgagtgtcggtaggctcgtgcagtgatttcccgatatccttgatttttatctcgtggttctctacaaagccatgcattccctgtcctatcattcgaagacctttctgcagagcctcttcgaaagtgcggcctattgccatcacttcgccgacactcttcatagaagagcccaactcgcggctgacgccatggaactttgttagatcccagcgcggaattttcaccacaacatagtcaagggctggctcgaagaaggcgcttgttgtcttggtcactgagtttttcaggtcgaacagaccgtggcccaatccgagtttggcagccacaaaggcgagcggatagcctgtggccttggaggcgagtgccgacgagcggctgaggcgtgcattgacctctatgacacgatagtcttcgctgtcagggtcaagagcatactgcacgttacattcgccgacaatgccgatatggcgtattatctttatggcaagtgcgcgcagtttgtggtattcgctgttcgagagagtctgggatggtgccactacgatgctctcaccggtatggatgccaagagggtcgaagttttccatgttgcatacggtgatgcagttgtcaaagcggtcgcgaaccacctcatactctatttccttccatcccttgagtgatttttctaccagcacctgagaagagaaggagaatgcctcttcggcctgctttgaaagttcgtcatcgttgtcgcagaaaccagagccgaggccaccgagagcataggcggctctcagtatgacgggaaatcccagttcgtgggctgcacggcgcacctcctcaatgcttgagcaggcttcactgctgatggttttcacgccaatctcatcaagtcgtttaacaaaaaggtcacgatcctccgtgtcgatgattgcctgaacaggggtacccatcactctgactccatatttctccagaacgccacgcttgtagagttccactccgcagttcagagccgtctgtccgccaaaggaaagcaagatgccgtcggggcgttctttctcaatgatgcgctctacgaattctggcgtgacgggctggaaatatactatgtcggctacgtctttggacgtctgtacggttgctatatttggattgacgagcaccgaggtgataccctcttccttcagggctttcaatgcctgtgcaccgctatagtcaaactcgccagcctgtcctatttttaatgcaccagagccgaggagcaatactttcttaacaggggtgagagatgaggggtgaggggtgagggatgagtggtgattggtgagtggtgagtggtgaggagaaaggggtgagaggagagagacaaactcgtcgaacatccattcagtgtcaacaggaccgctacaggcctcgggatggaactgtgccgaaaaccacggcatcgacttatggcgaattccttcgttcgaaccatcgttcatgtttacaaacagtggtgtccattcttcaggcagtgttgtgtcgtcgacggcatagccgtggttctgtgatgttatgaagcagcggtttgtgccaaccatgcgcacaggctggttgtgcgagcgatggccatatttcagtttgtatgtcttggctcctgctgcccttgccagcaactggttgccaaggcaaatgcccataacgggacgtattgtttcgccctcagcctcgcttcgtttggagaggggagttgttgtttttttcaattctttctccaggaaagtgcggatgtgtttcaccgttatatcgcactgttctggatcgccagggccgttggcaagaaagagaccgtcgaaatccaactggttgaagtcgtagtcccaaggtacgcgaatcacctcaatacctctattaagaaggcagcgtatgatgttcgcttttacaccgcagtcaacgagaacgacttttttaaggggtgagaagtcggcttcaggacgatacgtaatcacttccttgcaacttacttgctccacccagttcacggaactgtaatctttagtttcagttgcatctctcacctctaatttctcaccacttacctctattcttcccatcatcacaccgtgctccctaagcacttttgtcagtctgcgcgtgtcaatgcccgtgatggcaggaaccttttcacgcttaagccatgcagaaagcgattcttttgcattccagtgggagtacagattgctgtagtctgcaacaatcaaggctttggggtgtattctgtcgctctcccagaagtcaggaaggctgtctggtgacgccgcttgctcacctctctcctctgacttcttatctcttgcctctgacctctcacctataataggcggcacaccgtagttgccaatcagcggaaaggtcatcaccagaatctggcctgcataacttgggtctgtaaggctttcgggatagcctgtcatggcggtgttgaataccacctcgccagtacactctccctcgtagccgaacgactggccgcagaactcgctgccgtcgctaagtatcagttttgcttgtcttgtcattgtcgctgcttattgtctctcttttctacatagttgataaaagcctgattgaccatgcgcgtgccgcctggagtggggtaatggccagtgaaataccagtcgccagggtgattggggcatgctgcgtgtaagcctttaatgtcttggaaaacaagttcgacaggtgcctgcattcctttcggccgtagcatttccactatctttcgattgatgtcctgtacgctgaacgactcgtatattctgcggacgtgatttgtagattgcggctcgctcttgcatgccctgtatgtctcgtctatcagtcgcatccagtactcctgtccatgtccgcttccatcgcctgtagttgttgggttggggcagagtctcatctcttctataagtgcaatggcagcgcggaaggcacagagttcctccagccgcgacatatctatgccatagtagtcgggatagcggatctgtggcgcacttgataccatgactattttccttgggtgcagacggtctaatatcttgaagatgctctctctgagagttgtgccgcggacaatcgagtcgtcgattattacaagattgtcctcataggggcgtagcgaaccgtaactgatgtcgtagacatgggcggcaagatcgttgcgctcagaattgtcggtgataaatgtgcgcagtttgatgtctttccacacaactttttctgtacgcacgtcgccatacagtttacgaaatccgtcggtcatgccatagaacgcgacctcggcagtgttgggaatgtaggaaaagactgtgtttctgacacctccgtcaatggcttgcagtatggctggggtaagttgctcgccaagccgcttgcgctcctggtagatgtcgcggtcggaaccacggctgaagtaaatgcgctcgaaagaacaggcgctcaactgagcggcaggcatgatctgctctaatctgacgttgccgtttttgctcacaataagggcttcgcccgatttcaattcattgatttcctcacatgacagatcgaatgttgtctgcagcactgcacgctcgctggccagggctacaatctcgtcgtccttgtagtagaatgcagggcgaataccccaagggtcgcgcatggcaaacatctcgccgctgcccgtcagtccgcacattacgtagccgccgtcataatgtttcatagtgcttttaagcacattgcccatatctatgtggtcgtcaatatactgagtgatgtctgtattctgaagttctttagtcttggcttcctgaaaaagcctctctacttcgcggtccagcctgtggcccatgagttccaaggtgatatacgagtcgctgtaaatgcgcggcgattgtccttgcgacgtcagaagttggaaaacgtcgtcgatgttggtcatattgaagttgccgcaaaggcagagattcttggcgcgccagttgttgcggcgtagaaaaggatggacatactgcagtccgttcttgccagtagtggaatagcgcagatggcccatgtatagttcgccagccatctcctgagtgacccgtgtgaagacttcggtaatggcatccttgccctcagccctttcgcgaaacatgtattctgtgccaggctccttgttcaggcaaacggtggctatgcctgcaccctcctgtccgcgattgtgctgcttctccatcatcagatatagtttgttgaagccgtatgaagcggtgccatactttgtttcatagtacgacagaggcttcagcaatcgtatcatcgccacaccacattcgtgtttgagttgttccatcttcttgcgatattccgttataacgttattgcgatatgatacattctttaacgaaactcataaacagcggatgaggatgaagcacggtagaagaatattccggatgaaactgtgtgccgatataccatcgctttcctggtatttcaacaatttcaacaagattggtgtcggggtttataccgacacatttcataccagcccgttcgtattctgccatatactggttgttgaactcgtagcggtggcggtgccgttctttgataatttccttctcaccatatgcttcgtatgtcttgctgcctttggcaagttggcactcgtaagcaccgagccgcattgtaccgcccatctgtgtgatgtttttctgctcttccatcaggtcgataacaaaattctgctgtatgaggcgttggctatctgtattttctgctgacttttccagaccactatggaattctgcgctgtcggcatccttgtagcccaacacgtggcgtgcaaattctatgaccatcatctgcatgcccaagcaaatgccaaaggtgggaatgtcgtggttacgtgtaaattcggcagcaacaatcttgccgtctatgcctcgctgtccaaacccagggcatattatgatgccagccatgccgttgagtttatcagcaacattgtcacaagtcacgtcctcgctgttgatgaaatgcaactttgccattacgttgttataaatggcggcaaggttcaaactctcacgtatactcttgtaggcatcctgcaagtcgtacttgccaacgagaccgatatgtacttcgccggtggcttggcgttgcttctcaagaaaatcgtgccagggcttcatggcaggtgtctcgccaacaggtattcctatcttgcgaagaattgctgcgtcaagtccttgtcgttgcatattcaccggcacctcatagatgcttggcatgtcctcgctctgtaccacacattctaaatcaacattgcagaaagaggcaaccttcatgcggagaccgtcgtcaagatgacgctccgtgcgcaacacaaggatgtcaggttgtatacccattgat

SEQ ID NO: 4228 - DNA, 14081 bp, synthetic construct
  variation 10075..10133: note = note, n is a, c, g, or t
  source 1..14081: mol_type = other DNA
  misc_feature 1..14081: note = Synthetic
  variation 5875..5968: note = note, n is a, c, g, or t
cacctgccttcaggtccatgggacccacaggtattaggtcactataactacagtgcctacgaccgtatggacgacgagatattccgttttgatccagctaactcagcgacacacaactcttgggactctccaggtatagtgtgggacggttactatggttcagtagctgctgccaacgctgcactggatgcactggacaagatgcgcactccagatggcaagttgacaaagcaccaggagaacctgcgtgccgaagctctgctgatacgtgcatatagccatttcattctcgtcaacatcttctctcctgcttacaaggacgaagagacaagtgctaccgaggtgggtattccttacgttacagagcctgagacaacactccgtaagaactacgaccgttctaacgtaaagaacgtctatgacaacatacagaaggaccttgaagaggcgctgacaaaggttacagacgcatactacaagaagcctaagtaccacttcaacactcaagctgctcacgccttcgcagcacgcttctatctctacaagcgcaactacgagaaggttatagagcacgccaacgctgtgcttggtaccgactctgcttctgttggtaacatgatgatgaactacgcagtattcacagactgtgctactgctgacgactacgctaacgcttggcatagccctgaccgcaacaacaaccttctgttgctgacgacatactctgtttacgagcgtcgttgcttcggctaccgctactcgctggcaagtaccgtagcacgtgatgtgctcatgattcacaaatctccactgtggagcggctactatctgtcgcctatcggtatcgtcggtggtttcgcatggtcaagctcaagcgctgactacggtttcttcaccacaaaggtgggtgagcacttccaatactctaacaaactggctggtatcggctcgcctcataacatagtacgcgccttcacatctaacgaacttctgttggagcgtgctgaggctaacataatgttaggcaacatagaggctgctaaacgcgacctccgctggtactggaactgttctatcgacaacttctcagctgccgacagacaggcttactttgacacaggacacattaagtacctcaccgacgacatattctataggtactatatgccaggagagaacaaccctaactgtttcgacgactggaacttcacacagcagaacataagcagcagcttcatcgttcctcaggaccgcgtgcagttcatgaactgtctcaacgacttccgtcgcttcgagacatgtaacgaaggtcttcgtttattcgacctcaagcgttggggtatagaatgggctcacgtcattggtaacgaaagtgtaccttatattatgacaggcaaagacgtacgtagagcaattgaagcgccttgggagactctctctgcaggtatcgctacatcacgtcctacaactacagcaaacgttggaggtcctgttcctactaacgacactcgtaagtttagaatacaagaaaaataagaataggaggacataaagaatgaaagcaaaacttagcatattaataattgcggcagtagcaatggtcagcttcacgctgggctcttgctctgacgacaatctgggtgcgtcaatcttcgacacggtggaccacccattagacaagtccctgtacacgttcccgctggataccttcgtaaaggtgaacttccaagagccgtacaacgtacgttatatgtacaagatgcaggatatgagtctcagctcatcagacctgcagaagaacctcactccttgctcttacgacaagagtgttgaccttgctacgctggcaaaatacctttggttcgacatctacaaggaacttgccaaccagcacgagatattcctcaagaaatacagtccacgtattattcacatcataggctctaagtcgctcaacgtctctcagggtactgagacgttaggtgttgccgagggcggtctgaagatttcgctctacaacgccaacaacctcagcgttgacgacatagacatgatgaacgaatacttcttcaagactatgcaccacgagttcggacacatcctcgaccagaccatctcacgtcccttattattcaacttgctttctaacggacagtacgatgcttctggttggacaaacactcctgactctgttgctgcaggtcgtggtttcgtttcaccatacgcttcaagtatggcacgtgaggactgggtagaggtacttgctaactacgttactcgtgacactctttcatggaatgtcttgctgggctcagcagagtatgagtgggaggaaatcgacatagagagcgagtctgcatataaaaagttgattactccgggatgtaacctcgacaccataggttactacaaggccgacaagagtggtaacggcgataataaggtttaccgtcgtgtatgtgtacgcaacgctgcaggcaacgttgagaaagacgagaacggcaacccaatatgggtgcataagtctggtatcgacggacgttcgcttatcctcacaaaacttgacatggttcgtgcttggctgagcaacaactacggcataagcatcgacgctatgcgtaagatggttcagcagcgtacttacctcaccgacagcaagggcgactttgtcatcaagaacggcaagcttgtgaaccgcttctcttacaacaactacgagttaatgaacagcctgcgcaatcaggttgagaaatataaggaattacaaccaaagaactaaaaatactgagatatgaagaaaatattttccacgatactgattctatcaactgttctcagtatcacaagttgtaaatacgaagaagacgacatctggaaccagtcggctgcagagcgtatagagaccatctcaaagaattatgcagagacactcatgaactcaaagggtggttgggctatgcagtactaccctactaactctaatagttaccccagtggcaacggctacctgttaatggcaaagttcaccgataaaggtactgtaacaatgggtatgaagaacgtgttcagttcaaacgcataccgtgaggatgtttctacatgggacatcaacaaggaccagggtcccgtgttgtcattcagttcatacaacacatgtatccacgtcttcgcagacccctacgacctgccgtttacaggcacaaaggatgatgaggttaacgaagaaggcaagggagcacagggcgactatgagttctctatgattgaagttcccactgacggcaaccacgttcttctgatgggtaagaagcgtaactcatacacctatcttacacctgttccagaaggtacggacttcaaaacatatattgaagactgtcagaaggtaacggcagatttcttcccaacaacaaacccactggagtatcagattctgttgccagactcaacaatagatacataccagttctcttcaggactgacaacactctaccccgctggtacagaccgtgtaatgacaggtgttgtaaattcatacctcataaccaactatgacggtaagtactacctgcgtttccgcgacgcactgaaactgaaggacggctcgaaaataaacaatttcgtttacaacaaagaagaggacgtattcaagggtgttgagaacgagaactgcaagattgtaggtccggatatggctacctttattgaaagcaagttcgacgacggtaggtcatgggctatgatgaacaatactgacatgtctgaaaaatatttggctatctacacagcactggttgttaattttaagaacatcttgaaagcagacatcaagggaataacgttacgtaagaccaacggaaagctctctttggcaatcaactatggtgcaggcatacgtccacagtcggtgatctttaacattgacagttacactttggaaaatggaaaattctctattggcaacgtaactacagatacggataacggaaagaagattcttgagacaaaggctatgcaagctttggtcaattctctcaagcagccaaacaccatttctcctgccacaactcaatacaatcctaacgttctgcgtctagataacgacaacgacgctgaactatggcttacaataacactaaaataaatatctatttttaattaaaaacattaaagtatgaaaaagtttacattaatgatgattgctacattcgtagctgtatcaggcatggctataggcactcagaagcatgctgttgttaagaacttcatgaacaagaacatgatgactccttattttgccaagaaggtagatgtaagcggtggtattgcagcttctcagagcaaggctaataccattaaagcaactgcaacaaagtctatccgtacggttaaagatgcagaacccgctgtggatgtaaagtctctgattcttgctaatcagtatatttacgacgagtatcttggcggtatgttgaattattatcctgtaacagaaagtttctatcttgttgatggcacttctatcgctcttgaacttaatggaattatgacaatggaaggtactatcggtgaaggcgtaaacgaatttgctgagtatggtgctgaggtagttacattcaaggctggtgaagtcgttgctacaaacaaagaaacaggcgaggaatttaaactttacaactgtgactgggataaagagaattatgttcctgtacccaacacagatgatatcgtaggttacatcttctatgatgaggctggtaacatccatgagatctttatcccagcaatcattgcagtagttggtgaaacatctggcatatatgctgctggtgctaattacgacgcttgcacagatgctgatgctgctttctataagactatagttactggaacagaaactaacactgagaccgagggtggcgagcctatcgagttagaaaagcgtgctttctattggtctgcaaataacgatggtactgtagatgtactcgttgagggtattagtggatgggacgaagacgcttggtttaagatgactattgctgctgatggtttaacagcaaacattaagaatacgcagtttgttggttcatacactttccgtcagccagaaggtcttgagggtagtttctatgcttctgcatttaaggaagatggagataaattctcaaatattacagatggtttgactctcgtcattgcaacatctgacgaaggtgacacatacaccgcgaaagatggagaactgtactgcgctatcggttatttcaacgaagaagaacatagtggatatatctattcatctgtagctaacctgaaaatcgtcgctactaacgagcccgcagaaggtgtaacagctatcaaggaggttaacaatactaagactgttaaaaacgctgctacttacaaccttgcaggtcagaaggtaggcaaggacttcaagggtatcgttatccgcgacggtaagaagttcattgttaagtaatagcaaaacacaaactaaccctatacacaagcgggcgcgtcttttttgacacgcccgttttttttaacttcttgacatcttaattgcttaacatcttaactctttaaccccttaactttaacattttttatttttaggtttaatacaccccccgttttgctcttgacaagcgggcgttgttgttgtaaatttgcagccgagttctttgacttgctgccactataataaaaaaactgctgcacttcctgcaccgccgacaccgatattgtgtaacatcctgtctgtaagagcgtttctgtatcttggattttagaaaagtcctgcacctacgttacacctacacaacacctgataattacgcatcaaggagtaggcggactctcgccacgnnnnnnnnnnnnnnnnnnnnnnnnnnnnnnnnnnnnnnnnnnnnnnnnnnnnnnnnnnnnnnnnnnnnnnnnnnnnnnnnnnnnnnnnnnnnnncgtcggactattaccacggagtatccggacatttagtccggaggctccggacaaaatgtccgaacgaataaagaaaaaaccggacaagtggcttggtgttagtaaggtgctcgttaggtgtaggctattgcggtgtaaaaagaaacgtgatagtgcagaaatacaagtagttataagccgtcaggtgctgaaggtgcaggaagtgcagtatatttttgttgtattgtggtatggtaggacaacggaattcttaaaaagaataactaaccaaagacagaaagggtaagaaaaatgaagattactaaagtacggacaaacgagaaaaattttggtacgccacagagtgtagaacttgacatggtgatggagcaaattaaaagccagaaatttaaagagctggctgacaggctcgcaaatgcctcttacaacgcaacgcttgatgcttgttataacggaagaaagaccggtggtcgtctttctgcagcagacagacttccttatctggtattctcatcgacattcaaaaggaaatccgtcagcgattttctatcccctacgggactgttgctgctgacgatagacagcggcaggaatattgaaaggaggagtgagatattctctgacctcatacaactgccgcagacaatggctgcattcataggggcatcgggtgctacgctgaaagtgctggtaagatgtgtaacacctgggggcaccgttccgacgagagccgatgagtatgtgtcttttctcagaaaagctcaggagcaggtagcccaatattatgagataagatgcggctgtagtattgttcgcagagaactgtcgttgacgtgtggatgtcgtatcagcagtgacagcggagcgtattataaccctgcggcacagtcaatgacaatcattgacagcgaaacgggaacgctggaaaattaccgtggaacagccgtaaatgaggatggcacgtttgacaaaagttctgtgtggcaacggcgcgaacgcgaacgtgaggatttttatacctgtatgagggtggctattgaaaaaacttacggtaagggaataataagcaacaccggaaatgacggggaggagatgctcggaacactggcgctgctctgccgacagtccggacttgctgaggagaccgcggtacagaaaaccctatggcatcctgcggttaacgtaggagcagacagcgtaagaaaaatcttcaggacaatctacggaaaggtttctaaggggaaaccgcaggcatgtatgaacgagaaagaacgtatagcccgcagggtacgcgaattctttgaacggcgctacgaggtaaggtacaatgtgctgaaacgtaccgaagaagtgagggagcgcgacggacgttatttgcaatggcgtcaacttagcgaacgcgaactgcggaagatagcctttgaacagatgctcgatgtgagtgtggcgtggtcgatagacgttgaactatatgtgcgttcaacgcttattaaagactacaatccgatacatgagtttcttgcaggatgtggaaagtggcgcaagagccacgactatatacgggaattcgcacgacgtgtacccactaaatacgaaggatgggaagagatgttccactgctggttcctggctatggtggcacaatggctaaactgtgacacgacgttcggcaactcacttgtcccgatgataataggtcgtcagggcacgcataaatcaacattctgcaaaactattcttccgccggtgctgcgggaatactatattgacgacgtaaagatggacaatgccgaacaagtggaacgggtgctgggaagaatggcattggtaaacattgacgaatataatgcaaaaaccgaccgtgagcaagcaaagataaaacgactgctcacggaaaaggaggtgcaggtaagacgtatgcgtagcgaccagtatgttatgactccgcgtatggcatcgttcatagctacgacaaatgagactcaaccactgaatgaccccaccggttcaaggcggtatatctgttgtgaactgtcaggagttatagacactgcaacgcccgtcaactaccaacagctatatgctcaggctatagacgaactgcagaacggagcgaaatactatcttactaaggacgaagagaaaaagctggaggaacataacaaagcatatcagcgcatagaaactgcggaaatgttactgacatactacttccagccggcagagcgtaacaagaagaatttcgtaaaggctacagacgtgatggacgaactgcgacaacacgttaagagcaccgacatgccgacgctaaagtcgcttaccacggcacttaaacaggcagggttcgcacatggcgccatagagggagtcagaggatggtatgcaaagaaagtttaacctaaaagtaggagaaaaaattatgattacagaagaattgctaaaagaaaaagctcagaactatataatatgttatagtgagcagtgtgagaaaagagaacattgtctgcgaaacatcctgaagcggtatgtcaacgagaaaacgaggattgtacaaagtgtaaatctcggaaaccatgacgttattgccggaatgtgtcctatgtttaagagcgacgagaaggtaaggttccctgtaggactgacccggctctatgatgacattccaatggaaaaagcacaacaggtaaagaggagtctcatagaacagcttggacgttccaactactatagatacaggaacggcgaactgagactcaagaagaagataacagacataatagagtcaacaatgctgagatacggctggaacgagccacctcggtatgacggatacgccgatgactatctgtggtaaccaaaaactcccaccgagtaggcgggagtataggttttacccttcggtcattatgaccttattgtgataagatataggaaatcttacgagtgcaaaagtagggctttttcttggaacaacaaaaaaaatgtagtacttttacaaccgaaaagcaaaaaaatctgatattatggaaagaattcttggtattgacacaggtacaaatagtcttggttgggcgataattgaaaaggacggtgacacgcgtcgcctgctatataaaggaacgaatatcttctcagaaggagtaaagatagagaaaggaatagaatcatcaaaagctgccgatagaactgaccatcgctcggttaggaagcactactggagaagaaaagtcagaaaggtgcgccttttgacaatactgtcagagaacaggttgtgtcctcccttagataaggaagaactgcgccagtggaagttaaagaggatatacccaaagagcgacgaatttatggattggcaacgaacagaagacaaggacgacataaatccgtatcgttaccgctatctgtgtcttacggagaagttagaccttacagacatcaggcagcggtatattcttgggcgtgctctttatcatcttaaccaacgaagaggttttctaagcaacagaaaggaaacgacaaaagagtcggacggtaaggtaataactggtatcggtgacctgaccaaagaaatagagaaaagcggttgtaagtatttgggcgaatatttctacaagctataccagcggggcgaaaagattcgtagccattatacttcacgcaaggagcattacttaaacgagtttcgtgcaatttgcgaaaaacaggatttagacaaggaacttgcaaagaagttagaaaaggctatattctaccagcgtcccttaaaatcgcaaaagggtactatcggtaaatgtacatttgagaagggcaaatcacgctgccctgtttctcatccgctgtatgaggaattcagaatgtatcagtttatcaacaatatcaagataaagactcctggcgatgttgaacttcgtgaattgacttttgaggagaaagaaatcataagacctcttttcaacaaaaagagttctttcgatttcaaagttatagcgaaagcccttgccggcgggcgaaacaactattgcttctacaaagatgcagaggacaaaccgtataagtttaattttcctatggacacctctgtgtcgccaactcccgtctgtggcgggnnnnnnnnnnnnnnnnnnnnnnnnnnnnnnnnnnnnnnnnnnnnnnnnnnnnnnnnnnngcgccaactggaaggattcactttgtgaagtttatacgctttcggaaggaaagacacagatgcaagtaataaacgatgtttggcatgccctgttctcctttgatgatgaagacaaactgaaagagtttgcagaaaatcgtctgcaacttaacgaggaacaagcagaggagttttctaaaattcctattgcgaacgaatatgcctcgttaagtttgaaggctatccgtaagatactcccatacatgaaagactacggaatgaaatacacacatgcggtattctttggaaacctaaaggaagtgctgccgagtcatatttggggcattaaggaaacccgcgaggctgctataggaaatatcattggtgctattcaggaagtggcagaaacttcagacagtcagacaatagagaaatgccttaaggattatttgaaagaacgttaccaggtgagcgatgaaaaactaaagaaactttaccacccctcaatgatagagctataccccaaggttcgcccaaacagcgacggaatatatcagttaggtagtccgcgtatcagtagcgttaagaacccaatggctatgcactctttgttcagaatgcgcaaggtgataaacctgttgcttaaaaaaggttacatagatgaagagaccaaagtccacatagagttctcgcgtgaccttaacgacgccaacatgagaaaagctattcagcagttgaataaagaaaacgaggatgacagaaagaaatgtagagacaagataaaggaactctacaaggagcaatgcggtaaggagatagaaccgacggatagggacatcctgaaatatcagttatgggaagaacagaaccacacatgtatatatacaggcgacgggataagcatctgtgattttctgggtgacgaaccgaaatatgatatcgaacatactattccgagaagtgtcggtggcgatacaacgaaagaaaaccttactctgtgtagcagtaagttcaatagagagactaagaagacaaaactaccttcggaactacataatcacgaagaaatactacaacgcatagcaaagtggaaagaagaatacgaaactttggaagagaaaatacgttcaaggaggaaaagacatccggcggagaaaggacaaagagataagaatatacaggaaagacactatcttgaactgaagtgtaaatactggaagcgtaagtatgaacgctttactatgacagaagtgccggaaggtttctcacgtcgtcagggaacagacatcagtgtaatctcacgttatgcccgcatgtacctccagtccgtctttaagagagtatatatcgtgaaaggtatagctacttccgacttccgtaagttgtggggcttacaggatgtatatgaaaagaagtcgcgcgtcaatcatgttcatcattgtattgacgctataactatagcctgcattgacaaaggtgaatatgacaaattagcgaagtactaccacgacgaggaaaatcacgaatggtacggacacgacaagccagacttcaagaaaccttgggacacttttgtagcagatataaagaatgtagagaacgaacttcttatagcccattattcgaaagataatatgtcgaaagaggcaaagaggaacataagggggcgtgacggacgaattctgaagaacgaacgcggcgagaagttgcagatgcgcggcgatgtggcacatacgtcactgcataacgacacctactacggagcaataatggttgacgatacagtgaagtatgttataagaaagaatctcgacagtttggaagagaaggatgttaaaaacattgttgataaagaagttcgttcaaaagtagagaatgctatattgcttcacggctcattgaagaaagctgttgaagctacaatatggatgaatgaagagaaacaaattccaataaagaaggtgcgcatatttgccggctctgtaacccgtcctttaaatatccgtcaacagcgcgacttgtcaaggcacgaatataagcatcagtatcatgtaatgaacgaccgaaactacatgatggctatatatgctggcgtaaataataaaggaaaagaaaagcgagattttgagcttgtaagtaatcttatagccgctgactactataagaagagtaatgacaagacgccaactggtggaaatcttattcctcagaacaagaatggtcttgaactttgctaccaattgaagatagggacaatggtgctcttatacgaaaactcaccagaagaagtttgggacttagacaagagtaaccttcaaaagcggttgtataaggtttccggattgtcatcaatggttattcaaggaaagtatgattatgggacaatagaattaactcatcatcaagatgcacgaccaagtactgatgtcaaaaagaaaaatggagaatttaaggcagatgaggaatttagagcaggcatcaagatgttgcattctcaattcaaagcccttgttcagggagtagatttcgacattaatgatttaggtgagataacaagattaatatgataaaacaaacattgatgttcaagtcacctgtgtcgttgagcctaaaagacaaacaaattgtcataaacatgaaggacaccgaccagacagtcacacgaccaatagaggatatcgggttcgtcgtgatagaaaatccaatggtgaaactaaccatccctctgcttaatgcacttgttgacaataatgtgtcggtagtgttttgtgacgaaaaactgatgccaaagtcaatgctgatgaatcttaacggtaattccaccatgcaggagagctaccgctatcagtatgaggctacagctccacaaaagaaacaactttggaaacagttgatagaaagtaaaatccgtaatcaagcttcgttgcttaataaacttggtcttcaaggagatattctgaagccatactatatgaacgtgaaatcaggcgactctgataatcgcgaaggctccgcttcgcgattatattggggcagactattcggagaggacttccgacgtgaacgtgaaggaattccgcccaataatctacttaattatggatataccattctccgtgcagctgtcgcaagagctctgatagggtcgggactttatcctgcgtttggaatattccataggaatagatataatgcctttcccttagctgacgatgttatggagccatatcgtccttatgttgacgagttggtatataggatttatatggatggtgcgaacagtgagcttaacaataagacaaagggtgaactgctcagagttctttttgctgacgtcgttatgggcaaacaaacacgacctcttgaagtagcgttgtcgtttacgtctgcctctctcttaaaagtatataaaggtgaagtaagcaaacttacattaccagaactgcaatgagtgaaatacggctgaattcatatcacatcatgtggttatttgtgttctttgacttaccggtaataacgaaaaaagagcggaaaatggctgctctcttcagaaaaaatctaatgaaggatggcttcgttatgcttcaatattctgtttatatacgtcattgtgcctcgtatgagagccaacaggtgcacataaaacgtattaaatcatttgttccagaaacaggaatggtgagtgttttgagtgtgacggacaaacagtatggaggtattgttaacttttggggtaaacaaaaatcaaaaattactccttcaaatcctcttcaattagaatttttttagtaatttcgcagcataaaaccatatcaacagaccacttcttaagcaaaattattagtctaattgcttgatatatagcacataattacacttaggttgtggtttgatataggaaagagataagatacaacactgcgcccaaattgtttacgattccctttgttgtggtttgatataggaaag

SEQ ID NO: 4229 - DNA, 14051 bp, synthetic construct
  source 1..14051: mol_type = other DNA
  misc_feature 1..14051: note = Synthetic
gatgcagcgtagtctcgtgggctcggagatgtgtataagagacaggatatatatatatgagcagtttattgttgacaactcttgatacgggtaacacagcgtggatgatcatggcaaccatcttggtgctcttgatgtcaatcccaggtattgcacttttttacggtggtttggtgcgtcagaagaatatcctcagcatcctgatgcagacggtattcatcgtggcagtagtcagtttgatatgggtggccttcggatattcctgggctttctctacagaatatgcggatagcggcaactctttggcttgcattatcggaggtttcgataagtgcttcctccacggcattggtttggatgccatcatgccaacgggtattccagagctcactttcgtgatgttccagtgcatgtttgccctcatcactccagccctgattctcggtgcctttgccgagcgtgtcaagttcagcggttatgtacttttcaccgttctttgggttatcatcgcctatctccctatggctcactgggtatggggcggcggtttcctgcaggagatgggagccatcgactttgcgggtggtaccgtggtacatatcaatgccggtgtagctgctttggtcatggcactctgtgtcggcaagcgtgatgattatcgtgcgggtcatcctatcactcctcacaacatcacttttgtgtttatgggtatgtcattcctctggctgggatggttcggcttcaatgccggtagcggcttggcagctgatggtctggcagccaatgccttcctggtaacccatatcgccacagctgcagcagccaccacctggatgctcatcgactggatagtcaacaagaagccaaccacggtgggtgcttgtaccggtgccgtagccggtttggtagccatcactcctgcggccggtagtacggatattttaggtgccttctgcatcggtatcatttccaccatcgtctgcttcttcatggtagccgtagtgaaggagaagttcaagtatgatgatgctctcgatgcctttggtgttcatggtatgggtggtattctgggatctatcctcaccggtgtcttcgccactcagtatgtaacaggagccgaaggtgtacagggtgccctttatggtgactggcatcagctttggattcaggttgtagccaccgtggtaagcatcatctacagcgtagtagttacctacattatcttcaaggtagtagataagagtgtaggtgtacgtgttgacaagcgagtagaggaggaaggtctcgacatctacgagcatggtgagagtgcttatagcaactaagatagagaatgaatatatgtataacaccttgactgtatgttttgtatggtcaaggtgttttctattataataatgtgtaaacctaattttgcctaaattcttcttgttgttttatcatttgcctgcttttttgtgttaaatcttataaacacttagttacagaatcaattctttttgttatatttgtcaacaaattaaagagctgacaattatgactaataactcattttcaataagattgcgggaagcgcgcctgatgatgggactcagtatggataaactcgtcgagcgaaccaacggagccatcaccaagcagagcatatcccgttatgagaaaggcatcatgcgccctaagcgtgatgccctgcaagccatagccaaagccctcaatatcagcgaggcatatttcgatggtaccaatatcaagatagatgttccgatgctccgcaccacctccaatggtaagttatccgaagacgagttgcaagccctggaagcaaaactctcgttttgggcggagcagtatcttgccaaggagaaagaagcgggttttcctacccagttcaagaatccgataaaaggcactagggtatcaacgctggaagatgccatccaggcatccagtcttcttcgtgaaaagtggcattgcggtgatggtcccatcgccagcatcctgcgacttttggaaagaaaaggcatcatgatacttgctgcaactctcccggattatgttttcggaatgagtacctgggcagataagaagcatccgctgatgattctcgatttcaatccggaaaagagtagtgtggagaaactacgtttcacggcagctcatgagttagcccatctgcttctcctcttcccggaagacagtccgttgaaactggagaagcgctgtgatctctttgccagtttcttccttcttcccaagttgacgcttattgaagagttggggtccaagaagcgagagttgataacgctggaagagatgatagacatcaaggagctatatggcgcctctctcgccgcttccatcattgccgccagagattacggcatcatcaccaccgagtataaacgggcatggtatgccgagcatatagagcctaatccccgtgaaaaaggtaatggccactatgcatttcctgagacattgggaagggagaagagagtcaattcaatcatcaaaagtatggaggaatagaatatgcagaatgaaagtcaaaatatagaatataaggaatcatggcgtgatgaatatctgaaatggatatgtggtttcgccaatgcgcaaggtggacgtatttatatcggtgtaaacgaccggaaagaagtaatcggtttatctgatgccaaaagattgttggaagatattcctaacaagatagttaattatctgggcatcgtagaagatgtaaaccttcttatggaaggtgataaagagtacatagagattgtagtctcaccaagtaatatgccgatagcctataaaggtacgtatcattatcgtagtggttctaccaagcaagaactcaaagggcttgctttgcagcaattcattatggagaagatggggcattcatgggatgatattcctgtttatggtgcaactcttgatgatattgaccgcaatgcgatagactatttcttgcaatgtagcatcaaagcaggtcgtatggatgaatcagaggtcaattcgtccacagaggatgtattgcgtaatcttggcttgtttaccagggaaggtgaattaaagaatgctgctattttgcttttcggcaagcatgttgggcagttctttccatctgcggtattcaagattggacgttttcatacagatgagagcgatttgattattcaggatgtgatagaaggcaacctgattcaaatggctagtagggtgatggaagtactccgaaccaagtatctgctttcgcctattcactacgagggattgcagcgcatagagcagttggagattcctgataaggcattgcgtgaattgatatacaatgccatttcgcataaagcttataatggtcctgccatccagatgcgcatctacgatcgcagtatagaattgtggaactatggtttgttgccgaaagagttgactccggcagccttattgcagaagcattcttcttatcctcgtaatcacaatattgctaatgttttttacaaagcaggctttgtggagtcatggggacgtggtttcaagaagattgccgaggagtttgaacgtgccagcttgccattgccaacgatagaagaaaatggaggtggcgtgatggcgataattcaacgaaagacggtagatgaagttatcgcagcgcgtgacgggaatgtcggtaatatgtcggtaacaaatgtcggtaatgtgtcggtaaggaaactgtctgatcgtcagcgaaatatcatttctatgattgaggaaaatccttttgtgacagctaaggaaatgtcggtaacaatgtcggtaacgaaacgtaccatagaacgtaatttgtctgtgttgcaaaaagcgagaataataagacatgaaggaagagtgaatgccggtgtttgggtgatactcgaacaaggaaatacgaatttttaatagtgttagatatgaagcagaataataatgaacaaatcgtcttcgatatgttcgaagaggttgcaaccgaaagcatcgctgaggctcggaatgcatacacctatgaagaaattgatgggtgctatcacgaggcgaaggaggtagctgataaagcaaggaagaacttgcaggagaaaatgggaggtatataaaaaaataaatcccaccgaagcgggactataggttttacccttcggcagcatttgccgccttattgtgataagatgtaggaaatcttattttctgctgcaaatataatacaaaatatttgtttatccaataaaaaggttgtaattttacagaaaattaataattaagtatataaaattatacaatatgactaaaatacttggaattgatactggaaccaatagtcttggatgggctattgtgaaaaaacaggcagatgaatatcatttgcttgataaaggtgttaacatcttccaggaaggtgttaagatagaaaagggcatagagtcttctaaagctgctgagcgtacagctcataaagcagcaagagtaagaaactatcgtattaaattacgtaagatacgtttgcttcgtattttaagtgatgcacatttgtgtccaccactttctaaggcagaactttctgcatggagactcaagaaggagtatcctaagaatgaattgtttatgcaatggcaaagtactgatgatgaatcagaaaagacatcatacgcttataggcataagtgtcttcataattgtttggatttcagcagcgtaactgatagatatattctgggtcgtgctttttatcacatgattcagcgacgtggctttttaagtaatcgtaaagatcagagtgctgatgatacaggaaaggtaaaagaaagcatcagtaaccttactcaagagatgcatgatgctggttatgagtatcttggtgattatttttattctctctataataaaggagagaaaattcgtaatcattatactgcgcgtaatgagcattatctggcagagtttaaggctatttgtgagaagcaggatttagataaaaatcttggttctgaggtagtacgccaaatagaaaaagccatattctaccagcgaccattaaagtcgcaaaagggacaagtgggtaaatgcgtatatgagaagaacaagactagatgtccttcttcacatcctatgtatgaagagtttagaatgctctcttttatcaacaacataaagattcaaacgccaaatgatgatgcattacgctctttgtctgccgaggagcgagaacttatcatgcctttgttcttccgcaagtcgattataaaaaagaaactgtttgattttgaggatattgcaaagaaactagctcataggggacagtatgggttttataagaaaagcactgatgtcgaaatgccatatcttttcaattaccctatggatacatctgtttctggttgtcctgtaactgctgctctgaaagatatatttggagagaattggatcgatgctctttgcgaaacctatacgctagccgagggtaaaagtcgtttgaatgtagtcaatgatatttggcatgtattgttcttctatacagatgatacaaaacttgcagagtttgctaagaatcgtctgcaattgaataatgaagaagcaaggaaattttgcgagatttctttgccgggtgattatgcgtctttaagtttgaaggctatctgtaagattcttccttatcttagaagaggtttgatttattctcatgccgtattcttgggtaacttatgtgaagtgatgccgcaatatgaatgggatatagaagaaatgcgtaatgctgctattgagcatattatccacgaaatgaatcagattgattctaaagatgcacgtactttcgaggtttgtattaaggagtatctgaaggagcagtatcatgtatctgaagagaaacttaagaagttataccatccttctaagatggataaatatccaagagtattgcgtactaatgatcatggtgtttatcagcttggctcacctcgaattgatagtgtgcgtaatccaatggctatgcgttccatattcagattgcgtaaattggtaaaccgattgttggaagagggaaagatagatccggatacagaggttcatattgagtttgctcgtgagttgaatgatgcgaataaacgtcatgctatagcggaatttgcaaaaataaatcaggaaaaaaatgatgaggctcgcaagaatattatagacataatgggggaagactatgatgttaaagatgatgatataaaaaagtatattctttgggaagagcaggggcatatctgcttatatacaggtaggcagattgctatttccgactttgttggaaatagtcaaaaatttgatatagagcatactattcctcgtagtgttggtggtgatagtagaagaatgaatttgacgctctgtgatagtcgcttcaatagagaaatcaagaaaaccaagttgccgacagaattgtctaaccatgatgaaattatggcacgtattaatgattggagagaaaaatatgagtctcttgatggacaaatacgtaaattgaggggaaaatcaaagggggcaacaaccaaaaagcaaaaggatgacataatttataagcgtcatcttttggaattgcaacgcgattattggcgaggtaagtatttacgctttacgatggaaagtgtaccagaaggatttagtcagcgtcaaggtactgatatcggtgtgatttctaagtatgtacgtctttacttgaaatcccttttcaagcatgtctataccgttaacggtattgctacttctaattttagaaagatttggggtgttcaagatgtatatggtaagaaagagcgtgtaaatcatgttcatcattgtattgatgctatcgttgttgcatgtatcagccgagccgaatatgataagttaggggcatactatcataatgaagaaaatcataaatggtatggtatgtcaaaggcttattttaaaaagccatggcctacatttgttgaggatttaaagaatgtgcaagatgaaattttggtttatcattatactccagacaatatgcctaagcaaggacgtcgtaaaatacttcttgatgtagaagttgatgggatcaaaaagaaaaagaaggtcctttgtaagggtgatgcagcaagaggttcattgcataacgatacctattatggtgctatagagaacgacggcgtagtaagatatgttaagcgtataaatttggcatcaatgaaggaaaatgatgtcaaaaatatcgtggatgatactgtaagaggtataattgaaacagctattaaagagaagggcttcaaaaaagcgatgtctagtacaatatggatgaatgaagagaaacaaataccaattaaaaaggtaagatgttatactccttctgttactaagcctttgaatattcgccagcagcgagatgtttcatcaaaagaatacaagcaacaatatcatgtcaccaatgatagtaactatttgcttgctttgtacattgataaggataaaaaaggtaaggaaaaacgtgagtttgaaatagtcaatatgttgcaagctgcgcaatactttagagcaagtaatgataaagtagtagtagaaggaagaattgagccaataaagagtgaacatgattatccgtttgcgtattctttgaagattggtacattggtactcctttacgaaaaatcccctaatgaagtttgggatgcgtcgttagaggaacgaggacgtagaatgtataaaataacaggattttcttctacgactataaatggttgttcatatgctaggataaatatgagaaatcatgaagaagctagattgagtaaagaagttaaggcaaaaaatggtgcatttaagcaaggagaagaacttcgtccagctattgttatgctccatactcaatttaatgctttagttcaaggctatgatttcgagattaatgaattaggtgaaattaaaagattaaaatgaaatgattaagcagacattgttcttttcaacaccagtttgtctttcactcaagaattgccagattgtaatctcttggaaagatagtgccgacaagataacacgccctattgaagatatagggtgtgttgtcttggaaaatcaaatgataagcattactttgccgcttctcaacgagttggtaaagaataatgttgctgttatcttatgtgataacaagatgatgccaacatctatgttgcaaagcttagatgctaatactacgcaagctgaaagtttaaaatttcagcttgctgttagtgagccaatgaaaaagcaagcctggaaacagattattgagtcaaaaattgaaaatcaagccgcagtcttggctcttgttggcaagaataaagatattctcaaaccttattataataatgttaagagtggcgattcagacaatagggagggagtagcggcaaaggtgtattggaatagtcttttcggtaactcctttaaaagagaaagggaaggatgttcgcctaatgctcttttaaattatggctatgctatattacgtgcagctgttgctcgtgctttgctaggttctggtttgctccctaatttgggcatctttcataaaagcagatataatgcttttcctttagctgatgatgtaatggaaccatatcggccatttgttgacgaaatcgtttatcggctttatggaaatggaatgacagaactgaataaagaatcaaagtctgagataatgcgtgtgttgaatagtgatgttaacataggaaaggttaagcgacctttgcagattgcattgaccatcacaacagcctctcttgtgaaatattattctggagaaatcaagaaactttccttacctattatgacatgacagaagatagactaaatgcgtatcatataatgtggttatttgtatttttcgatttgcctgttacaacgaaaaaagagatgaaggcagcttccctcttccgcaaaaacttggagaaagatggtttctccatgatgcaattttcggtctatatccgtcattgtgcatcaagggaaagtttggaagtgcatattaaaagggttaaatctttgcttccggagacaggaaaagtaagtttgttaagtgtaactgatagacaatatggagatatctataacttctggggtagaccaaaaagtattaataagagtaaaatatcgaaaaaagttatcagtgagcctattcaattggagtttttttagtacttttgcattggaatatatatcctactcaccatttcttattagaaaaagtgaatgttatgcgctggaaatcagagtattcaaatctataggttgtggtttgatgtaggagtcaaaagatatacaacttctgaacgcttacctttagtagggtctagttgtggtttgatgtaggagtcaaaagatatacaaccaattgccgccggcatagttgtagaaaacgttgtggtttgatgtaggagtcaaaagatatacaaccggatggcggatatatagataatgatgaggttgtggtttgatgtaggagtcaaaagatatacaacgcagaagattactatgcctttgtattcaagttgtggtttgatgtaggagtcaaaagatatacaactcaggcaaactatatgtgctacatacatagttgtggtttgatgtaggagtcaaaagatatacaacctggatgccaaatcccacgcagaaccttgggttgtggtttgatgtaggagtcaaaagatatacaacgaagcacaagaggatcccgaagcataaaagttgtggtttgatgtaggagtcaaaagatatacaacctagaataaaaacgataaaacagaaaagagttgtggtttgatgtaggagtcaaaagatatacaacaggaataaacaaagatattctgcatgactgttgtggtttgatgtaggagtcaaaagatatacaactttgcaccaaaattaagaaataaaattgagttgtggtttgatgtaggagtcaaaagatatacaactttgcaccaaaattaagaaataaaattgagttgtggtttgatgtaggagtcaaaagatatacaactcggcttgctaatatcaaaaccatcggcagttgtagtttgatgtaggagtcaaaagatatacaataaagcaatatcgggtattaggctacccccgttgtggtttgatgtaggaatcaaaagatatgcaacggagctattggcgttaccggtccgaaaggtttggagtttgatgtagagtaaggctataatattttggccggagtggttgttcggaatattccgaacaaccactctgaagcataagagtagagtatgaactactatgtttgagtttaatttgcttgcactaatatcactattgccacactattaggtaacagcttgatatatatctgtataagtgtgacgattaacgtctctttaattgtcacctaatgtcacctgtagaaattattaattctgtctggctattaactgcttggtaaaacagaaataagataatataaaaagtggtctgtcggaaattccgacagaccactcaatagggtgttttatgagaagtttactcctactttatcacctccagaacctggttggctaggcttctcattcccttgatggttgggtgaccgttcttcttgtctatgtcatgaagggcgatgaccggaatctgataggtcttgcagatcttttttactgactcgttgatttcatccttcagctcagaatttagaatgaagtagatatctacatttggatggcgctgacggagatcggaaagcaacttcgccagagcaggacggaaacagtagaggtcggcacgcttccagttgctgtactggtaattgccgatagggacatttgcccaactgtcgttcgttccgtcgcaaatcaggatgatgtccggattgcccaacagggtagtgcggttgatgaatgaacggtcgctgtaatcttcatcgcggtagccggtgttgcagatggtggaaccggaataggaattgatgttgcccatcttgtaaccaccttccttgataacctgccaccaccaggtttgttccacctctgacattcgacttggaaagtagtgaagcaaagactgagtttgaggggaagactggcaagattctcagattgaagcaatcatcagacccacataagcaagagccatacttcacaacactggaacagctattggagccgatagacaataaatgattagaaacaataaatgtaggaatcaaaagatatacaacatagtaatccgggagcttgaagctctttacggctcgttcatgtacatatacagaacttatatacaacaactcatcgcccaccagctgatttctgcttgcacaacaggtgttggacgagtgcatatcagctgttatgcaagcgcacaacagctgttgtgcggctgaagatataggcttctccggcttataacattaattcttccggcaacaagtaaaggttactccgaagactttttacgtaaaaccgatgctacaatgatagtacttacaagcaacagcgatagtacttacacggtgcaaagacgttactgagagatcgccatgatagtactgccgatgcgtaaagcggcttgtatcgtttattgcctcactatggcacaacattgccccttaccagggcaataacctgccattgccaggcacaaaacgatatgtcgggagttttttataaaagcaccactcttctttttactcttcactcttcaccaaatcggctgaaaccccgataaacactgggggtgcgagaggtgaagagttgcgcactactcttcaccactcttcacccctcttcaccttcggattgcgcacggaattgaaatggaagctcgtcctgttcggttggggggctgaaaccacttttttatgtcccacagatatcacagattttccgtaagcggctccgcgtgaagagtggtgaagagtgacgtaaactcttcacacgtgcaagtttttaaactacaggtgtttatgaccttccggtgaagagtgaagagtgtttttgaaagtggcttgctatttttatttcttaatcaccttcagaacctggtcggcaaggcttcgcattcccttgatagttgggtgaccgttcttcttgtctatgtcatgaagagcgatgaccggaacctgataggtcttgcagatcttttttactgactcgttgatctcatccttcagctcagaatttagaatgaagtagatatctacattcggatggcgctgacggagatcggaaagcaacttcgccagggctggacggaaacagtagaggtcggcacgcttccagttgctgtactggtaattgccaataggggcattcgcccaactgtcgttcgttccgccgcaaatcagaatgatgtctggattgcccagcagggtagtgcggttgatgaatgaacggtcgctgtaatcctcatcgcggtagccggtgttgcagatggtggaaccggaataggaattgatgttgcccatcttgtaatcaccttccttgataacctgccaccaccaggtttgctccaccttgttgacatcggttgctttttgaaccgcagtggtgtaccaggtggcatatccctttgggatgaaaccctcgaaagttgaatacgagtcgccgagcacggcaacggtctgcttcacctgtgccagcaggggcatcagggcgaacataaagaggcagacgataactgataatcttttcatgacgttttttatatagtttgatttttaaatgtgatcctcttttgggatagggtttgaaaccagattgcaaagatacgatattatttgtggatatacaaatttcccttaaggaaaaaataaaaacccttaaggaaaaattctcaatcttttctttccccatttttcgggtgtttttgcctgattttctttcttaagaatattgtttacatacggatgagggaagaagattcttttttactaataaatgttatattcccggcattccttcccaaaatcatttgttctctcccgaatttactgtacttttgcagtaagtatctgattaaagattaatagtgtgattcaaaataagatatagattatgcaatacaagaatatcatattcgatttaggtaatgtcttggtgaagctcaatccggaaggatgcatcggggctttcaaggcgataggaatgggggaattagttgattcaaatcctcagagtgaggggatgaagctgatgagcaagctgggtgtgggaatgatcaccaccgaagaattctgtgaagcagcccgtaagttgacagggactgatgtgacgaatgaagagatcatcaatgctgccaacaagatgctggtggagattcctgatgagaaaaaggagcgactccttcagttgaagaaggctggctatcacctcttcctcctgagtaatacctttgatgtgcattgggattattgcgtggagcatctcttcccttatcagaactatggggtagaggattatttcgagcagtgcttcctctctcagagaatgcatctggcaaagcctaatgcccgcatctatgaggaggtaatcaggcaggcgaacatccatcccgacgaaaccctcttcatcgatgacctgaaggaaaactgtgaggctgccgagaagctgggcatccataccttccagaacgtgaagttcgatgattggcttgagcttcgattctgacggatatgtcagaatcgaagcttttattcgttaaataattttgtgttaatttgcattttttctgatgaataatcgcaataactccacactttttctaacgaatatctgtagaactccacactttttctaacgaataatcgacaaattcccacactttttctgacgaataactaaggaaaaggctgatttattcgctttttccaataaaatgttatacctttgccaagtcataataactaacatacaatatcaaaatgaatttttacaagacattaggattgaaaaacagccgtattgacgtggctgatgccttgcgaggattggccgtagcaggtattattctctatcactccg

SEQ ID NO: 4230 - DNA, 13759 bp, synthetic construct
  source 1..13759: mol_type = other DNA
  misc_feature 1..13759: note = Synthetic
ctgtagtacatggacaattagtgaagatatgtcaaaattgcatcacgatatagagaataataaaagatataattctataatagagaagtatcagaaaaactctaatagtgtatgccttgatgaaatacaattccttggagactattatcctaaaaaactaaagaatgatagtaaggtattggatcgtttgtattatggtttttagtacataagtgagccgtgaaatatcatcctctaagattgcaaaagaagtactgcttataccctctatagtaagcagtacttcttttttaatgttaattattggcttaattttttaattcgagatttaatagctccttcatttcgttcaaatattttgcacaattcttctattgtttttcctatagcatgaagttctattaactttttatcttcatcttccgtccattgaacataagcctttgaatgcttcaacctttgttgttctatatacgacatattttctttttcttgttctttcttcttttcccataacacacgcgtccttggcagatcggcataagacgccattagttcttcaaattctttatattgagtatgggtcaaaggtcttatatcatgatttatttcttgttgccatctacgaagagagcattcatattcaccagatgtagcaaatgggagatgcccattctgctcaacaaactgtttaaatttatcaagagcctcctcgaaagatacaccttctaaagaatgtacgggttttccgttcttgtcatattccgttctaacaggaatggttactgtttgataatccgaagaaacaaccacgttatatactgccgatattatttcagcaaaacgctttacaaccatatcacgacattgtacatcttcacttatatatcgagtcatcgggtaacggttttcctgccaaagagtataatatacatccttgcctacattttttatagttgtatgccatttgatacaccccattaattcacttcctatatgatattctgttccattgaatgtaacaaagtcccttactgactttttaactttaggagtagtgaccgaatccttaatttcaatgtctttgttgatatttttatcattccattcttctgtttcgttcgttgagagtcctttatattctctaatagccttaacaaatatagttccaagactttcgagcttatgagtgcctacaccagatatagaaccaaatgcgatatatgttattggttgtacgatagcaagttgatgcaaagttttatcgctaaagataacataaggtggaacacctctttcagatgcatttttcaagcgtagcagacgtagattttcaaaaagagttttatcttctgccatttctgtttgcagttcttcaaaatgtagttgttgacgttctttttgtttccgaccctttaccgtaaaatcttcacgattaataattgccaactgagcctgtttgcgtttatacaaaacatcctcaccttgtgatgtaattttgatatgagaattatctttgtaatcaatttctatataacccaagtgaagcatttgtaagagataatcttgccaatctttaaattgaacatcgcgaccacatccgtatgtcttaatcaaatgataacctttctgataaacctcttgattagaagcaccacgaagaatatctatcagtagtttaaatcctacttgttgttgagtacgcatgattgctgaaagtgccttttgtacaagtattgttccatcaaatctatgaggaggatttttgcaaacatcacagttataacaatcatggtccatagtttcgctgaaataattgagcagaattctgcgtcgacacacttgactctccgcatactcctgcatacgatccaacttttcattattgatatcttgttgcccactttcttctgcaaactttctaagcgtaataagatcacctacttgataaaacagaattgtttcacaaggaagtccgtcacgtcctccacgtcctatttcttgataatagctctctatacttttcggcagattgtaatgaacaacaaagcgaacattactcttgtcaatacccataccaaaagcaaccgttgcacacaccacatctatttcgtcattaataaatgcttcttgcacatcgtctcgctccttagcagaaagtcctgcatgataaaccttggcacgaataccattttcttgaagtttctcagccaccctctctgtagttttcctactcatgcaatatattataccactctcgttatgatgacgagctatcaaagaaaacagaaatcgtaacttatcttttgcagaatagccacgacgtacatctaacgataaatttggacgatcgaaagatgagataaagattttcacttttcctgtttcatctttatctaaacgaagttgctgtatgatatcctctttagtgattttatcagctgttgcagtaaatgcagctacaggaacattaggaaacaattcttttagcctaccaagctgagtatattctggtctaaaatcatgtccccattgagaaatacaatgagcctcatctatagcaaacatactcactttgagagaacctgtaggtgcgattccacatgaattactcaatataccatattgaatctctgataataatttttcaggcgacacatataacaacttatattcacctctgtatgcacgttctgctatatcatgattctcagcttctgaagcattactatttagagctgctgcagctatgccgtttgcacgcaggctctcaacttgatctttcatcaaagatataagaggtgaaactactatagctgtacctggcatcatcaatgctggtatctgataacagatgctctttccaccgcctgtaggcatcaacaccaaacagtctttgttgctaagtatatggcgtattatattctcttgtagcgggcgaaaagagttatatccaaaatatcttttgagtgtagatagcataggttattattttaaggtgtattatgaatatatatattaatgtgacaaatgtacaaagaataattgataattagaagaacgaaatgtattattttgttctgtttttctaatgacattttgtcttgccacatagtactacttcttttttctctatctgccaagttaggatatgatttctatatcttatagataatccatttaactataactccaaacagcaataattatccaaaaagattttgctttttggatttattgttgtagatttgcgctgagataataatattaagaataatcaattgactttagaaatatatggatatgactcataatatcatagaatatgtaaattgctgtgtaggagcatttgcaaatcgttttagtttgacattggcgcagtcatatgcctatttacgcagatttaaaggaattgattttcttattgattgctatgctgcagagcatactctttctatagaggatgctgtagatgatagtttgtattatgagggagctgtatatgtattctcgtatttggaaaacgagatagaaacaggtgttgtctgttgacgactataaaaaaacaaatatggaaagtatatactgtaatttatataaagcattaaaattatatcttttttatattttaatagtgctaatagctacaccacttgccgtgtacgcattttcttttttgataggaaactatcttttaggatggagcatttcatttgattttattttccttaacgacataagtctaatattgggaagcctactcataatattactattcattaaaaaaggatataccaatgtaaacaaatcttgcagtatgacagccatggcgtcttttgacaaagggctgcttttgtggatattaatattggaactatcgtctatactcccgattaatatattagtagccttccttgatttcggtgactttgccacctccacttcagatagtgcgttgagcatagctgcaattgtgggaacatgtctactggcaccgtttgcagaagaattggttatgcgtggtggtgtagaggaatatcttctacgttggaagcaaagcgcaggtcttgcaatagtactatcgtcgttgctttttgggatactgcacctttatccaagtatgatagtcgtagcctttctaaatggtttgttatatggctgggtatactatcggagccgtaatattgtggtatgtttcttaatgcacatgatcaacaatgttgcttcatgtcttgccggctggctaagacctgacgacagcactagtcttgacattctctttcagacacgtatgataatcattacgctgttctgtgtagtatttatggtaaagtcgttggtgaccataaagaataaaactgcccaaggctaaaaaatgggtaaaatcgcaatgtggtttcgcatgtaaaatatatgttatttaacgattctagtatatgaaagaaccatgcagaaagcaccactttatcggaaaagtgtagtttacgccgccctttttcgtaggaaaagtgtagttttatagcagcagatttataggaaaagtgtagttttcgattggcaatttcataagaaaagtgtatatttgcaaaaactgattataaaccatacgataataacgaaaacaagaaaatgataaagagattattgtcattccttgatgcttcgccagtaaacttcctggcagtcaagaatattacagaagagttggagcaaaacggattccgacgtgtagatgctacagaagccttgggagatgtgaaggcaggcgacaaactgttcgtcaccaaaaacgattcttctgtctatgcttttcagataggtaagaaaccattggcagagagcggtttccacatgatttgcgcacattgcgactcaccaacattccgcataaagcccaacgcagaaataggttgcgaaggtggcatcgtgaaactaaataccgaggtgtatggcggtccgataatgtctacatggtttgaccgtccacttacccttgccggaagagttatcgtaaagggcaccgacgtgatgctccctacaaccatgcttctccatatcaagcgtccgctattgcaaatcagcaacttagccatccacttcaatcgtcaggtcaacgatggtgtgcagcttagcaaacagaaggatgtgctaccaatactcggcattatcagcagcgagcttgagcgtggcaatatgctgatgaatatcatcgttgaagagttgaacaaacagcaggaagtggcacgcgaagacatcctcgacttcgacttatatcttgccgacgctaccccagcctgcacctttggtgtgcacgacgagtttatctcttcaggccgattagacgacctttctatgtgctatgcaggcttagaggcgctgatagcatccgaggctaccgacaccacacaggtgctcgccatcttcgacaacgaggagactggttcgcaaaccaagcagggtgcaggcagtccattcctttcttatatgcttaagcgcatagcccttgctcaaagtggcaccgcagaggcttactatcaggctgtagagcgtgcgtttatgatttcggcagacaatgctcatgcttggcatcctaactatcctgagaaatacgaccctactaaccatcctgtattgggtggcggtcctgtcatcaagtttaatgcagctcagaaatatgcgagcgacgctatgtcggcatcggtatttgcaggattgtgccataaggcaggcgtgccatgccaacgtttcgtcaaccatagcgatgtggcaggaggaagcacccttggcaatatccttgcttcatcaattccgctccgtggcgtagacatgggcaatgccatcctggctatgcacagctgtcgcgaaactggtagcacactcgaccatgaatattgcgtaaaagtattcacccagttctatcaggaataaattgaaatgaatataaaatatctatcatatcttatttttcttttgggaatattttcatgtaatattcccaaaagaaaaatttatcaaaatgggtatgaatatgctaaaacagactcattcttaaaaacaacataggggattattgattgcgaccagcctggaagggcttagctgtcccctatatttatcgggtgagccccccaaaaaacataacagacatcgttcatttccttcatttcgtgataggctcagtttttcccataatactaagaaagaactcttctccagaatagccatcaatttcttggacaatcacattgtcaacaataatagattcgagttccagctggattcttcctggagagataggacgcttgtctgcatcaaatacaaattgcgaaagacatttgaaattgaaaagcacaagatgctgttttccgccatagttcaatgtcacaggtactttgctatcgctatatatgatttttcccattttgctcgctccttcagtttcttcgtctgagcttgcaaaagaataaggtatcgaaatatcataatcgggcaatagcttgacagcttctgccaaattaagatctttgatgataaaacttatccagctgattggaacattctgtaatgtgacagtccggttttcgtaccctccaaaagtgtagtggatgacaggttgaccattttctgtgacttcacccttccataaacttttataatccaacttttcttgcgatgcattatatactacaggaatgaatctattgctatattgtcctttaagctcattactcagctcctcaattacactctgacgttggaagtaagaatctacataaataggatccttatggcatccacttaaactaatcatggctgaaacagccacaatggccattgttatctttttcattgcttactttgatttatgtattcttgtttttgaaataattgtgaccttaaacgtgtcatttagcatgcaaaggtaaaacaaggaatttcttatctgctatttctatgatatgtcaatataggcaagtgagcagaggatggggtgatttgaagtcacctcatcccatttagactttcaatttttatcatcatcaaaagataaagaattgaatttatcaaaatcagagctaaataatttgtcttgtatcacacggtacttttcaaactccgactctgcaaaacacttggcaaattcagcagagacctttccagcatcacgcaatacggcatcacctccagcttcaagaataatgtctatacgcttagcccaatcttccattgtcattggtatatgtcgatttgccatacgttcagctaaatcaagtacagagttgacaagtttccccatatcttcaagttccacttgttttagatagtttttggctatactcacatctggcttaacaatctttccatcaggtgcattctcccaagtggtcagtcccatatgctctttctctgcattggctctttctactataagctccgctgcggtatgtccatgtacagcataatgcatcttattctgaacttttttataaaacaagcgggtggtcggtgcatcattattgtagtcaatagctgtagcgtatatatccgtaagtttttggtaaaatcttcgttcactcaacctaatctcacgtatttcagctaacaaatgctcaaaataatcctcaccaatgaaagaaccattctccatgcgttttttgtctatgatatagccacgcaaagagaactggcgaatcacataagtacaccactggcgaaattgagtggcacggatagaattgacacgataaccaacagaaatgattgcgtcaagattataaaacttagttatgtagtttttaccatctgctgcagttgccgagtttttctcggtaactgaatcctcatcaagttctccactcttgaatatatttttcagatgtaatccgatattatctgtcgaacaatcaaaaagctgtgccatagccttttgtgtagcccatactgtttcattcttatataacacttgaacgccttgttcctgaccttctgcgataaaggtaagaaactctgctgtactgtttcgtatttcaaatttctttgtcataattcataataatataagaatccaaggattattttttttgttgcttatttgccatatttcaatgcaaatatgaatgcaaaggtaattattaaacatcacaaatccgcataaatactgtaagaatcgcgattattttagaaacttaaaggatatttcttaccacaaataaagtttactcttcactcgctacactatactcacactcttaccactcaccttcgccacatcccgaatggaatatcccttgcggagcaaacttattacttccccaatattcagctttcatattttcttccgtttttactttactatcctcccatttccgatgatgagacccacttgggacaatttattgatattggtggataataaaaggccaaagtaaagctttcaggctatttgctatttatactctcccacacatgtttgttgagtgagccatgatcttacagaataaaatgagaagttcataaaaaaactcccaccgaagcaggagtataggttttacaccttcggcaattactgccttattgtgataagatgtaggaaatcttatttcttttgcaaatatatattaaataatttgtttgtccaaataatttgttatacttttacaaaaattaataattaaacaatcaaacaactaaattatatgactaaaatacttggaatcgatactggaaccaatagccttggatgggccattgttgaaaaacaggcagatgattattatttgcttgataaaggcgtgaacatttttcaagaaggtgttaaaatagaaaaaggcatagaatcttccaaagctgctgagcgtacagcccatcgtgctgcgagagtaagaaactatcgtattaaacttcgtaagatacgcctacttcgtattttaagtgatgcacatttgtgtccaccgctttctaaaactgaactgtctgcatggaggctcaagaatgagtatcctaaaaatgaattgtttatgcaatggcaaggtactgatgatgtatctgaaaaaactccatatgcttatagacacaagtgccttcatgagagtcttgacctaagcaacattacagatagacatattttgggtcgtgctttttatcatatgattcaaagacgtggctttttaagcaatcgtaaagatcagagtggtgatgaaactggaaaggtaaaagaaagtatcagcaaccttactcaagagatgcacgatgctggatatgagtatcttggtgattatttctatgctctctataataaaggagaaaagatacgaaatcactatactgcacgtaatgagcattacttagctgaatttaaggctatttgcaacaaacaagagttggatagaaatcttggcaatgaagttgtttatcaaatagaaaaagccattttcgaccagcgaccattaaagtctcaaaagggacaggtgggtaaatgtctatttgaaaagaataagactaaatgtccttcttcacaccctatgtatgaagagtttcgaatgctctcttttatcaataatataaagattcgaactcctaaagatgatactttacgccatctcacagaaaaagaacgcgaattaataatgcctttgttttaccgcaagaccaagaagcagtttgattttgaagatatagcaaagaaactcgccccaaagaagcaatatggcttttacaagaaaagtgaggatgcagaaatgccatatctgttcaattatccaatggatacatcagtatccggttgtcctgtaacagctgctttaaaagaaatatttggtgaaaattggattgatgcaatatgtgagacatataccttaggaacaggaaaaagtcgtttagatattgtaaatgacatttggcatgcattatccttctatacggacaataacaaactagcagaatttagcaagaaccgcttgcacctaaacgatgaagaagctaagcaattctgtgagatatctttgtctggcgattatgcatcattaagtttgaaagctatttgcaagatacttccttttcttagaagaggcttaatatattctcatgctatttttctaggaaacttatgtgaagttatgcattcttcttatgaatggagtataaaggaattgcgagaagcagtcgtagacaatgttattaaggaattatataaatatgattctaaagacgaacgtacattagaggtttgtattaaagattatctcaaagaacaatatcatgtatctgacgagaacttaaaaaaactgtatcacccttcaatgatggaaatgtatcctaaggtacgtcatactaatcaacaaggtgtttaccaactggggtccccaagaatcgatagtgttcgcaacccaatggctatgcgttcaatgttcagattacgtaaacttatcaatcgattgttgcaagaaggaaagattgattcagaaacagagatacatatagaatttgctcgagaactaaacgatgcaaacaagagaaatgctattgctgcatacactaaagataataaaaacaagaatgatgaggctcgcaagaaaatacaaaatctctttaagacagaaactggaaaaaatatagagccaacagatgcagatatcttgaaatttgtcctttgggaagaacaaaagcacatatgtttatatacaggtaagcaaatatgtatatcagactttattggagcaaatccaaagtttgatatagaacatactattcctcgtagtgtaggtggtgacagtacaaaaatgaatttgacactctgtgatagtcgtttcaatagagatgtcaagaaaaccaagttgccaacagagttatctaatcatgatgagattatggctcgcattaatgattggaaagaaaagtatgaaactcttgatgctcaaattcgtaagcaaaagaaactgtcaaagggagcaactactaaagaacaaaaggatggcatcatccgcaaacgtcatcttttggaactgcaacgtgattattggcgtggtaaatatttacgcttcacaatggaaagcgttcctgaaggttttagtcgtcgtcaaggtacggatattagtgtaatatctaaatatgcacgtctttacttgaaatctctgtttaagcatgtctatactgtaaaaggtattgcaacttcagattttagaaagatttggggcattcaaaaggcatatagtaaaaaagaacgtgtcaatcatgtccatcattgtattgacgccatagttattgcttgtattggcttagatgaatacaacaagttgggagcctactatcatgatgaagagaatcatgaatggtacggcatgtcaaaggcatatttcaaaaagccatggcctacatttgttgaggatcttgagaaggtgcaggatgaaatcttagtttatcattatactccagataatatgccgaagcaaggacgtcgaagaattgttgttgatgggaaaaagattttatctaaaggcgatgctgcaagaggatcattgcataacgacacattctatggtgctatagaaaatgaaggcatcgtaaaatatgtaaagcgtgtaaatttagaatcaatgaaggagggtgatgtaaaaaatattgttgatgatactgtaagaggtattattgaggcagctattaaagagaagggctttaaagatgctatgacaggtgttatatggatgaatgaagagaaacaaatacctattaaaaaggtaagatgctatactccttctgttactaagcctttaaatattcgccaacaacgtgacatttcggtaaaagaatacaagcaacaatatcatgttgttaatgacggtaactatatgcttgcgctatatattggtaaagataaaaagggaaaagaaaaacgtgactttgaaattgtcaatatgctgcaaactgcgcaatactatagaacaagtaatgacaaagaagccgttggaggaaatattgtacctataaagagtgagcatgattttccgtttgcatattctttaaagataggaacaatggtactactctacgagaaaagtccaaatgaggtttgggatgcttcggttgaggaaaaaaataaacgtctctataaagttgtgggattatctgcaatgaaaatgaaaggacgaaatgttgactatgcaacaataaagctgaaacatcatgaggatgctcgtctaagtaaagaaataaaagcgaagaatggcgcatttaaacagggagaagaaatccgtcctgcaattattatgcttcatactcagtttaatgctttagttcaaggctacgacttcgaaattaatgaattaggtgagattaaaagattaagatgaaatgataaagcaaacattattcttttcaactcctgtgtatctttcactcaagaattgccaaatagtaatctcttggaaagatagtgacgacaaggtaacacgccctattgaagatatcgggtgtgtagtattggaaaatcaaatgataaacattactttacctcttctcaacgagttggtaaagaataatgttgctgtcatcatatgcgataacaagatgatgccaacgtctatgttgcaaaacttagatgctaatacgacacaatctgagactcttaagtttcaacttgctgttagtgaaccaatgaaaaagcaagcgtggaaacaaataatagaatcaaagattaagaatcaatcagcaattttgaataagtttgaaaaaaaaggagagattcttaaacctttttattcaaacgtaaaaagtggagatgcggacaatagagaaggtattgctgccaaaatgtattggacacaacttttcggtaaggatttcaagcgtgatagagatggatgttttcctaatcctcttcttaattatggctattcaatcttgcgtgcagcaaccgcaagagcattattgggctcaggcttgctaccaaatttgggaatattccacaaaagtagatataatgcatttcctttagctgacgatgttatggagccatatcgcccttatgtggatgaaatagtatatagtctttatatacagggatatgacgagttaaataaagatgttaaagcttcaatacttagattattaacttgcgatgtaaaaataggcaaagttatgcgacctctccaaattgcgttaacaattactacagcttcactcgctaaatattatgcaggcgaaataaaaacactctctttaccctttttataatgacagaatatagacttaatgcgtaccatattatgtggctatttgtattttttgatttacctgtatctacgaagaaggaaatgaaagctgcgactctttttcgcaagaatttggagaaagatggtttctccatgatgcaattttctgtttatattcgtcattgtggatcaaaagaaagtttagaggttcatgtaaaaagggttaagtctttattaccagaaactggaaaagtgagtattcttagtgtaacagataaacaatttggaagtatttataatttttgggggaagccaaagaatataagaactagcaaaataaaggaaaaaactttttttgaacccattcaattggaacttttttagtatatttgcatgaaaatattgcctacataaccatttcttattagagaaatctattgtttctttctgattgtcaacaacttcgatactataggttgtggtttgatgtaggaacatgataataacccgttggcggaattaatttaagttgataaatatgagtaaaaggttgt

SEQ ID NO: 4231 - DNA, 13747 bp, synthetic construct
  source 1..13747: mol_type = other DNA
  misc_feature 1..13747: note = Synthetic
ggagactccgaaggatagagagtttttcctgatgaacgagaagcaagacgatattcagattcatccagactcagaaatgatgatggtgatgagccatgaagaattgctccaaacactacagtatcgtgagtttgtagatagcaaaggggagtttgccatcatcaagctgcctgatggaatgatgacggtagtgaaccgacaaggagaacaagtcttggagccaggcgattactatgacatgaagctgttggatggtaacatcctgttcttccgacctcgcagaaaggcgaaatgctattatgacctgttggcaaaagttgtcatcgacgatggtactaacgtagcagaaactccccatgttgtcaacatcaaaggatgggagtttatagaatataacgacatcttcatgtctcgaacccaagaagatttttctctgccctatcatccttcacaatatgattttctgaattatgggtactatatgatattcagattccgaccttctgctcccggttgtcaggtatggtactattgtgagggtgatgaaggaagatgcgcatgagcaatgaagagagcaggaatgtatgttttctgcgtaatgattacgaacatgtgtattggttatgtgcagtcctgtatggtgaacgtatcgttgtcatggacagcaaagaggactactacctggtggattcacatttgaagaagacttatataggatgcaatcatccaaagaatgaaaatgaagatttgaattttgtgatgcctcgccttggcaagaaatactatcatgaggcgatgttgcaaaagaaggaaatggaagcaaacgagatgcttcttttgcatgagaagtcggaggctggacatgtggaattgtatcaggcaggaaagaaatggggcgtgaaggtagatggtaaagttatcgtgccacccctctactgcagtatagcgcaacctgttggtgcctattgcgcctttgaagagattcccagacattggggcattatgacattgaaaggaaaagtgattgttgatgccaaatatgagaaggtggagattcgtgacaatggaatcgccatcgtaacaggtatcacgggaaaaacacagacaatcaatcttttaaaggtaaaagggtaaaagggtaaaaaggtaaaaaagtaaaaggtaaaagagtaaacaggccgatgtgaacaagcgttcatgtcggtctgttttttgtttatgtaaatcagaaaataaaaaagcggagcgtgatttcacaaccacactccgcgcaaacttaaacaaccaataaaagaaatagattgatcgttcaattgttatatctgatgaagagtagctcttttagagcttgtttttttatctgtcagaaatatgtcttatctattttgaagacattgctgattaacggatgaacaggagctcacgatacttaggcaaggtccagagctcatcggctacagccaactccaacttgtcaatctgataacggatttcctccatctttggagctaccgtgtcatgataagctatcgccttatcgtgctcattctcaatcttgttggcaaccttgcgggcatttaccaactcctcaacacctgtctcgatgatctgagtgcgctcggcaatcttcttgataatcttgatgttgcgggctgtcaacttcttgccttcctcgtcgccgaagatatcaatcatgttctccacattctttgccaactggctctgatagtgagtagccacagggatgatgtggttcatgctcaagtcgcccattacacgagcctcaatctgaatcttcttggtgtaggtctcccatttcacctcgttacgagcttccaactcgttcttcttcatgacacccatatcctcgaacatcttgatagtggcagggtcgagataacgctcaaaaatctttggacagctcttctcgcagtccagaccacgcttagctgcttcctctacccactcatctgagtaaccattgccgtcgaaacggattggcttgcaggtcttcaaatcctgacgaacgatatcgatgatggctgatgtcttatcctcacccttggcaatcaactcatccacacgcttcttgaagtcggtcaaagcctcagctacagctgtgttcaatacgatcattgctgatgcacagttagcctcagaacctacggcacggaactcgaaacggttaccggtgaaggcgaatggtgatgtacggttacggtcggtgttatcaatcatcaactctggaatctcagggatatccaacttcatgccctgcttgcctgctacggtgaagagatccttcttgtcggctttctctatgtgctcgagaaggtcggtcaactgcttgccgaggaatgaagagatgattgctggaggtgcctcgttggcgcccagacgatgcgcattggttgcgctcatgatagaagccttgagcaaaccattgtgcttgtatacacccatcaaagtctctgtgatgaagactacgaaacggaggttatcctctggtgtcttgccaggaccatgaagcaggatgccggtatctgtagcgagactccagttgttgtgcttaccggaaccgttgatgcctgcgaatggtttttcatggagaagtacgcggaaaccatgatggcgagctaccttcttcatcaagctcatcaggagcatgttgtggtcaacggcaaggttggtctcctcgaagataggtgccaactcaaactggtttggtgctacctcgttgtggcgggtcttgcaaggaataccgagttcaagagcctggatttccaaatccttcatgaatgcctgaacacgctctgggatggcaccgaagtagtggtcgtccatctgctggttcttggcagaatcatgacccatcagggtgcggcctgtcaacatcaggtcaggacgtgcagcatacaagctttcatctaccaggaagtactcctgctcccaaccgagattggaaataactttcttgacatctgggttgaagtagtggcaaacctctgttgctgctacgtttacagcgtgcaatgaacggagcaatggagctttatagtcgagagcctcacctgtgtaagagatgaagacggtagggatacagagtgtatcgtcgatgatgaatacaggcgatgttggatcccatgcagagtaaccgcgtgcctcaaaggtagagcggataccgccagatgggaaagaagaagcatcaggctcctgctgaacgagcaacttacctgaaaattcctcgatcataccacccttgccatcatgctcgatgaaggcatcgtgcttctcggcagtaccttctgtcagtggctggaaccagtgagtgtagtgggttacgccattctcgtcagcccactgcttgatgcctttggctacggcgttggcgatgttacggtcgagacgtgctccgttgtcgatgacatctaccagtttctcatagacatctgcagggagatacttgtacatcttctgtcggttgaataccttctttccgaagaattcacttggtcgctcgctaggagcggttacctcaacaggctttctcttggaagcctctgaaacagcttcaaatcttaagttgctcataccttatatttttaaatgtttaatgttcaatgttaagtgttgaattattttcccagccatttggcaattctctccatggcttccttgcagtcctcatgctcaccgaaggcggtgagacggatgtagccttcgcccgatggaccgaaaccgacacctggagtgcagactacgctggcaccataaagcatctcttcgaagatttccagcttggcgtgttgtttggcgtcttcacccagagataaggtgcattctcaccgccatatactctcaagccgagtttctggagttcggctctcatgaagtgggcattctccatatagtaattgatggttgccttcacctgttccttaccctctggggtgtagatggcttcggcagcacgctggctgatatagcttgtaccattaaacttggtgcactggcggcggtcccagataggattcaatgccacttcctcacctgccaatgtctttgccttcaactccttaggaacgatggtgtaaccacaacgcacaccggtgaatccggcagtcttcgaataactgtggaattctatcgctacctttctggctccacgaatctcgtagatagaatgaggaattgatgggtcggtgatatatgcctcgtaggctgcatcatagaggatgatgctctcgttcttgatagcatagtttacccattttctgagttcttctttcgagatgaccgtacccgtagggttgtttggataacagagataaaccatgtccacacggtggtctggaatctgagggatgaagtcatcgctctcatcgcaaggcatgtaggttacgttactccacttgccgttctcaaagactccggctctacctatcatcacgttagagtctatataaaccggataaatcgggtcggtaacgccgatgttgttatcccatctcaaaatctcctggatatttcctgtatcactcttggctccatcgtttacgaatacctcgttggcgtcaagatgaatgccacgtggcagaaagtcgttcttgatgatagcctcgcggaggaagtcgtagcctcgctccggaccgtagcctctgaaagaagcctgctcagccatctcgtctacagccttgtgcatcgccttgatgacggcaaggcagagaggctgggttacgtcaccgatgcccagactgattacacgctgctttggatgtgcaatcttgtaggcgttcaccttctttgcgatgtcggcaaacaagtagttgttggccaacttcaggaaatgttcattaactaatgccatattttgtttctccttttatttgtggtcattatcgaccatttgttatttaagtttgcgttctctttttaaaatgttgagtgtcatattgttttaatgttgagtgttgaatgttgagtgttgactttgtgggtgcagctaaattcaacattcaacattccacattcaacactccctatattaacacaccaactggatttctccttcgaatgagaaggctgcaggccctgtcatgtaaacatgatcatcagcctcgctatattctatttccagcgttccgccatccatcacgatactgcttttcctgccagtacgcttggtaaggactgcggctacggctgtggcacaggctcctgttccgcaagccattgttattccgcttcccctttcccaaactcgtgtccttatggcgtctgtgtcagttacttgtgcaaattctatgttgcatctctggggaaatgccttgtctctttccaggattttaccatagtgggcgatgtcgatggtgtcgatgtcatccacgaaggtaacgaaatgcggattacccatgcaaacataggtgccttcaaattttctgccgtcagcttcgagcaccgaagggcctatgaattgctcgggattttcaagtttgggttccagcatgtctactgttaccgattccacaacttctttattatcctgaagatgaagtttcaatatcttgatacccgaaagcgtttccagtcggatggtgtcctttcgggtcaatcctttttcgtaaagatacttaccgatgcatcggcttgcattgccgcacatcatcgcttctgaaccatcggcgttgaagatacgcatcgaataatctgctcttctgctgtcttgcggctttccgatgagaaccagtccatcgcttcctatgcccgtgtgataagcactccaggcaatggcagccttctctgggtcagggatatcgtattgttgggtatctatatagatgtagtcgttacccgctccctgcatctttgtaaaatgaactgtttctttcatctgcgttgttctttatgtttgaatactcttcttttatctctcatgtcttatcttcttttgagatttgactttttgctagtctttcgaatatttcgatgactatttgtttgatttcggttgcaaaggtacgacgatttgttgaaatatgcaagaaaataaatacagaaatcttgattatttttcgctatcttacaatttgtatcataaaaatgctttctgccttacaaattgtaaggagaatgtgataagcctcgataaaattaaaatgttcgacaaaaagcaaaagcgaaatgtttttgttttctttaaaatgctgataaaatgtattaattttgcagccgaaaacgaacatagtgtaaaagaaaggcttgatttgaatagcaaccaatgaaggtccgtttttcgaaaagagacaatcaatagaagtattagcacattattatggtggtttggtgcgccagaagaatattctcagcatcctgatgcagacggtattcatcgtggcagccaatgccttcctcgtaacccatatcgccacagctgtagcagccaccacctggatgctcatcgactggattgtaaacaagaagccaaccacagtaggtgcttgtaccggtgctgttgccggactggtagccatcactcctgcagccggcagtaccgatattttcggagccttctgcatcggtatcatttccaccatcgtctgcttcttcatggtagctgtagtaaaggagaagttcaagtatgatgatgctctcgatgcctttggtgttcatggtatgggtggtattctgggatctatcctcaccggtgtcttcgccactcagtatgtaacaggagccgaaggagtacagggtgccttctatggcgactggcatcagctttgggttcaggttgtagccaccgtggtaagcatcatctacagcgtagtagttacctacattatcttcaaggtagtagataagagtgtaggtgtacgtgttgacaagcgagtagaagaggaaggtctcgacatctacgagcatggtgagagtgcttatagcaactaagatagagaatgaatatatgtataacaccttgactgtatgttttgtatggtcaaggtgttttctattataataatgtgtaaacctgattttgcctaaattcttcttgttattttatcatttgcctgcttttttatgttaaatcttataaacacttagttacaaaatcaattctttttcttatatttgtcaacaaattaaaaagctgacaattatgattaatgaatcattttctataagattgcgggaagcgcgacagatgatggggctcagcatggataaactcgtagagcgaaccaacggagccatcaccaagcagagcatctcccgatatgagaaaggcatcatgcgccctaagcgtgatgccttgcaagccatagccaaagccctcaatatcagcgaggaatatttcgaaggaaccaatctcaagatagacatgccgatgctccgcaccacctccaatggcaagttgtccgaagacgagttgcaagccctggaagcgaaactctctttttgggcagagcagtatcttacgaaggagaaagaagcgggatttcctacccggttcaagaatccgataaaaggcaccaaggtatcaacccttgaagatgccatccatgctgccgatcttcttcgtgaaaagtggcattgcggtgatggtcccatcgccagcatcctgagactcttggaaagaaaaggcatcatgatacttgctgctacactcccagagtatgtattcggaatgagtacctgcagataagaagcatcctttgatgattctcgatttcaatccggaaaagagtagcgtagagaaacttcgtttcacggcagttcatgaactggctcatctgcttctcctcttcccggaagatagtccgttgaaactggagaaacgctgtgatctctttgccagtttcttccttcttcctaaattggcgcttatcgaagagttgggttccaagaagcgtgagaagataacgctggaggagatgattgacatcaaggaactgtatggcgcatctctcgccgcttccatcatcgccgccagggattacggcatcatcaccaccgagtataaacgtgcatggtatgccgagcatatagagcctaatccacgagaaatcggtaatggccactatgcatttcctgagacattgggaagggagaagagagtcaactcgatagtagattcgtgaatgttggatgtcggtgtaaatgtcagcatttgatgatatttaaaataggaaatactaattcttaatagtgttagatatgaagcagaataataatgaacaaatcgtcttcgatatgttcgaagaggttgcaaccgaaagcatcgctgaggctcggaatgcatacacctatgaagaaatagatggttgctatttggaggcgaaagagattgctgataaggcaaggatgaatttgctggagaaaatgggaggtatataaaaaaaataaatcccaccgaagcggattataggttttacccttcggcaattactgccttattgtgataagatgtaggaaatcttattttctgctgcaaatataatacaaaatatttgtttatccaataaaaatgttgtaattttacagaaaattaataattaagcatataaaataatactgatatgactaaaatactaggaattgatactggtaccaatagtcttggatgggctattgtagaaaagaaggcggatgaatatcatttgctggataaaggtgtgaacatctttcaggaaggtgttaaaatagaaaaaggcatagagtcttctaaagcagctgaccgtacggctcataaggcagcaagagtcagaaactatcgtattaaattacgtaagatacgtctgcttcgtattttaagtgatgcgcatttatgtcctccgctttcgaaagcagaactatctgcatggagactcaagaaggagtatcctaagaatgaattgtttatgcaatggcaaagtactgatgatgaatcagaaaagacaccatacgcttataggcataagtgtcttcatgattgtttggatttcagcagtataactgatagatatattctgggtcgtgctttttatcacatgattcagcgacgtggctttttaagtaatcgtaaagaccagagtggtgatgatactggaatggtaaaagaaagtatcagtaaccttactcaagagatgcatgatgctggttatgagtatcttggtgattatttttattctctctataataaaggagagaagatccgtaatcattatactgcacgcaatgagcattatctggcagagtttaaggctatttgtgaaaagcaggagttagataagaatcttggtcatgaagtggtacatcaaatagaaaaagccattttctaccagcgaccattaaagtcgcaaaaaggacaagttggtaaatgcgtgtttgagaagaacaagacaagatgtccttcttcacatcctatgtatgaagagtttagaatgctctcttttatcaataacataaagattcagactccaaatgatgatgtcttacgccctctgtcttcagaggagcgagcactcattatgccattgttcttccgtaagttgattataaaaaagaagcagtttgattttgaagatattgctaagaaactggcacccaaaaaacaatatggtttttacaagaagagttctgatgccgaaatgccatatcttttcaattaccctatggatacatctgtttctggttgtcctgtaactaccgctttaaaagatatctttggagataattggatagattctctttgtgaaacctatacgctagccgagggtaaaagtcgtttgaatgtagtcaatgatatttggcatgcattgttcttctatacagatgaaacgaaacttgcagagtttggcaagaatcgtctgcaattggatgatgaagaagcaaagaagttttgtgagatatctttgccaagtgattatgcgtctttaagtttgaaggctatctgtaagattcttccttatcttagaagagcttgatttattctcacgccgtattcttgggtaacttatgtgaagtgatgccgcaatacgaatggaatatggaggaaatgcgtaatgcagccattgataatattatctatgaaatgaatcagattgattctaaagatgcacgtactttcgaggtgtgtatcaaggagtatctgaaggagcagtatcatgtatctgatgagaaactccagaaactataccatccttctatgatggagatgtatcctagagtgcaacacaccaataatcatggtgtttatcaacttggttcacctcgaattgatagtgtgcgtaatccaatggctatgcgttctatgttcagattgcgtaaattggtaaaccgcttgttggaggaaggtaagatagatcaagatacagaaattcatattgagtttgctcgtgaattgaatgatgctaataagcgtaatgctattgctgcatacacaaaagaaaatcaaaacaagaatgatgaggctcgcaagaaaataagaaatctctttaaggcagaaacgggaaatgatatagaaccaactgatgcagatgtcttgaaatatgttctctgggaagaacaggggcacatctgtttatatacgggtaagcaaatacggatatcagactttgttggagctaatccaaagtttgatatagagcatactattcctcgtagtgtaggtggtgatagtacaaagatgaatttgactctctgtgatagtcgtttcaatagagatgtcaagaaaaccaagttacctactgaattgtctaatcatgatgagattatgactcgtattaatgaatggaaagaaaagtatgagtctcttgatggtcaaattcgtagacaaaagaagatgtcaaagggagcaactactaaagatcaaaaggatgcgatcattcgtaaacggcatcttttagaattgcaacgcgattactggcgaggtaagtatttacgtttcacgatggaaagtgtacctgatggatttagtcgtcgtcaaggtactgatatcagcgtgatttctaaatatgcacgtctttatttgaaatcccttttcaagcatgtctataccgttaaaggtattgcgacttctgattttagaaagatttggggtatccaaaaggtatatagtcagaaggaacgtgtaaatcatgttcatcattgtattgatgccatcgttattgcatgtatcggcttagatgaatataataagttgggagcatactatcatgatgaagaaaatcatgaatggtatggtatgtccaaggcttattttaaaaagccttggtctacatttgttgaggatgttgagaaggtgcaagatgaaataatggtttatcattacacaccagacaatatgccaaagcaaggacgccgtagaattcttattgatgggaaaaaggttttagctaaaggtgatgctgcaagaggatcattgcataacgatacttactatggagctatagagagtgatggtgtcgtaaaatacgttaagcgtataaattttgcatcaatgaaggagaatgatgtcaaaaatatcgtggatgatacagtaagaggtataattgaagctgctattaatgagaagggcttcaaagaagcgatgtctggtacaatatggatgaatgaagagaaacaaataccaattaaaaaggtaagatgctatactccttctgttactaagcctttgaatattcgccaacagcgagatgtttcatcaaaagaatacaagcaacaatatcatgtcaccaatgatagcaactatttgcttgcattgtacattggtaaggataaaaagggtaaggaaaagcgtgaatttgagataataaatatgttgcaaactgcacaatattttaaaacaagtaatgacaaagtcgctgttggaaaaaatattgtgccgttgaagagtgaacatgattatccatttgcatattctttaaagataggaacaatggtacttctttacgaaaaatctccaaatgagatatgggatgcttctcttatggataataacaaacgtctctataaagttgtgggattatctgcaatgagaatgaaaggacgaaatgttgactatgcaacaataaagttgaaacatcatgaggaggctcgtctaagtacagaacttaaagtgaaaaatggcgcatttaagcaaggagaagaattgcgcccttcaataattatgcttcatactcagctcaatgccttagttcaaggctatgatttcgagattaatgaattaggtgaaattaaaagattaagataaaaatgatatgattaagcagacattgttcttttcaactccagtttgtctttcactcaagaattgccagattgtaatctcttggaaagatagcgacgacaaggtaacacgccctatagaagatattgggtgtgttgtcttggaaaatcaaatgataaacattactttgccgcttctcaacgattggtaaagaataatgttgctgttatcttatgtgataacaagatgatgccaacatctatgttgcaaagcttagatgctaatacaacgcaagctgaaagtttaaaatttcagcttgctgttagtgagcccatgaaaaagcaggcctggaaacagattatagagtcaaaaatagcaaatcaatccgcagtcttgggacttgctggtaagaaaaaagatattctcaaaccttattataataatgttaagagtggagattcagacaatagggagggattagcggcaaaggtgtattggaatagccttttcggtaactcctttaaaagagaaagggatggatgtccgcctaatgctcttctaaattatggctatgctatattacgtgcagctgttgcacgtgctttgttaggttctggtttacttccgaatttgggtatcttccataaaagcagatataatgcttttcctttagctgatgatgttatggaaccatatcggccatttgtagatgaaatcgtttatcgactttatggcaaaggaatttccgaattgaataaagaatcaaagcctgagataatgcgtatgttgaattgtgatgtcaatatagggaaggttaaacgacctttgcagatagctttgaccataacaactgcctctcttgttaaatattattctggagaaataaaaaaactttccttacctattatgacatgactgaagatagactaaatgcttatcatataatgtggttatttgtgtttttcgatttacctgttactacgaaaaaagagatgaaggctgcttctctttttcgtaaaaacttggagaaagatggtttctctatgatgcaattttctgtctatatccgtcattgtgcatcaagggaaagtttggaagtgcatgtaaaacgggtaaaatctttgcttccggaggctggaaaagtaagtttgttaagtgtaacagataagcaatatggagatatctataacttctggggtaagcccaaaagtattaataagagtaaaatatcgaaaaaagttatcagcgaacctattcaattggagtttttttagtacttttgcattagaaattatatcctactcaccatttcttattagatagagtgtttgttatgcgctgaaaatcagtatgttcaaatctgtaggttgtggtttgatgtaggaatcaaaagatatacaaccaaaagcggcagtgctccgaataataatagttgtggtttgatgtaggaatcaaaagataatacaacaaacgttcagccattagcataaatatcatagttgtggtttgaatggtaggaatcaaaagataatacaactttttgag

SEQ ID NO: 4232 - DNA, 13629 bp, synthetic construct
  misc_feature 1..13629: note = Synthetic
  source 1..13629: mol_type = other DNA
taacaaatgtacttgtagagaagtaagcatctgcaactatgagggttgagagtttaagaagttccttgcggtaacgcttaatgacgctgatatagaaatctaccatagtcttgtttctaagactcagttctttattacttagcgactggtgtgcttttaacatcatgcagtctttggcatcaatatcaatgaggccaatacccatgatttcgagaccatgtttaacagactgtgcacatcccgaccaaaaacgaccgatatgtggagtcttcttgccagctttgctgatgtagctgggatcaatggcaatagcccatcttccctgtttaccaaagaagcgcttggcaagtgagacattaagtttgagccagtcaatgcttttcgacttttttaagccgaatgcgttgcgataggtttgctcaacatgcgagccatacctccccatttgggtgaaatttatctttcttggtattaccatgaacaaaattatcacctcgatgagtattttctcgaaactttttgttaactttgcagccgaatcttcaactgcatctttaaagatatccatatattggtcaagtcctgtattcatataattttgcgtttgtcgtgatttgcaaagttactgaaaatcagcgacttgaccaactttttatagctaagttttcataagtatttcttaatgtaagttattgatttacagacgattaaatgttaatttaacgcagtattgattaaagtcacaaaagggacaagtgggcaaatgtgtgtttgagaagaacaaaacgaaatgtccttcttcacatcctatgtatgaggagtttagaatgctctcttttatcaataatattaaaattcagacaccaaatgattcagctttacgccctttgtctgcagaagagcgagaacttattatgcctttgttcttccgcaaatcaaagaaacagtttgattttgaagatatagcaaagaaattggctccaaagaaacattatggcttttacaaaaaaagttctgatgcagaaatgccatatcttttcaattaccctatggatacatctgtttctggttgtcctgtaactgccgctttaaaagatatctttggagataattggattgattctctttgcgaaacctatacgctagccgagggtaaaagtcgtttgaatgtagtcaatgatatttggcatgcattgttcttctatacagatgaaacgaaacttgcagagtttggcaagaatcgtctgcaattggatgatgaagaagcaaagaagttttgtgagatatctttgccaagtgattatgcgtctttaagtttgaaggctatctgtaagattcttccttatcttagaaaaggcttgatttattctcacgccgtattcttgggtaacttatgtgaagtgatgccgcaatacgaatggaatatggaggaaatgcgtaatgcagccattgataatattatctatgaaatgaatcagattgattctaaagatgcacgtactttcgaggtgtgtatcaaggagtatctgaaggagcagtatcatgtatctgatgagaaactccagaaactataccatccttctatgatggaaatgtatcctagagtgcaacgcaccaataatcatggtgtttatcagcttggttcacctcgaattgatagtgtgcgtaatccaatggctatgcgttctatgttcagattgcgtaaattggtaaaccgcttgttggaggaaggtaagatagatcaagatacagaaattcatattgagtttgctcgtgaattgaatgatgctaataagcgtaatgctattgctgcatacacaaaagaaaatcaaaacaagaatgatgaggctcgcaagaaaataagaaatctctttaaggcagaaacgggaaatgatatagaaccaactgatgcagatgtcttgaaatatgttctctgggaagaacaggggcacatctgtttatatacgggtaagcaaatacggatatcagactttgttggagctaatccaaagtttgatatagagcatactattcctcgtagtgtaggtggcgacagtacaagaatgaatttgacactttgtgatagtcgtttcaatagagaagtcaagaaaactaagttgccaacagaattgcctaaccatgatgaaattatggcacgtattaatgactggagagaaaagtatgagtctcttgatggtcaaattcgtagacaaaagaagatgtcaaagggagcaactactaaagatcaaaaggatgcgatcattcgtaaacggcatcttttagaattgcaacgcgattactggcgaggtaagtatttacgtttcacgatggaaagtgtacctgatggatttagtcgtcgtcaaggtactgatatcagcgtgatttctaaatatgcacgtctttatttgaaatcccttttcaagcatgtctataccgttaaaggtattgcgacttctgattttagaaagatttggggtatccaaaaggtatatagtcagaaggaacgtgtaaatcatgttcatcattgtattgatgccatcgttattgcatgtatcggcttagatgaatataataagttgggagcatactatcatgatgaagaaaatcatgaatggtatggtatgtccaaggcttattttaaaaagccttggtctacatttgttgaggatgttgagaaggtgcaagatgaaataatggtttatcattacacaccagacaatatgccaaagcaaggacgccgtagaattcttattgatgggaaaaaggttttagctaaaggtgatgctgcaagaggatcattgcataacgatacttactatggagctatagagagtgatggtgtcgtaaaatacgttaagcgtataaattttgcatcaatgaaggagaatgatgtcaaaaatatcgtggatgatacagtaagaggtataattgaagctgctattaatgagaagggcttcaaagaagcgatgtctggtacaatatggatgaatgaagagaaacaaataccaattaaaaaggtaagatgctatactccttctgttactaagcctttgaatattcgccaacagcgagatgtttcatcaaaagaatacaagcaacaatatcatgtcaccaatgatagcaactatttgcttgcattgtacattggtaaggataaaaagggtaaggaaaagcgtgaatttgagataataaatatgttgcaaactgcacaatattttaaaacaagtaatgacaaagtcgctgttggaaaaaatatagtgccgttgaagagtgaacatgattatccatttgcatattctttaaagataggaacaatggtacttctttacgaaaaatctccaaatgagatatgggatgcttctcttatggataataacaaacgtctctataaagttgtgggattatctgcaatgagaatgaaaggacgaaatgttgactatgcaacaataaagttgaaacatcatgaggaggctcgtctaagtacagaacttaaagtgaaaaatggcgcatttaagcaaggagaagaattgcgcccttcaataattatgcttcatactcagctcaatgccttagttcaaggctatgatttcgagattaatgaattaggtgaaattaaaagattaagataaaaatgatatgattaagcagacattgttcttttcaactccagtttgtctttcactcaagaattgccagattgtaatctcttggaaagatagcgacgacaaggtaacacgccctatagaagatattgggtgtgttgtcttggaaaatcaaatgataaacattactttgccgcttctcaacgagttggtaaagaataatgttgctgttatcttatgtgataacaagatgatgccaacatctatgttgcaaagcttagatgctaatacaacgcaagctgaaagtttaaaatttcagcttgctgttagtgagcccatgaaaaagcaggcctggaaacagattatagagtcaaaaatagcaaatcaatccgcagtcttgggacttgctggtaagaaaaaagatattctcaaaccttattataataatgttaagagtggagattcagacaatagggagggattagcggcaaaggtgtattggaatagccttttcggtaactcctttaaaagagaaagggatggatgtccgcctaatgctcttctaaattatggctatgctatattacgtgcagctgttgcacgtgctttgttaggttctggtttacttccgaatttgggtatcttccataaaagcagatataatgcttttcctttagctgatgatgttatggaaccatatcggccatttgtagatgaaatcgtttatcgactttatggcaaaggaatttccgaattgaataaagaatcaaagcctgagataatgcgtatgttgaattgtgatgtcaatatagggaaggttaaacgacctttgcagatagctttgaccataacaactgcctctcttgttaaatattattctggagaaataaaaaaactttccttacctattatgacatgactgaagatagactaaatgcttatcatataatgtggttatttgtgtttttcgatttacctgttactacgaaaaaagagatgaaggctgcttctctttttcgtaaaaacttggagaaagatggtttctctatgatgcaattttctgtctatatccgtcattgtgcatcaagggaaagtttggaagtgcatgtaaaacgggtaaaatctttgcttccggaggctggaaaagtaagtttgttaagtgtaacagataagcaatatggagatatctataacttctggggtaagcccaaaagtattaataagagtaaaatatcgaaaaaagttatcagcgaacctattcaattggagtttttttagtacttttgcattagaaattatatcctactcaccatttcttattagatagagtgtttgttatgcgctgaaaatcagtatgttcaaatctgtaggttgtggtttgatgtaggaatcaaaagatatacaacagccccgtagtggtggcgaggaagcaagagttgtggtttgatgtaggaatcaaaagatatacaacgataagaaaaaattaaaaacggtccttacgttgtggtttgatgtaggaatcaaaagatatacaacatatgtagccccgaattacggggctgaaggttgtggtttgatgtaggaatcaaaagatatacaacgtttgctgcatgccaattgaatccaactcgttgtggtttgatgtaggaatcaaaagatatacaacttcaaaatcgttgaggggcgcagtatcaggttgtggtttgatgtaggaatcaaaagatatacaacagcagatggcggcggttgatgctaagatggttgtggtttgatgtaggaatcaaaagatatacaacttcatcgtgaatctatttgagaatatcacagttgtggtttgatgtaggaatcaaaagatatacaacacttactttgcaagcgacggcgaaggcgtggttgtggtttgatgtaggaatcaaaagatatacaacccaggagataaagacgcagaaccagcccagttgtggtttgatgtaggaattagggtgtccagttccatgttctcgtttttgattatgttttagcaacttagcacactgtaaatcagtaaattaagcacaaaatataagacaaatttaactatcaaaaagtctgatgtagattcgcacaagattatagtttatttagcgaatgattatcaatgacttagatggttattacattgtttttgatactaaaaactggaacacagaactggacaccctatgtaggaatcaaaagatatacaactgatgagccgcataaagcaacgattttaagttgtggtttgatgtaggaatcaaaagatatacaacttctgactgaatcttattagtaaggttaaggttgtggtttgatgtaggaatcaaaagatatacaacaaccatatatcacatagtcaatggtaagagttgtggtttgatgtaggaatcaaaagatatacaacgcaaagttccaaaagtaacaccatcttctgttgtggtttgatgtaggaatcaaaatatatattatatacacgagaatggcataggggctggcgcagtttctgaatatcttggaatataggcaagaaagagtcttgttctccacggacttcaatcttttcaaaagaagaacggaaaagataaaagtatctctgtcagtatatgatagtgcggtaaaatgtattgaggaagtggaatgtggcaaaagaactcagcaaaactattcttctgaactaagaaacaccatttgcccaatagataagaaaaacaatgctgatgtgacgataagggccaacacgccgtagattgattggggattgttgacacagtatcctatgcaggcaacccaaacagcgaaggacaaaaggctgttgtcacccaacgctcatatttcttagagtgcttcgggggagtatcttcgcctactacttcaatgctaacgatttctacctttatttcatgttcgggcttgttcgattcttcgttgttgtttgcagcgtctgatatgctgttgttgttctgataatccttttccataacgcttagtttgaatgtttacgccacaaagatactaaaaatattgattacttcgtttttttgtacgaagaattttagcaaaagaaataaacttaacgttaaatagactttgtaagaaaaaagtggtttgtcggaaattccgacaaaccactcaccatggtgctttagaggggaaaacacagagcttccaatctgcatcgcaaaaagtgcagaaattgagtgtaattcaggaatgtttagtaaagaaattagtaaaatcgggctgtttttcttaatttaactctgaaatagagtggaatatcagagaaaatctataaatttgcatccaaatacaatattttgtaaagaatggaagatagagaactgttgctgaaaagtgacccagagttcgaacgcctcgcctttacggtgttggctatcgaggcttcggcacaaaaaatgggtatatcgccgtctgaaatgagaaagcgattggataaggtggggctaatcaagagtctcatccaagattgctatgacactctacataccgagagccaggaagctgtggcaagtgatgtggtcgaagctcttaaaaattgggaaagaaaagaataatggaaaagcaaatattatatcatggttcaaatgtcattgttgagcatcctttagtaagcattggaagaaaggacttggatttcggtccaggcttctatcttacgcctttgtttgaacaagcttccaaatgggctgtccgtatcaagaccatcagacgagccaagcaagctatagtgaacacctatgagttcgctctaccacaagacagcaaggtaaaacgatttgatgcttacgataaggaatggctcgacttcattgttgacagcagaaaaggaaagcagccttggagtgggtatgacatcattgaaggaggagtggctgacgaccgtgtgattgatgctgtagaagcctatatcaatggctatgcagatgttgagcatactcttcgccagttggtttatcacaagcccaactatcagatttgcattttaagccaggagatagttgataagtatttacaattcaaatcatatgaaaggatataattatgttggatttcttattatggaataaaatcgctcgtatcataaagcaactagctgatacgttacatatatcaaccgacagggctttacagatattctatgactctgacgtttgccgtatgttacatgacaaagaacttggcttgcatctaatgagtgatacatatattgtaaatgacttgatagaagagctaaggaataagcaatagcaaaacgatggataattagaggaggaagattatttgtactgtagcaccttgactgtatgtttagtacggtcaaggtgctatctttatgtaataatgtgcaaatgtgtctccttcagctattgcattcgactccttcagctatcgcattcgtctccttcggtcactgcattcgactccttcagctaatgcagccgtctccttctgccaactcagccgtctccttcacctaatgcattcgactcattcagctaactcagtcgtctccttcagccaccgcagccgtatgtgtcaactcaatgaagtagatgaactcgtgaaatgaagtggatgagttcgcataatgaagttcatgatttctgcacaattgccaatacatgcgaatggtaaagtaaaaagaagtttattcctacctttatgattcttatacgaaaatgtttttctgtttctattgccacatctgtcacctttggcttaactcgctgattataagtgaataatgcgtagcgataagcggtatttctgttgccacctaatgccacgcattgccacactctttttatgaggaaatgagatggaaggtgagcaggttatttcctaactaccagatactcagtaccaaatcttgttcttcggttcttcaaaccttcaatattctgaagctctctgcccaatttctgtatactcgaaacctggagagaagagccgaatttctgctttaaaatgtcgaaaatggcggctgccatcagatattcgccattttccggggtacttgcaggctcgaaaacctgcagaaaacattgcttgataggggaaatctgctcaaattgtctgttatgttgcatgatgatggcggtttccttggcgtcgaaataggatttttcgccacgctccagagcttgcatcgcctgcgcataaagctgctcatagttcagtctgccactcacatcgataggtcccgtcagttctactcccaggaaacggcggttgccggatgggtcagaaagaatatcggtcatgttgctcgtggcgatgaaggaggctagacgaggaaattcctgtacatgacttccgtatggcggcttgattttcaccgtaggcaactgcagcagattcttcagaaatccctgctgcacctgtggggaaatctgattgaactcatcgagattgatgagcagaaattgtgacatcgcctgcagaacctgacgcttttctgagagaatcatgttgtcgctgaagccccacgacagttcggtagggatgagacgtcggcagaaggtgctcttgttgtaaccttgcttggaaatgagcagcggcatggtactgttgccatattgacggtgatacatgccgcgccattggtcaaccattcccagaaaccaggtgtaaaaccagtcttcccaatgaggattgttggtgggtacggttcgtgccagggcacggatgcggtccttgccgtcccattttcccagacagtcatagagataggactctatcgggctgtagtttctgatgcggtctgactctagaaaattccttacatccttgatgcttacgtggatgtcggctatctgaacatccagcgtcatgcttttctgcacacgggcatccaccggtctgaaatcgccaacccatgaattgttcgggcggtattcggtatatttcatcacggtattgtaccggaactgatatcggctctccaggtatctgatcatctgcagaatttcggcacgaccctttctgcctgaggctgatttctccgtcttcctgtctttggaatgggtatcgtaagcggtacccactatctggcggagtttctcttctgtcacatgtccccagttgttgcggcggatatggatgaaagcttcttcttcgctgaggcccatgttgcagagcttgattgcgatggctgagaaaccggcaaggaaccggtcttcatcgttctgccatgagatgttggcttttttcatctcttccttcgtctcttctgctgccttgcggtagagaaattcatagtcatcgtatgtctttaaatcgtctacattcttaggggctgaggctaccctcttcatattttgtgagatgcgcatcgccactgccttgctgttataataaggagagtcatcaagcgtaagcatgaagttggatgccaatgatggcttttcgggtttgatggctgcctgtacctgcgactggtagagcgtttttacctgttcgtaggcagactggtagagtaagtcggcgtcggcttcttttgtcgggatttttccttcttcgttgcagatgcttacgagcacaatgaggcttctgccgtcggctccttcaaaggcagcgaaggtcatcggcagcagactgaccgtcttcttgacggcatctttttcctggtccgacatgaggttgatgaagtggagcatcaccagcccgtttgatttctggaagacgagattgccgctttcatccttgttgaattctgcggctggataaacgtgctgccattccttgatgcctttgtagtactggtagtcggcctccatgagcggcacactcattctgaaattggtgacactcagcttggcatcatctttagcgatgcgctccagaaaccgttctacggttttcgaactgaccatcagcttgttctgtttgttaattcttgtaatagtaaacttcatatttctgctaatttgttgatagggtgatacttagggttgtcgatgactttgcccagctttgcccgaagcgttgggcaaatgtgcccggctacgccggtcattcgtgaccttcgtgtcggtcatccgtgctcaattgaagcaatagttccatgagttgtaaacatctcctttagcgaagtagagcctgattaaatctgcttgtgtcataggtttttggaattaaaattatataaaaagtggtttcacaggagtcgtaagcttctaggtggaatcggcaggaatttttcctgttggttgcaaaaatacaaaaaatgttcgaaaccgcaagcctttttctccacttttttaatgtttttctgcgaaaacaataagtattcctctgctttttcgctgagaatcccccgtttttcgcccgagtgtggcaataggtggcaataggtgataatagaaaatgcccttattgcaacgcttaaatagctaaaaaccaattggttaacttggagtgtgacaatggtgacattagttttagaaaatttttctcatacataggctttcctcttttactaataaatgttatattcccgccattccttttccaaatcatttgttttctcccgaatttacagtacttttgcagaaagtatctaattaaagattaaaagtgcgatttaaaataaggtgtagattatgcaatacaagaatatcatattcgatttaggtaatgtcctggtgaaactcaatccggaaggatgcatcggggctttcaaggcgataggaatgggggaactggcgaatccgaatcctcagagtgaggggatgaagctgatgagcaaactgggtgtgggaatgattaccaccgaagcattctgcgatgcagcccgtgagttgacaggagttgatgtgacgaatgaagagatcatcgatactgccaacaagatgctggtggagattcctgatgagaaaaaggagcgacttctgcagttgaagaaggctggttaccgcctcttcctcttgagcaataccattgatatacattgggattattgcgtggagcatctcttcccttatcagaattatggggtagaggattatttcgagcactgtttcctctctcagcgaatgcatttggctaagcctaatgcccacatctatgaggaggtaatcaggcaggcgaacatcaatcctgatgaaactctcttcatcgatgatctgaaggaaaactgcgaggctgccgagaagctgggcatccatacctttcagaacgtgaagttcgatgattggctttcacttcgattctgacggatatgtcagaatcgaagtgattcgaaaaaaatatgaatttcttcgctttttccaataaaatgttatacctttgccaactcataataactaacatacaatatcaaaatgaatttttacaagacattaggattgaaaaacagccgtattgatgtggctgatgccttgcgaggattggccgtggcaggtattattctctatcactccgtggagcatttcaatatgtacgatggaagcatagcgcatgcttatacgctggggtgtgatgattggatggcagatgtgctggcattgctgctgtcgggaaagatgtatggcatctttgccctgctcttcggattgagcttcttcatcatgaacgataaccagcagcagcgtggaaattgcttttcgggtagattcgcctggcgaatgttcctgctggcaatgctcggtatcgtgaacaccgccttcttcgatggcgacatcctcttctcctatgccatctatggactggttctcatcccattgagttatcttcctaccaaatggctctggtgggtggttgccttcctctttatccaaccgatagaaatctattccctcatttcgggatggcaggtagatgcgtcgtcgttgagagaggtgtatggaaatatgtataatggtcatcagcacggcagtttcctggagaatgcctatggcaacctgcgatacggacaggtggctacctattactggtgcatgatgaagggaagacatacgcagactatctgcctcttcatactcggaatgctggtgggtagaaagcgttggttctacaatgagaacaacaacctggctttgtggaagaaggtgctggtggtttccatcctggtattgattgtgggaggcatagctgatgtgcgccacatggaaacatggaacaattggctttatcctatctacaacttcttcatcctctcatttgtagtatcaggattcgtattgttgtggtacggaaaggaatggttcagaaagggattgtcgttcctgcgccagtttggtaagatgagtttgaccaactatttcctccagtctatcatcggttgtggactgtttgcttattatggcttcaatctccagacgaagctcggcatcacctatgccttctttgtgggtattgccatggtggtagtacaatgcctcttctccaacctctggctcaagtaccactcccatggtcctttcgagggaatttggaagaagctgacctggattaagttctaaattttcaagtttactgtaaaactggagactccagttttacagtcttatcccatatttccagttgccttcattcatcatctgcgctggcataaattctttcatgctgttgatgatggtgttaagcatccgttctttgatatagtcttccctaatgtatagggagatgcgtctctgggaaagataatctccttctatctttcttacattcttgcgttgtgcctcatttaggaattcgaggtgcatctctggaatgatggtgaacccgccgttctcatccacgatgcgaattaaagtttctatgctgcctgactcatagatgtggtgccctttgctccttgctttacagaaggagaaggcactatcgcgaaggcattgtgcttctttcataatccacatgttctcatgttccagattctctggcttgaacacgggcagcttgcgccagcagtcttccgataaatatacataaaagcgttctgtgtaaagcggaatctcaagtattcctttacgaggtaggtctgaaa

SEQ ID NO: 4233 - DNA, 12962 bp, synthetic construct
  misc_feature 1..12962: note = Synthetic
  source 1..12962: mol_type = other DNA
ctatcgaatcctttttcaactggctgaatgaaaaaacagaaattcaaagagcatctaaagtaagagctaccaaagggctgttggtacatacctttggaaagttggctattgctctacttacatttgttaatttttaatttttgaatcagaaagccaactgctgattcgcatcaataatataaagatacaagggccaaatgacaaccagcttcgtgaattaaacaatgtagaaaaaaatgcaataatacctctttttctgcgcaaatcaaaaaaagactttaagttcgaagatattgcaaaaaaattatctggcactaaaaaagatttttgctattacaaagacaaaccagagaaagcatatcgttttaattatcacatggatactaccatatccggttgtccggttattgcgcagttgtccgaagtttttggtgtaaaagagaatatagatgaatggttagaaagagcctgtgaggtttatacaaacggagccggtaaaaacagatacgaaataatgaacgatatatggcatgcgttattcttttttgacgatgatgagaaactgaagatatttgccatggaaaaactgcaacttgatgaagtccatgctatacagttcagtaaaatacgcattccatctgattatgcttctttatcattaaaagctatcagaaaaatactgccttatatgaagcaatatggcatgatttattcgcatgctgtttttttggctaatctttcacatataatcaagtgtcaaacagacaaagaggcacttttacctatgctgcctcgtgaagaggccgaagatattgtaaaagctttttatgaatttgacccttcgatgtcggcactccgtacacaagaagaatacgttaaacattatatcgcatataaatatcatttagatgaggagaatgagcgcaaattgaaaaagctataccacccatctatgatagaaacatttcctaaaatacggcaaaagacaccagatggatattatcagctgaaatctccaaggacgggaagtatgcgtaaccctatggcaatgcattctttgttcagactacgccatgtcatcaataaattattgcaaaaaggaaaaattgacgaggacactatcattaaaatagaatttgccagagaacttaacgactacaatcagagaacagctataaaacagtggcaaaacattctagaaaagcaaaataaagaagcatacgagaaaatcaaagaacattttggtaatgactatattcctagtacaaccgatttgctcaaatataaattgtgggaggaacaacagcacatttgtctgtacaccggtaaatctatcgggatagaaaaacttttcagttcaactgaatttgatatagaacatactatcccccgtagtgtaggaggcgactcaactgatatgaatttaacgatatgcgacagccatttcaatagagaagtaaaaaaagcacaaataccatcacaactggcaaaccatgaggatattttagaacgaatatcgagttggaaatccaagattgaaaaattggataaagaaatccggaaaatcaatacaaaaggaattagcgataaagaaacaaaagaccacagaattcaaaaacggcatctccttattttggaacgtgattattggaaaggaaaatacagccgattcgtaatgcaagaagttccagaaggattttcacgcagacaaggagtagacataagtgtaatttccaaatatgcacggctctatcttaaatcattgttccaccatgtatatatagtgaaaggtctcataacatccgactttagaaaaatatgggggctacaagacgaatatgataaaaaagcccgccataatcattgccatcatgcaatagatgctataacaatagcatgtattggtaaagcagaatacgacaagttagcacagtattatcatgataaagaacgttatgactggagtttaagcagccagaaagctgtatttcctaaaccttggaaaacttttacagaagatgtaaaacacatagacgagacactgctggtcagccattatactgctgataatatcaaaaaacgtacccgaaaaaaaattcggataaacggaaaagataccaataagtatatggaaggagatacagccagggtttcattgcaccaagacacctattatggtgctattgaacgtgcaggtgagatcagatatgtagtgagaaaacctatagatcaaacagaccctaaacagattgttgataatgttgtgcgagaaaaagtcatggccgctatatccgaatacggaagtctaaaaaaagccgtagaagcaggtatatggatgaacaaagaaaaagggatacgaataaataaggcaagagtatatgctactcaaataaaacgccctcttgatattcgcagacaacgagacgcaatcaaagaatataaacagatgtatcatgtggctaatgattcaaactatataatgggaatttatgtcggtgcagacaaaaaaggtaaagaaaaacgaacctttaaattagtaaacagcctagatgctgtaaaattttacaacagtggccttaaagagcagaatatagacattctgcactatgaggataagaacggatatgcattaaagtggaaattaaaaataggctcaatggtgcttttatacgaggatactccatctgaaatttatgacctggacttaaaagctctaagcaaacgactctataaaataaccggaatgtcatcaatggttgtttcaggcaacagttatggtacattaagcctagtattccaccaagaagctagaccatctacagaattttcttctaaaaatggtatctataaagcaaacgaaatattaaggccaggaattactttattacatactcaattcaaaggactggtacaagaccaggattttgcaataaatgaaattggcgaaattatttttttttgacaaatgattaagcaaactttatttttttctacacctgtttctctttcacttaaatacaaccaaatagaaataagctttaaagagagcgaagaaattattacaagaccgatagaagatgtcggtcttgtaataattgaaaacccaatggttcacattacagtacctttgctaaatgcattagcaaacagcaatgttactgtagttttttgtgataataaatgcatgcccaatacaatgcttatgcctttggagtcaaattccatacaacaagaagtatatagatttcaaacagaagtgacccaacccacgaaaaaacgcatttggaaagaaatcattgaaaataaaatcagaaaccaagctactttattagatatattaggtttggatggaagcctgctgaaaccttattatatgaatgttttatcgggcgacagtaacaacagagaaggcatagcagctaaaatatattggcaacaaatttttggtaaagaatttattcgcaaacgtgaaggcgcatacccaaataccatactaaattatggatatacaatattaagagctgctgttaccagagctttattaggttcaggattattccctgcatttggtctatttcatcggaatagatataatgcatttccactagcagacgatataatggaaccttaccggccatttgttgattttgcagttaagcaaatttatgatttctcttcacataatgaaatcaacaaagaaattaaacaggttttgacacaagttctttatacagatgtaaaaatcaaaaaacaaatccatcccttacaaattgcattatccataacgacagcttcccttgtccgagcattaaaagataaaaaagaaaatattatttatccgacattcgtatgacagagttacgcttaaatgcttatcatattatgtggctattcgtattttttgatttacctgtaactacaaaacaagaacaaaagattgcttcagatttcagaaagaatcttttaaaagaaggattcaccatgatgcaattttctgtgtatatacggcactgtgcatcacacgaaagtcttgtcgtacataaacgacgaataaaatcaatgatgcccagttctggaaaaattagtatgcttgctgttactgacaaacaatatgctgatattgaaactatttttggcaaaacagcaaaaaaagaaataaaagcacctatacaattggagtttttttaatatttttgtatggactagattagaaattaagccacttcatatagacaatatagaatgtaatcacttatattacaatctattataaaatatatgttgtggtttgatgtagaaaattaaagatatacaacggaagtgataaaggaaagaaagcaattgagttgtggtttgatgtagaaaattaaagatatacaactgcgtctgtatagaaggatatgcaacaaagttgtggtttgatgtagaaaattaaagatatacaactcaaaaatcctatgattgaccaggacggggttgtggtttgatgtagaaaattaaagatatacaaccaatgggttaaagtaaaagacttgacaaaagttgtggtttgatgtagaaaattaaagatatacaacaacggtaaagcttctaaagaaggactggagttgtggtttgatgtagaaaattaaagatatacaacgagaacaaataaaggagatagtgcagaaggttgtggtttgatgtagaaaattaaagatatacaacttaaggaggaacgaaaagaggataatgcagttgtggtttgatgtagaaaattaaagatatacaacttattataattagcataacgaaggtccagagttgtggtttgatgtagaaaattaaagatatacaaccaaacgatgaataccacagatatctttaggttgtggtttgatgtagaaaattaaagatatacaactttcttaaactgacaaaataactatttaagttgtggtttgatgtagaaaattaaagatatacaacataaagaaaaccatccttataatcacaacggttgtggtttgatgtagaaaattaaagatatacaaccttcaaatgacgggaataactggctgctggttgtggtttgatgtagaaaattaaagatatacaaccgctttcttgatggccttggaaggagttggttgtggtttgatgtagaaaatgactatatccgaaaaaatttactacatttgtaacaccctccacaaaagacatcaaattatggacaaaatagaaataaaaggatacaaatcttttaaggacctaaagctagaactaaaaccaatcaatatactgataggtgccaacggttcaggaaagagcaactttctgtctttcttcgagtttcttaatcgcctgtacgaacagaaacttactgaatatgtcgctttgggaggcggcatagacaagtatttctttcaaggcagcaaagtgacggatgcaatttatgcaaaaatagatttcgtagacaatttctatttatttgagcttaaagaaggagacaacagatttgttgtatcccaagaaggattaggttatcataacaattattatgacattgcacaatttcgtaatgaagccaatatcaaaccctatgatggactgttaaggggcagctatataaaaaagtatttgtccgagataaaaaaatatcacttccacgataccgggaaaagttcaccctttacaaaagaaagccacatagtaaacgatgtgtattatctgtatgagaaaggtgaaaatatagcagcttttctgtatgcaataagacaaaatgagcctgtggtatataaacgtatagtccgtgttatccaaagcatagctccttacttcagtgatttttatttcaatgtaagcgcagctgatacggtccggctccagtggacagataaattctgttccaccatttatggccctactgacctatcggacgggacgatacgttttattgccctgactacactatttctgcaacctgttccaccaaaggttatcatcatcgatgaaccggaattgggattgcacccgctggccatacaaaagcttgcaggaatgataaaatcagcagctgcaaaagggacccaagttatcgttgcgacacaaagtgctgacctcataagcaattttgatgcagaggatatcattaccataaaccagacagaaggggcctcagtcatgaataggctgtcttcggaagaacttaatacatggttggaaagttactttagaagactttgacagataactattcatcaaaataggatatgaaaagaaaacactccctagcgataaccgcactgctcctccccttatccggctttgcgcaggaaaagggattaaatgtggtatttataatggccgacgacctgggtctgaacgatacaggctacacaggaagtgattactacgaaacgcccaatattgaccagctttcaaaagagggaatggtattcacgaatgcatattcatcggcagccaattcagcacccagcagggcctgctttatgagcggaatgtacacccccaggcatggaatttttacggtaagtcctcccgacagaggagacagagccaaacggaaactgattgccgttcccaatacggaggacctgcgaacggacatcatgactttgggcgagcttttccaccggaacggctacagatgcggtcatgtgggcaaatggcatctgggagatgataaagacggcacgggacctctttcgaggggatttgatgtgaatatagccggcggacgggcaggtacgccctactcgtattacttccgtattgtaacagaaagaacgagtgtcatgtcggcctcgaaaagggtactccgggcgaatatcttactgacagacttacgacggaggcggttaatttcataaaagagtcgggcaaaggagacaagccgttttttctgtatatggctcatcatgccgttcatacgccgattacagctccaaaggatatcgtcgacaagtataaaaagaaaccgaaaggcaggtatcacaccaatcctgtatatgctgcaatggtagagactttggacaacagcgtgggaagaatatgcgccacaattgattctttgggattgagcgggaatacaatcattgtatttaattctgacaacggtggctccgaaccagttactgacaattacactgtcaggggcggaaaaggtatgccgtacgaaggcgggaaccgagtgcctttgattattagatggcctcatgccaccaaagccggaagtgtatccgactgtccggtaagcaacattgatttctttcctacgtttcagacttatctcgagggaaaagccggaaatcagcttgacggcaccgacttgtatcctctgctgacgatgcgggaaaaaagtatcaaaagggatttgttctggcattttccggcatatctggaatcgtatacggacgatagcgacggattcagggctaagccttatacttcactccgctccggtaaatggaaactgatctattactacgagaacggaaatgtagaactttttaatcttgaagaagacccgaaagaggagcataatgtagcggacaggcataagaaaatggcggctgaaatgaaagctaaaatctttgaatggattaaaaagaccaatgcgcctgtacctactgagctgaatccttattataagggtagcttataaatgcagctatctgaaagctaaagtctccccttacttatccccttccttccccctcctcaaaaaaaatttttcattttttttcttcccccgaataggggtttttttatgctcctgcgttatgtagtcgaaaagctcagaaaagaaacgatagaaatacaactaaacgagcttacaattacaactaaacgagtataaacttttaaaaactaaacgagctatgaaatttaaatttatcgcattatctttgtttgcagtagcaagtgttaacgcagtgaatgcccagactactggcgcaggtaaattccagcaggaaaacaagcatgagttccgtctgggtgtgagcgacggactgacaatggggtcggtcaacattctgggtatgggtatcgagaatgccatcaccggcaacaagcgctcggacgaaaactacagccttacttacggactgggttaccgctacgcgctgaaccgctttaaggtgggtgccgacctgggattctcgcacatgaacagcaaactgacgctgagcggcgaccagacaccttctatcaaggagaaggaactgaacttcctggtgctgcctactgcggagtttacttactataaaaagggactggtagagttgtacggtacggctgcagccggtatcaacctgaaccgccatacggaaacaggtctgaccgaggccggaaaacggacagcccgcaaggcggaccttactacaagctttgcttatcaggtgaacccgattgctatccgtgtgggcaacaaccgtatcggtggtttcctcgaagcgggtctgggcaacaagggtttcgtcaccgcaggtgtcagcctgaagttctaatactttaaaatacaacagttgttgccatgaatgccaacaggaaagaacagttcaaaataaggtttgagacacattaccccaggctatgccagatagccttcgggtatgtggcctgccgcgaggatgcggaggatattgtgcaggagctttttgtgggtatctggaaccgggaggcggacttgatgccggaaaaggattttgcagcgtacatcaccacagcggtgaaaaacagctgtatctcgtttctgcagaagaagcaggacagcaccgtgtcgattgacgaccatccggcggcggccagtacgctgcccgacgaggaacacgacccgagcgcaccgtcgcccgaggagttgctgaacgaggctctgagccagctgccgcccaagtgcagggagattttcctgatggctaaacagaagggcatgaagtataaggagattgccgcagcgctggagttgtcggaaaagaccatcgaaaaccagatgacgaaggccatcaagttgctccgcgagtttgtaagccgccacggctctgtgctgctgattgtgtctgtcattgttttatctgtcattgctaactgtgaataaagatgaagactgaagaatatatcaatagactgctgtcacggcatttctgcggcgaggagctgacagcagaacagcagtccgtagtggacgagtggatagatgcgaaccgggaagagtaccgcagactgcaacggctgattgggaacgccggccggcagattcccgtagactttgatgcggctgcggcctggaagcggattgagccgcaactaacggaaaagcgggcgatacgcattccgttcttccgccgagagagtacgctgtttgccatagctgcttcactggtggtggcactggtagtgggagcgtatttcctgacgcttaccccggaagcagaattgctgcaatttgccaatgccggacaggtggaaaaggtcatctggctgcccgacagctcgcaggtgaagctggcacccgatgcacggcttacattccgcaacggagaggtgcgacaggcgcagctggaaggaaaagctttcttccgtgtgaagaagcagcacgggaaaccgttccgcgtgtctacaccgcacttgcaggtggaggtgctggggacttcgttcctcgtgaatgcctcgcccgaagaggtgccgggggtttatgtggagacgggcaaggtgaaggtgtcggcgcaggagcgtgacgtcatcttgcaggccagtcagatggtggaggtgacgggacacgacttgcaggtgcaaccaattgaacagccgtaccgttattttggtgtagaggaccgcgagctggtgttcaagaatacgcccctccaggaggtgactgccgaggtggagaagtacaccggcgtacgcattgagctgggcccgggtttcgaaaagacggccgtaaccacgcgtatccgtacgcttgaagcagagagcatcgctgccgagctggcatttctgtgcggatgccgttgcgacacgctgactgccggcaaggcttacagactttattttccttaacctgtatcttttttaactgattatataatgaacagaaggtacctgaccggatatttctttctgtttttcctgctggggggcttaccggccacagcccagcagaaaaacggagaagtgcacaacgtagcagaggagctgatcacagtggacggctcttctgctacgttgacgtgcggctggagcgcatcgagcgtgagaaacagctgacgcttgcctataatgcgtcgctgctggacctggaacgggtttgccatattgcccgtccgggtacgctcacggtgaaggcgctgctcggcgagttgttccgggagtaccggatgaaggtattgccggcagccggaaggaagctggtgctgcagctcatcccgcggcagacgtaccagctgtcgggcacggtgaaggaggcagagagcggcgaacggctgtacggtgcagtggtgtcgctggaggacggatacggcaaccgctcgtttgcggtgacgaacgacaacggactgttctgcatggaggtgcccgaggggacgtaccgcatgcgtatttcgtacatgggctatacgcctctgcaacaggagcaactgagtattcagaccgaccgcacgctgcatgcatccctgaagccgatgtcgttcgaaatgcagggggtgacggtgaaagcacgccgtgcggccaacgagctggatgcgctggtaccgtccaaccatctggccatgagcagcaacgacctgttttcgcaaatctggattctaccgggtgtagcgggggtacctacgcaatttaactttcaggtggatggtggaaataccgacgagaatctgctgctggtggacggggtgccggtcattcatgccggacatatcaatccgcaactgcccaccttcaacggggatgccatcaagagtatgacttttcacaaggggttcttccctacccgtctggagggcaagctgtcatcggtaacggaagtcaagctcaaggaaggaaatctgcaggaacaccagcgcacgctgacgctggatatgccggcagcctcagccacgctggagggaccgattatccgcaataagatgtcgtatgtggtgagcctgcgccgcagctggctggattttttcgacagtctgctgtcggaagaggaacgcctcaaccatgcctcgtacgactatacggccaaagtggtgtacaacaccagcgagagcagttcgctgcaactgctgacttacggctcgcgcgacaattacctgtggccggacgagaacggcaaggagtatacgggcctgcgctgggacaaccagatttatcaagcggcctatcatacccgtctgggaaaggtggaaagccgcacggcggtctattatacctcgcacctcaaccgggccgatgccagtctgctgggcatagccgaagagggttatgtacataacaatatccgcacagtcaatgcctcggcagagttcggtatccgtcctgacgaccagtaccaggcacactggggtgcccgctatacgcacgaggcatacgagtggaccgtgcccgaagatgcctcgcgcatgcgccgtgagccggtgcatcagttctcgctgttctacgataacgacctgcgcattgcccgccacctgtatgcacaggtgggtgtgcactttgtggggtatctgccgcagaagcatgagcattattacagcatccagccgcgcttctcactgcgttatactccttccgagcggaatctgttctacctcaacttctcgaagatggagcaattctatcattacctgcgcatggacaacctctcttttcccaccgacttccgcatgcccagcatcgaaggctacaagccgcgctcgtccgaacattacgaggcgggatggaagcatttctttggcaacggccgcatggagctgtcggcttactacaagacgcgacggaacgtgctggctttccgaccggagttcttcatggaggattacgactggaacaactatatcatggcggacgacggcaacagctatggggtgaaactcagcgtgcaggcaggatggccgcgctggacagcccaggcttcctatggctatatccgaagttgggagtggttcgacgattaccagtccggcaaacggattccttcggtctacgacattccgcatcgcctgaacggagcactctcctacaagttgggaacacgctcgacagtaacactgggaggtatgctcagctcgggaagggggaagggtgaaagatgatgacggagacttcggtccgctgcccgaaaacagcttccgcggcagccgtgaggtaatgcgataccgggtggatgccggatatacgtacaagcgggatttcggtggcaagctcctgctgctgcgggccggtctgtacaacattgtggacaatccgccagaagaagaaattctggatttctattccgtacactggcaccgccactgtatgccatatgccggagtgagctttaagttctgaacttgcacaactggcggtgtatgtattttttcatttctgcatttcatttttagaactgttttccgtacattcgcacataacaaaaaacctgaaacattatgatacacattgtaaaagcgactacggaagacattcctgtcatccgccaactggccgaacaggcctttcccgacacttaccgcgaaattctcagtccggaacagattgactacatgatggaatggatgtattctgccgaaagtctgcaccggcagatggaagaagaaggccatacctattatatcgcccgtgtggacggagagcccgccggctacgtgtccatccgtcaggaaggcgaacataccttccatctcgagaaaatctacattctggcagcctacaagggacgccatctgggccgcatgctgttcgagcaggcacagaaagcc

SEQ ID NO: 4234 - DNA, 12183 bp, synthetic construct
  misc_feature 1..12183: note = Synthetic
  source 1..12183: mol_type = other DNA
gtcagtactgcggtaaggctcgtgagtacatggttgacctctatagccacaagatcaaggatgttcttcattctgacaacaagttggctaacctcgactaattcgagatttttcaatctaagatatgagagtggaatccgaaaggattccactctttttttgctttttataggctgactcttgataggcagactgtattcttaataggttgccaccctatataggcaggctattttcttgaaagttcaagattgcgggaaatgctgatggtggtcttttgttttaaaaaggtgtactttttgttttaaatcagtttgctataaactatattaatactcgttagtatagtttaacggtattcgctcttgttcttcaagaaagatttcatatttttgcaaccgaaagaaatactttgcttgggcaagtatgcttttattcttatataatatcatgtactagtagaagatgaggctgcgtttagagtaacgcaatttaactaaagacataagtgtaaagtaactaaagacaatatataatgactaaacaaaaataaacaagcaataaatagaatacaagtaaatgatattagattatgagaaaaatttcaatgatgccgattttggtattggcaatggcattgggctttgtaagctgcagtgcaagtgatgatggagtaaacgatggaatgcttggtcaacagaccactacattcatgccttcgttctcaatgttgagttacacacagtctgcaagtacacctatcctacaggatggtagcaacagcgctgaaatggaagagaagcttgtctgcaagattctgccaggtggaaagttgatgctgactcacaagaatgttgtttttgatgatgctgtaagcattaagatggaaacaactttggtgggcaacaagttgattgtcacagagaatgctgactatggagtgtctggcaactatggctactatactctgaatactacagtaggtacgctgaaagatggtaactatacgattgttgtcatgcgcaaccagaatgtgagagcagagttccagatgtcttacgattcatctaaggccaagaaccaataattgtatttccgacgaccagtttaaattttattatataataagttagtaaagttactacaaaactaatatttttctaaaaaagttattctatttcattttttacatcagtatttacccacgatacggaatcttagaactcacaacatctattttgtttatgtcataaccattgatttgtagaaagtggtatatggactgcactgtaagcattttattgttagttggacctacaacaatctttttaagagcctccttaggtactcgtatttcaacataaggagtaatatacccattgcgaacacgatactttatttttgaagcatcatcacagtgtacaacccctcttgtttcttgttcatgcttgtatgcatcattctttgcacctaaacatgttgaaagaattatctttcagtttgtcacgacacaagcgtagcataccctcctgttgtgcgaagagtatctatcacttgttgtgtctgtgtatatttctgctgcctcataatcgtctttacttcaataaatttctgcctccagtatcttcgaggattttcatttgttggatagcaatctgattcagtttgatgagccgttcagattgtgccataccatcgttaataaacacagcatttagattctccatgttcgataagcagattagctcatttatattggcataatcacgaatgttacctttcttatcgggattctgttcacgccattgccttgccgtcataccaaacatagctatgttgagaacatcggcttcatcggcatacttcatagctgcttgttcacgtgtcacctcgtttggaataagattttccttgattgcatctgtgtgaatacgatagtttatctttgacagttcacgtttagcagaccatgacaattgtttctgctcatcagctttaagacgttgatactcttttaccaacaaaagttggaatcgaggactaatccacattccaaagtggtacgcaatgtctcgatgagcataagttccaccatatcggccagcttttgccatgatgcctattgcacctgttctttgaatccatgcctttacagaaagtacgaagttgttgcttcctgctgcatttttaattgtatcgaattcggtacaattaaaattcggattatatagcatttcccattcaccgagatattctattgtacttttaaggctcatccatctgaaaattatgtgttcctgcatttggctatgtgccatatctgtcaaagagatataatcctcgttttgcacactaacaacagatatttctgtattttcaacttttatcttagccataatccttagtctttagttaacacaaatttgtggttgcatatactttccgcaaggaacattaaacaaacctttcttgtttacacgatacaatccattgaagcaggtacggtttaggaagaagaactttgctgtattctctatcgggtcaaggttcttctcattgtagcgttggcgtactgccataaacatctcacgtttcgcttccatatcttgcaaagcgtaatattgggcttgaatatcctgcaatgcaggaatcaactcttccacattgtcacgtacagttctataacatgtaaccaaatcgctgttgatatcgttgatcacagcacgtttgatatttggatgctgttgcagcatgtagaacaacatagccccaccaccaacgaatggctctatgtatgtcgcatcatcccaattatcaaagtcagctgggagttttgcttccagttttatgcgatttatgtctttcatcgtttatctttattattgcgttcagcgcaaagataatggaatatatttgaaatcaggttatttttgttgcacttttattattatttagcatatcagtcggaggaaaataaaaattaaattatatctttgcatcgagaaataaagtgttgtttgacaagcatacttatgcacattgcagaaaatagcactgttgccaaatcattacctccattgaggtgaaacactcataaatcgctcattttaagctattcagcagattttagcgtaattttatcagaaaagtactgatgttgcaatgccatatcttttcaattatcctatggatacatcagtttctggtagtcccgtaacggcctctttaaaagatatatttggtgaggattggattaatggtctttgtgaaacctatacattagcagagagtaaaactcgcttggatgtagttaatgatatttggcatgctttatctttctacacggataatgcaaagcttgctgagtttgccaaaaatcgtcttcaattgaatgatgatgaagcaaagaaattttgtgatatttctttgccaggtgactatgccgcattaagtttaaaagctatctgtaagattctgccttatcttagaagaggtttgatttattctcatgccgtattcttgggtaatttatgtgaagtgatgccgcaatacgaatggaatatagaggaaatgcgtaatgctgccattgataatattatccatgaaatgaatcagatagattctaaagatgcacgtactttcgaggtgtgtattaaagaatatctgaaggaacagtatcatgtatctgatgagaaactcaagaaactataccatccttctatgatggagatgtatcctaaagtacaacgcaccaataatcttggtgtctatcagcttggttcacctcgaattgatagtgtgcgtaatccaatggctatgcgttctatgttcagattgcgtaaattggtaaaccgcttattggaggaaggtaagatagatcaagatacagaaattcatattgagtttgctcgtgaattgaatgatgctaataaacgtaatgctattgcagcatacacaaaagagaatcaaaacaagaatgatgaggctcgcaagaaaattaagtctctctttaaagacgaaactggtaaggacattgaaccatcggatatagatgttctgaaatatgtcctttgggaagagcagaagcacatatgtttatacactggtaagcaaatctgtatatcagactttattggatcaaatcctaagtttgatattgagcataccattccacgtagtgtaggtggtgatagtactaagatgaatttgactctctgtgacagtcatttcaatagagacatcaagaaaaccaaattacctacagagttgtctaatcatgatgagattatggctcgtattaatgattggaaagaaaagtatgagtctcttgatggtcaaattcgtagacaaaagaagttgtccaagggcgcttcaagcaaagagcaaaaggatggcattattcgcaagcgccatctattagaacttcagcgtgattattggcgtggtaaatatttgcgtttcacgatggaaagtgtaccagaaggatttagccgtcgacaaggaacagacatcagtgtgatttcaaagtatgcacgtctttatttgaagtccctcttcaagcatgtctatacagtaaagggtattgctacttctgatttcagaaagatatggggtattcagagtatttatagtaagaaagagcgtatcaatcatgtccatcattgtatagatgctattgttattgcttgtatcggcttagatgaatataataagttaggggcatattatcatgatgaagaaaatcatgaatggtatggtaagtctaaggcctatttaaaaaagccttggtctacatttgttgaggatattgaaagggtgcaagatgagattttggtttatcattatactccagacaatatgccaaagcaaggacgccgcagaattcttcttgatgtagagattaatggacgaaagaagaagaaaaaagttctttgtaagggtgatgcagcaagaggttcgttgcataacgatacatactatggtgctatagaagacgatggtgtagtaaaatacgttaagcgtattaatttgtctacaatgaaagaaagcgatgtaaaaaatattgtggatgagactgtaagaggtattattgaggcggccattaaagaaaaagggtttaaagaagctatggctggaacaatatggatgaatgaagaaaagcagattcctattaaaaaagtaagatgctatacaccttctgtcacaaagcctttgaatattcgtaagcagcgtgatgtttcaccaaaagaatacaagcagcaatatcatgttgtcaatgatagtaactatatgcttgcattatatattggtaaagacaaaaaaggcaaggaaaagcgtgaatttgaaattgtcaatatgttgcaaactgcacaatacttcagaacaagtaatgataaagaagctgcaggaggaaatatagtgccggtaaagagtgaacatgattacccatttgcatattctttaaagatcggcacaatggtacttctttacgaaaaatctccagatgagatatgggatgcttctctaacggagattaataaacgtctctataaagttgtgggattatctgcaatgagaatgaaaggacgaaatgttgattatgctacaataaagttgaaacagcatgaggatgctcgtctcagtacagaacttaaagcgaagaatggggcatttaagcaaggagaagaattgcgcccttcaataattatgctccatactcaactcaatgctttagttcaaggttatgattttgagataaatgaattaggtgaaattaaaagattaaagtgaaatgataaagcagacattattcttttcaactccagtttgtctttcactcaagaattgccagattgtaatctcttggaaagatagcaatgacaaggtaacacgccctatagaagacatagggtgtgtagtcttggaaaatcaaatgataaacattaccttgccgcttctcaacgaattggtaaagaataatgtcgccgttatcttatgtgacagcaagatgatgccaacatctatgttgcaaaacttagatgctaatacaacgcaagctgaaagtttaaaatttcagcttgctgttactgacccaatgaaaaagcaagtttggaaacaaataatagaatcaaagataaaaaatcaagctgctgtcttagctcttgccggaaagaataaagatattctcaagccttattataataatgtaaagagtggagattctgacaatagagagggattggctgccaagatatattggaatagtcttttgggtaactcctttaaaagagaaagagaaggctgttctccaaattctcttttaaattatggttattccatattgcgtgcagctgtagcccgtgctttacttgggtctgggttgcttcccaatttaggtatcttccataaaagcagatataatgcttttcccttagctgatgatgttatggagccatatcgaccatttgttgatgaaatcgtatatcgactttatgaaaatggaattacagaactgaataaagaatctaagtcagaaataatgcgtgtattgaattgcgatgtcaatatagggaaagttaagcgacctttgcagatagctttaaccatgacaacagcctctcttgtgaaatattatacaggagaaatcaagaaactttctttaccgttgataacatgacagaatatagacttaatgcttatcatattatgtggttgtttgtattttttgacttacctgttaccacgaaaaaagagataaaagcagcaactctttttcgaaagaatttggagaaagatggtttctctatgatgcaattttctgtttatattcgtcattgtgcttcaagagaaagtttggaagtacatattaaaagaataaaatccattcttccggaatcgggaaaagtaagtttattaagtgtaacagataaacaatatggtgatatttttaatttttgggggaagcctaaaagtataaataaaagtaaaattacccaaaaagttataggtgaacccattcagttggagattttttagtatttttgtattgttttacttcctactttgctatttcttattaatgaaagtgatagtaatatgctgattatcagctatatcaacattataggttgtggtttgatgtaggaatagtacgatatacaactatctgtttgcatggtttttctctaaagagttgtggtttgatgtaggaatagtacgatatacaacattaaatcgtttcgccaaggtggagtacagttgtggtttgatgtaggaatagtacgatatacaacaataaccgagataatggttaaagtagaaagttgtggtttgatgtaggaatagtacgatatacaacagcctttaattccgtctggaggttcgatggttgtggtttgatgtaggaatagtacgatatacaactttcccttaaacttacccgtctctatttccgttgtggtttgatgtaggaatagtacgatatacaacttctgtttcttttgtcattcttgccatgagttgtggtttgatgtaggaatagtacgatatacaacaatttaggatggagttataatgttgacgatgttgtggtttgatgtaggaatagtacgatatacaacaggttttcggatctacagcatgtacttatcgttgtggtttgatgtaggaatagtacgatatacaacagaaccatcaacctgtaaatgatgagaaggttgtggtttgatgtaggaatagtacgatatacaacggataagaattagcgtcgcattgattagagttgtggtttgatgtaggaatagtacgatatacaacgcctcaaaccctgaaggttttactgttaagttgtggtttgatgtaggaatagtacgatatacaacgctcaggcagcggtatggtattatagcgagttgtggtttgatgtaggaatagtacgatatacaacgccacggaacggctaaggcgcacgtattgagttgtggtttgatgtaggaacagtacgatatacaaccaacggcgatgaagaaccgcctctcacagagttgtggtttgatgtaggaatagtacgatatacaacttatattacagaacaccagaatgtaagaaagttgtggtttgatgtaggaatagtacgatatacaacttgagtaaacgttagaatcagatggcaaagttgtggtttgatgtaggaatagtacgatatacaacttgcggaaaatcagaaggagtgttaaggtagttgtggtttgatgtaggaatagtacgatatacaacatgtatataatctgccattgttacaggaggttgtggtttgatgtaggaatagtacgatatacaactatcccaaagatttcaagtggactggatgggttgtggtttgatgtaggacatgaagataaaaatcaacaggtcatagaacatgatcaagttgatgttataaacaatatagaacctctcattaaagtaataagagggcatcaagtatgcttgaccgtgaccttgcaagattatatggggtagaaacaggacagttgaatagacaagtgaagcgtggctacaaacgatgactaaagcctccttgtaaccacgcttttatattctctatatcaaacaaggaacgtacccttgtttatttattccccaccccctttatcaaaatagggatctaattccttcttcacatcgaagcaaggacaggctttggcgaatctgtccctcgccaccaatattacttgaaagcgcaccattcgccagcatcatgcatttctatattcgtaaagagatccaccacatcacccaagcggcgcttatccagctcctaacgggcgaaattcttaggtaaaaatcccttccgtctttcgttttcacgctcgatggcagtcagcgcatcatctattgccattttctatctatttatattataataaggtgatatagtatctatttgaaagctaaaaaattcctgtcttcgcgctaaaaacacgcactgaaaagccctttttagtgattttttcttcatttccctgcatttgctccacagaaaatgaagaaatctgaaaacacgaaaagggcgaataccaacgcctgaaacacgctgatattcgcccttcgatatacacataatcctggagagtatttttgacggttcaaacaccatcacaattaatgcactgacgacttattataatgaatttccgtggtggctgagccaatacaacgaccggaaatctcctgactaccgtatcaaggatatggtatggacacctgcacttccttttaccaactatacatttctgcccgaatggcgcaacgagccattcaaatacaagctggatggtgaacggacaaacaagttccgccgcttgataaccagccctttcatcaatgaggaagtcaacctgctgaccgaagagctgctgaataagagcactatcggacaagatgacgtgcccgacctattatcgctgacttactacgcaggaaattataaccaccgaagtacgcaggaatgtgccatggaaatgcaagacacctacgtgcgactggaccgtagtatagcttccttattagagctcatagaacgtaaagttgggctccacaacgtacttttctgcatcacctccaccggctatgccgacccggaagcagccgacccgggcgtataccggataccgggtggtgaattctacctgaaccgctgtgccgccctgctaaacatgtacctcatggcatcctatggcgagggacaatatgtggaagcttattatgaccaacaaatctatctcaaccataaacttattgagaacaagcagttgagcctgactgaaattcaagaaaaatctgccgaatttctggttcagtttagtggcgtgagcgaagtatattcagctcatcgcctgcttttgggcccctggtcaccgcaaatagaacgtatacgcaatagttttcatcgcaagcgctctggcgatttgctcattgaaatactcccgggctggactatcatgcaggaaaatagtactgataaccgtgtagtacgtacggccgatattcctgctcccctcattttattgggaggaggaatgaaggctgaaaccatccgtacccccatcagtattgaccgcattgcccctaccttggcaagtgtaatgcgcatccgcgcccctaatgcaagtacagcatctccccttgacttttgattctaaaataatctgtgcaaatctggataatctgtatagaaatcagtaactttgcacgctcaactaactcagcaataataataaaaacaaatatataatgggatttaatgaatttttaagctcgattttcggcaacaaatccacacgcgacatgaaagaaatacaaccgtgggtggagaaaatcaaagccgcttacccggaagtagccaaactcgacaacgacgccctacgcgccaagacagaagaactgaaagcctacatccacgattcggcagccgaacaacgcgccaaagtggaagaactgaaagccagcgttgaagataccgaactggaaaaacgcgaagacctcttcaaccaaatcgacaaaatcgagaaagagatattggagatttatgaaaaagcgctggacgaagtattacccaccgctttctctattgtaaaggaaacagccaaacgattctctgaaaatgaagaaatagtggttacagctaccgattttgaccgccaactggctgccactaaagactttgtacgcatcgaaggcgataaagccatctaccagaaccattggatagcaggtggtaacgatactgtatggaacatggtacattatgatgtacagctattcggtggtgtggttctacataaaggtaagattgccgaaatggcaaccggtgaaggtaagacattggtagctaccctaccggtattcctcaatgccctgactggtaacggcgtgcacgtggtaacagtgaacgactatctggcaaaacgtgactccgaatggatgggtcctctttacatgttccacggtttgagtgtagattgcatcgacaagcaccagcccaactctgatgcccgtcgcaaagcttatctggcagatatcacgttcggtacaaacaatgaattcggtttcgactacctgcgtgacaacatggctatcagcccgaaagaccttgtacaacgtcagcacaattatgccatcgtcgatgaggtcgactcggtattaattgacgacgcacgtactccgttgattatctccggtcctgtacccaaaggcgatgaccagttgttcgagcaactccgtccgttagtagaacgtctggtagaagcacagaaagtattggcaaccaagtacttgtctgaagcaaaaaaactgatcgcatccaacgataagaaagaggtggaagaaggattcctcgctttataccgcagccacaaggcattgccgaaaaacaaggctttgattaagttccttagtgaacaggggatggtggatttaatggtaaaggagtcaggtaaaaaccgatcagatagccgatcagcccaacgaagccgacaataatcaagcgcacatagttgtattgtttgatgtgcatccaccaataagagaatacgcagccgattactataccgataatagcaaaccacgccaattgcacgcttaccagctcctcatacttcatcacttcctcataaaaaacttcttccaatacatgctcggttgccagaaatgcttccactagtgtgattagtcccaataaaggtaagaggtagcggtaactccacattttaggctctaagaacgggtgacggatagtcagcatgcgccagatgcaaaaaaacagggttatcaggataactaccgacaactgacggataaccggactgttccaccagtcataccagtcaccgtagttgaagaggaaagctatctcggccagcaatgccgcccataacgctgcccccagccagtcaatgccgaacaacggaaacttgcgcataaaccggaaatgctttacgcaaatggtctgtatcaacaggactattatcatcaatcctgcaatgaaaagattcatatatgtccagtgataatgatacatcagataagtcgttatcaggtcggacaactggatgcttcccaagacgacgatgtgaagccagtggtgaaggaaatcgtaaaactctttaaataataaacaacaat

SEQ ID NO: 4235 - DNA, 12083 bp, synthetic construct
  source 1..12083: mol_type = other DNA
  misc_feature 1..12083: note = Synthetic
cccttaatctctatgttcacccaaacatggagcagaagaaaaagtgcatcaccaagatgttcaagtctttgggaaaataagacattatacctatatgagcaagagagtatgtaataaacacacactctcttgcattattatctactacggaattttctttttatgacagttggtcgcatcattgcagctgctacggcaatgcgcctgcgccaccaatgatcatcatcttcacccttgttacgtcctcagccagagccaggcgagccgcccctcgcttacggcctttccgcccatcccatgaaatggacccccagtcggccggtagacttcaattcttgttggcgtttgtttcgtgccagagaccgaaagaaaccctaacaacctaccgttttccctattttggtctaacggccgacagggagtttactattggacattcggattgtgcaccacgtattttatgaagcttcgcggcacatacacattgccgaaggcgtaggcttggcggaagagcggagctatctgggagacaccgtacctgccattgtctgttcccacggcggtgagcatgaatcggttctgtgggtggaacaccacatattctgtaaaccgctcaacagctttcctcacgtcctcaaacgagttgccgactgtcgggatggcgtagctctgtccctggatgccctccgcctggccaaaccgcgctccgaagtgttgcagggcataggcagcggcgccatccttgtgggcaccctccacgttgctgccaaagacgaagatctcgttctcgttgagcgatgcaatgttgtcgggagcaatccgcaggtcttttacgaaatagcccgcgttcatggcgcctctcatttggtcgcgttcttcttggctcaacccttgatagaacttagacatttccatgtagcgcatcttctcgttgtaggctcttcggcttcttttctcacactcaaacatgtcgtccatgcccgcctccgtctgctcaaacttcataaagctctcgatgccaaggctgcttgccacgttcttaacatcaatgttggcaccgatgaatgtgaacacccatcctttctttttcaacatggcgatgagctccttgacaagcggaagcgtccacttgcgtgatgcgttctcataaccgtcggtgatgatggttacgttgcccttggcctcttgctgatcgatcttgcggaacaactgccaaaccgtatctccgacggcatcgtaaagaggtgtgcatgcgtttgggcaataatcgtccatggtcatgttcctgacctgctcaatcggggtgtcgtggaagatgtaacgggagcgcgacgtgtcgaagcagaacaccgatacgaactgtcggacgcctggttgctctttctgaatgttgcgtatgccggcaagcgtttcgttgcatccggaaattgtggctcccctaaccaccgacatcgatccgctctcgtctaagatgatgaggttgtaggcggccgacgtgccgttgttgtcatgggtgttgttggccgagccattctgggaggcagccttcttaacggtcttcggctccacctgtttatctgagtggcacgtgctgccagtgtttagcaggcttttgatgaaagatatgaatgtcataatctgaaaaaattagatgttttgttttacttagcgaacttatagatgcgaatcacggtgctctcgctcccttgtgtggggcctacctctatgccatacgaatggccattgtgtttcagggcgtaatagcgtttggtgcccaccgccttctgatagtaaggcgacagttgctggtataagtcctggatgcaggttcttggataagcctggtggtggaatatccagaagccagcaaacttgtttctgcctgcgtaaggatcgaacaacacggtgtttacgcccaatcccttgttgttgtaaaggtagaagtcgagattcgagttggtgtagacatacgaactgccggagagctgctcgtcggggtggtagtggtagcggctcattgttgccttgaatgtcgccacgtccatattgacaatcgaaaggaggttgcctaccgtagggaacgatgacctgataggagcaatcgtcgctgatcctcatggtagctgtttcaagactttcttgcgctttgcctgccagtggaagcaggcacatgcagaaaatgaatgtgataatctttttcatattcgttgaatttgttaagttgctctttgggcgctgagcgttgccgctcggggcttttcagaccttttatgaaaaaaaacggtagaagttaacaacttgtgggaataaaaatgtaattttggcccgttgtcccattatgtaaacaaggtgctatgttgtcacagtctgacggccaataccgcgtgggcagaaaacgtacgcaagcttatgaatgccgacaggcgccttgtcagacaaaacatggttgtagaaaagacaaaacaatgatcgtacagatgccgatatacagcgaacagctgctcagcgagtttgcccagaaggaatggggtaaggcaaaagcctatctcacgaagcatttcacatccttctcagaaatggaatgtgaggacatattccaagaatcctttgtcgttcttttccaaaacaacagaaaagggaagttggataatttgtcttgttctctgtcgacgtatttcatgtcgatttgccgcaacaaggcgctcgagctgcaacgcgcaaaatcgcatagcctgaatgtgggcacagattcggaactcgacatgctcgacgaaataaaagacgacaagttggacagcctgattgcgatggattctgaaacctccttggtcgagtcgaaggaagccattgccaggcagatcgttcgcgatttaccccaaccttgcgatgatttgttgtggggattcttccgcgacaactattccttgaagacacttgccgacattttgggcaagacggttggctatgtaaaagtcaccaaacatcgttgtcaggagaagttcaggaagcattggaacgacttggcaaagaatctcttctaaaaccctttaacaaccaattgtcatgagtgagaattatcagatagttaccgacaaagagctgcacgacgatgagcgcatatccgcttatctgcgtgaccgtatgccagaggaagaagaagtgacattcatggaggaactcaatagcgacagcgagctgcgctcaaaagccatatcaacggctcatcttgccaaggccatgaagaaaattggagaagaaaatgacgaaaaagtaaaagaagctcttctgtcgatcaatttggcttcggcaagacatatcgcatccaaaaccacctgggccatcatgccggaagcctgcgattatgccatcacgcccaaagatatggaggagtcatcaacttcttcaaccacctcggagacgtcttcaaccacctcggagacatccggtaagcggagacgcatcttgaaggttatttccattgcggcttgcttcttggtgttgtttggcgtgggcttcaaatattacgagtatcgccatgtggcgaagctcggagaggaatatggttccgtctttgtcagcgagcaggctccttcacgtggcatggtcggtgccgatgtggcgaaggacctccaagccctttatgcgaatgtgcaagagggcaaagacttggacaagaccaccaggcggctgtcggtgctttgggagctgtcggtcatgaagacctataacgactacaccaacgaagcgccttacataggttggaaccttgccatcgcctatctgaaagacaacaacaaggaagaggcaaagacggtgttggcaaagcttctacaaacaacggagagcggtagtgctgtgaacggtaaggccaaggaattgttggaaaagctcaaatgagatcacgcggattaggaatttctctctctgtaacttgcaagttggattaccaaggctttatttattattcttctcttgcactgaatacaggatggtataatagcgagatgtactacaacagaggaagagcatttgaggaacttcatgattacaaacaggccaagaggcaatacaaaatagctcttggctacggctactattctgcgcaatcggcattgaaacttgtcaaggctcataagaaagagtggaagtctcaaaagtaaaaagctacgtttggaatgcgatcggaccaagaaaccttctgttgttgtttagcataacactaatcagcagcagaatctttcttaggagtttgtaatgccagccacaccgtcattcgttgttctttctgacgaaagcggcagagccgagcgaccgcgtctgagcgtgaatttcacaccccgaatggcatctgtgtcgatttgcgatccgtgggagaaatattctcgtgccgcatggcaactcaacatctcacataccacataccacatttaacattcaacattctcaacatccctcccccaaatctacacggtttttctcatcgcgccccgacctgcgttcaaatacgccattcttgcgtgtttttcacaaccgcctaacagccaaccacttatcttccgaacagcccattcggccttcccccacacggctttccccaccacgaaacgccatctttcgacccacgattcctgccctttcgaggctccatcccttacctttcgcatctcgatccctaagctatcgcaacccgatacatgcccaacgccccagtcacggctccccatccgtcatcccaaacgcccaaaaccgccttcccgccctctgtttcacccaaaatcccgacacaagatttgcaccaaaaatttttattttgggtaatcgcattcccccccccccttgccttgcgaaagatcccagcccatccgtcgcgcaccagcgcaccgaaaaccaatgcagcagcaggacgcggagcaagcgtgacttccgccttgtcctactttaaaggtttacctcatccatcgcgcccatccagtcaatgtggagcccattgtggaatggcatttgtttaaccctccaatccgcaacctaaaggaactggtgggattttgctcgctaagcgatgatttctaagtgatatttcttcttcaaatgccactcattgccgatagctatattatggtgtgtggtcaccagaagaacaacgacctacacgcgtacttatggagataagagcttatctcatgatagggcataaaaaaactcccaccgaagcgggagtataggttttacaccttcggcattactgccttattgtgataagatgtaggaaatcttattcttggatgcaaatatagttagaataatttgcttttccaaattaaaaacgatatttttacagagttttttgaaaccaattgcaaatatcgaattatgacaaagatactgggcattgacacaggcaccaatagtctgggttgggccatcatcaacaaggatgctgaaggcaagcatctgttggaaaaaggtgtaaacatcttccaggaaggtgtgaaagtagagaaaggtgttgaatcgtcgaaggctgcggaacgtacggagcatcgctctacccgagtaagatactaccgcataaagctacgcaagatacgactgcttcgcattttgagtgacaatcatctgtgcccgcctcttacaaaggaagagctggcggcatggcgattgaagaagatctaccctaaaaccgaactgttcatgcaatggcagcgcaccgacgacaatgcgggcaagaatccttatgcctgcaggcatcgttgtttgcatgagaagctcaacatggatattcttacagaccgttatgtcttaggacgggccttttaccacatcattcagcgtcgaggtttcttgagcaaccgtaaggagcaaggtggcgacgactcgggaacagtgaaggaaggcattagccaactcacacaagagatgaacgcagcgggatatgaatatcttggcgattattttcatgccctatataataaaggagagaagatacgcaaacattatacagcccgcaacgagcattatcttgctgagtttagggccatttgtgaaaagcaggagttagaccaagacctggcccaaaagatagaaaaggccatcttcgatcagcgtcctctgaaatcgcagaaaggccaagtaggcaagtgtgtgtttgagcgaaacaagacacgttgcccagcatcacatccgctctatgaggagtttaggatgctggcctttattaacaacatcaaaataaagacccccaacgattttgagttgcgaccgctaaatgccgaggagcgtgaaaagattttgccattgttcttcagaaaatccaagaaacaattcgtcttcgaggacatcgccaaaaagcttgcgcctaaaaagcattatggtttctataagaagagcggcgatagtggcatgccctacctcttcaattatccaatggacacccccgtctcaggaagccccgtaacagcagcgttaagagacctttttggcgatgattgggtgaacgccctttgcgaagtctacacgcttggcgagggcaagagccgaatcgatatagtcaacgacatttggcacgtcttgttcttctattccgacaacgttaagttggcgcaatttgccaaggaccgcctgcaactcaccgaacatgaggcacaagtgtttagcgaaatatctctgccttccgattatgcgtcgttgagtttgaaagccatacgcaagattcttccttacctaaggagaggacttatttactcgcacgctgtgttcttggccaacctttgcgaggttatgcctccctatgaatggggcaatgaaggtatgcgcgaagccgctatcggcaacattattcgtgagatggggcgatacgatgcgcgcgacgagcgaactttcgaagtatgcatcaaggattacatcaaggagcaataccacgtttccgacgaagcattgaagaaactctatcatccatccatgatggagatctatccgcgcgttcggcctaacgacaagggcgaataccgtcttggctcaccaagaatagatagtgtgcgaaatcctatggccatgcgcgctatgttccgactgcgcaaattggtaaaccgcttacttgaagagagaaaaattgatgccgacacagagatacatattgagtttgcgcgcgaattgaacgatgccaatatgcgaaaagcgttggctaacaatgccctcaacaatcagaaggataacgagcgtgcacggaaaaacatcatcgaactctacaaagaggaaacaggaaagaccatagaacccaccgaccgcgacatcctgaagtatgtgctttgggaggagcagcagcacatttgcctctacacaggcaagcaaatcagaatagctgactttgtgggcgacaatcctgctttcgacatagaacacaccattccaagaagtgtgggaggcgatagcacccggatgaacctgactttgtgtgatagtaccttcaaccgcgaggtgaagaagactaagttgccaaccgaattggccaaccatgacgacatcatggctcgcatcgctacgtggagcgatgaatgcgagaaactggacaaacaaatccgtaagcagaagggactgtcaaaaggagcaacgactaaagagcagaaagatggcattatcgaaaagcgacacgaacttgagttgaaacgcaactattggcgtggtaaatacgagcgcttcactatgacaagcgtgcccgaaggatttagccgtaggcagggcacagacattagtgtcatttcgaagtatgcccgcctgtacctcaagtcgctcttcaagcatgtctacaccgtgaaaggcattgccacttccgactttaggaagatatggggcatacaggaactgtatagtaagaaagaacgtgtgaaccatgttcaccattgcatcgacgccattgtcattgcttgcatcggacttgatgagtacaaccagttgggagcctattaccacgacgaagagaaccaccagtggtatggtgcgtcaaaggcctcgttccaaaagccatggccaacattcgtggaggacatcaagaaagtgcaagacgagattcttgtgttccaccatacgcccgataacatgcccaagcagggccgccgccgtatcaaaatagatggaaagaaggtgctctgcaaaggcgatgccgcaagaggatcgttgcataaggacacatactatggagccattgagagagagggggaggtgaagtatgtgacccgcatagcactcgaaaacctcgatgagaaaggcgtagacaacattgtggacgatagcgtcaaggccattattaagaaggctatagccgctcaggggttcaaagccgccatggcttcaaccatctggatgaacgaggagaagcgtattcctattaagaaggtgagatgcttcacggccgtcaaaaaacctcttaacatccgaacccaacgcgataagtcgacaaaggagtacaagcagcagtttcatgtggctaacgacgacaattacatgctggctctttacattggccaagacaagaacaaacgagagaaacgcgagtttgagctggtcaacaggttggaggccgccagatatttcagaacaagcaacgacaaggtgtcggtgggacacaacatcgtgcccatcaagagcgcacacgactatccgctggcttatacgctaaagataggaacgatggtgctgctctatgagaagacacccgaagaagtgtgggaggcgaccaagacggaactaagccggcgcttgtataaggtgattggcatgtcgtccatggcagttgaaggaagttcttatggtaagataactttgcgatttcatgaggaagccagacaaagcaaagatgtaaaggcaaagaatggcgcgtacaaacaaggtgaggaccttcgccccgctatagttatgcttcatactcctacacaatttaaggccctcgttcaaggctacgactttgaaatcaacgaattaggtgaaatcaaacgattgagatagtatgattaagcagacattgttcttcactacgcccgttagtctctcgcttaaaaactgccaactggtagtggcgtggaaagatcgcgaggatacggtaacccgtcccatagaggatttgggatgcgtcgttctggaaaaccagcagattcacgttaccttgcccttgcttaacgagttggtgaagaacaatgtcgccgtcattctgtgcgacaacaaactgatgcccacggccatgctacaaagcttagacgccaacacgacgcaagccgaaagcctgaagtttcagttggccgtgagtgagcccatgcgaaaacaggcatggcgacaagttatcgaggccaagatcaaaaatcaagcagctatgctcaataaggcaggtaaggatggcagcgtgctacgtcccttctaccaaaatgtgaagagtggcgatgctgacaatcgggagggattggccgcacgagtctattggagtacgctctttgggcaaggctacaaacgtgagcgagaaggtgcatcgcccaatgacatgctcaactatggttatgccattctacgagcagcaaccgctcgcgctttgctcggttcgggcctactgcccaacctgggcatcttccacaaaagtcgctacaatgcatttccgttggccgacgacataatggaaccttatcggccatacgtcgatgagatcgtctatgaactctgcgaaaaaggtgccgtggaattgaacaaggatacaaaggccgaattgttgcggttgttgagatgcgacgtgcacatagggaaagtgatgcgtccgctacaaatagctttaacattcactaccgcttcactcgtaaggtattatgctggagaaacgaagaaaatatctctgccctgtatgatatgaccgaacttcgacttaacgcttatcacatcatgtggttgttcgtatttttcgacctgcctgtcaccacgaaaaaggaaatgaaagcagcttccctttttcgtaagaacctggagaaagacgggttctctatgatgcagttttcggtgtacatacgtcattgtgcttccaaagagagcatggacgttcatgtgaaacgagtgaaggcgttgcttcccgagtcgggaaaggttagcatactttgtgtcaccgacaagcaatttggaaacatttataatttctggggtaagccaaaaagcatgagtaatagcaaaattgagaaaaaatacattagtgaacctatccaattagagattttttagtatttttgtcgcggaatcatcgtcctacacgccatttcttattagtaagtgtgaacgctaaaagctgattatcagccaattcaccgcgataggttgtggtttgatgtaggaatcaagagataaacaacgcagggtgtgagaatagcgaacaatcaaatgttgtggtttgatgtaggaatcaagagataaacaaccaggcgacgacctgattacagccatcgatagttgtggtttgatgtaggaatcaagagataaacaactgcaaccgtcaaaaggacaatcaaggacaagttgtggtttgatgtaggaatcaagagataaacaactaaaaataaatctatcaaggacaatcaaggttgtggtttgatgtaggaatcaagagataaacaaccaagtacgagaacgttcagcagccttgcatgttgtggtttgatgtaggaatcaagagataaacaacacggtctttatcaatattggaataacgcatgttgtggtttgatgtaggaatcaagagataaacaacgtttgagataggttataagtttttgagcggttgtggtttgatgtaggaatcaagagataaacaacacttaaatagtgattactgcacctaccttgttgtggtttgatgtaggaatcaagagataaacaacaaggtgttaccgagggactggatatattgggttgtggtttgatgtaggaatcaagagataaacaacgccaactgtgaaaagtttgtacatttgggagttgtggtttgatgtaggaatcaagagataaacaacaggaacgttacccatagcgatgttgtcaggttgtggtttgatgtaggaatcaagagataaacaactagctcctgtttctatttctgccaatggtgttgtggtttgatgtaggaatcaagagataaacaacaagctcctacaaaatctacgtgcggttggagttgtggtttgatgtaggaatcaagagataaacaacactatactattatcgctattccatggaagcgttgtggtttgatgtaggaatcaagagataaacaacgggttttaatagaaaatattagattgcgtgttgtggtttgatgtaggaatcaagagataaacaacccctaaagagggaaatgaacaaagccggcgttgtggtttgatgtaggaatcaagagataaacaaccaccaatgttgacgaggcgacaaacacttggttgtggtttgatgtaggaatcaagagataaacaactgaatagcagcaccaatggcagcaggaagttgtggtttgatgtaggaatcaagagataaacaaccggatatagaaacaggagcaagccacttatgttgtggtttgatgtaggaatcaagagataaacaacaggagttggtaaacaaaaacgtaggttttgttgtggtttgatgtaggaatcaagagataaacaacatggcaatagacgaattaaccgcttcacaggttgtggtttgatgtaggaatcaagagataaacaacaaaaattacttatagtgtgatctcctgcagttgtggtttgatgtaggaatcaagagataaacaactgttaagcaggttaatcgtttggccgtggatacaatgcattcaaggaacttttcaaaatacatcagcaagaatcgttctttgttgtgcgagccaagtaggatctgcaatacaaatgctgtaaatggaggcgcaggttgccaaagaacattttgacagatgctgtgattgaattcactgaatacaattcatgccggaagtatcctgagaaactcagactctaagcatttctcttatggataagacaccactcgttgatctcttcgaaaggact

SEQ ID NO: 4236 - DNA, 11604 bp, synthetic construct
  source 1..11604: mol_type = other DNA
  misc_feature 1..11604: note = Synthetic
tctatgaaaacgttgtcattttacagaaagtgcttatattccaccaaaacatatcaattttatatcgtttagaaatggaagaagacacttgccaagacggttcttccccgcaactggtattccttgctcatgcgagtaagccccgaatagatggtgtaaccatacgtgcgatgattgaagagattgagagcggagaggctcaactctaccccacccttgagactatagctcgtcgaggcatccgccaagtagaggttcttatgctgatggtcggacacctggttgctgtaatgttcgccttgcaacttgatgaaccaggacttgagaggttggaaattgcaggtgagatgctgggcaagactggtggacgatgaattcaaggagagacctttcaaggtcatcacatccttgttccaactcaattcataagtgaagttgaaccaatccacaggtcttccgctccacttggctgacaacatataattctcagacgaataagcagacagggattcattctggcgcagagtgccgtcaaacttcagataatccaagccaaggcttaccaagccgtgcatgaacccaagtcccttgctcaccttagccccagccatcaagttctccgacttactcttgtcggcatagtaggagttgatgatgtaatcgcccacaaagtcacgagccgtagtgaggtgactgtctgcccaagacttacggacgtatgcgttggcaaagagggtcatcaacggacgcttgtaattcaaactaaaagaaacgttcttgttcttgtcggcggtataatccacgaatcccgtatagagattgcgataatcacgcaagataagcccttggtagaagttctgctcattgatttctcgttgtgaaatgccacccgagagtgtggcttgtaagcgagtggagagataataactcacgttcagttgagggcaaacctgtggcttataggcattctgctccttataataataagaggtataagcgacaggcatcacgaaacgaatgtgccaacctccctgattaagctcggcttcaggagaggcataggctcgaacgtaagtcatgcgcacatgattttgcatgggagccacttcctcctccatatcaatcccctccagatggctcttcatcgtgcgagtcaacacttgaagccccactttcatcgtcacggtgaaaggtttgagaaagaaaccgagcgaagtgttcgtatggctaaagaatgctgccgagcgaacactctgacaagcctccgactgactgcgagctaccgacagggagtgcgggttcaccatataggcattgtaagtgctgaaggtataagctcgcttgccactcctctgcaacagttcgaaacggtcagccaccttgtacttcggcatcttggcttgttgaaagtttggataggtgccagcgatgttcatcgtgatgtcgttccacgccaaatcggtggaaaggctattggtgagatacgatttctcgccattcgaagtcagtgtaagattggcattcaacttgttttgcttctgcttggcttgctcgttctcttcgtttacgatcgtggaatcattgagaaaatactgcgtattgctttgagacgacgacaacaagcggtcatgggtatagactacttgcgcagccaagtcggtgttcttgcccaaagcccaaagattgttggtggtcaaggcatgcgtctggttcttgcggacacgactgtcggaaatatccgtcagtctatcgggagttacatccacatagtccttcaaggaatagttatttcccatcacgccaccgcccccatccgagaagaggagatttccctcacgagttacatccataccgatattattactcttgaaggtattgagcgattgtgtcttcttggcaaagcgcatcagagccatctcgccattccaaacatcgagctgggctttgtcattgtcttggttgattccgccacccatcttgacggtacccaccaatcggctcttcgccgactccttcaacttgatgttgatggcagggtcttctgagaacgacatatcctccaaggccttgatgggctgatggttagtcatcacctccaccgtcccgacatccttctggtggatattgttggtggcgatggaatacctacctccgagcatatcatgcccctcgatataaaacttattgattgccttgccattatacttgatttctccattgtcagacacctccatgcctggcatcttcttcaagacatcggcaagactcttgtcgttggcatcggcaaagctagccacattatacgagatggtgtctcctcgctgtcggatgctaggagctttcaccaccacatccttcaacttggtggcttgctcggtcatcaagacatcatatttcgtggtatctttcgacagaggcaaagtctttgtagcgtagcccatcatcgagaaatggagcaagtattgtccgtctggcaatgcactttttccatccaagctcatccccttgccatctgccgtagcatggagcgccaaatgataactgccatcggcttgcgtcttggcaaacttcaggattttgctgcttccaacaggtcgaatcgtcaccatgacacccgacaaagccttacccgaataggcatccaccaccttgcccgacaaaacgacagacgaagaagaggtctgctgagcttgaggagattgcagtacttgggtagtttgttgcgcaacaacttgttgtacgcccaaagataaaaatatcattatcattccccaaaagaggaatttatcattatatcgtctcatctattataaaatatcacattacttctattttattacatgacctccaaaggcttatacttccagccctttcgcttgttggtacctttgccatccgtcggatttgacaagtctatacctgtttccaactgcacctgtgaaaaactatcgctaaagagaaaattgtattgctctttcaagaacttatcgaaagtggtcttctcgaaatgctgcgtgcccacgtatgttttactaaacacaatcggctcttgcgaaacattctcaattcccaccatcttgaaaacatgttggtttcgctcactattcgcttccattaccaagccaggcaagcctcccaatttccaaggaccatcactcacaggaatatccatggcgaaccatgccgtccaccgatgcccacgaaaacagcaagttgccttttggcactcatgtcccaagacggttgtggtactatcctcaatgttccaatcttgtgcattcaaggaatcttgatatatgtaatcttgcagcaagacgccatcggttacagtcatcttgccttcgggatagttcttgtagatgtacgccttcatcttcttatgaggccactccaccttgctattgatggcagcattgatttgctggcgaagtatctcatcacggttaggcgaagcaaagatggaatccacccgcatactataatagctgtagcatttagacactttcttgcctatcagcaatacaagcctatccttgtcaagatgatgcgacaaggtatcatcttcaaacagatagtcgtattggcatttccaataagcttggtctatagttttctgagccttaatgggcattactcccaatagacaaaatactagaaacagaagtcgcaaattattcatgaccggaatttattgatagttagaacttcctgttagtaatccctctccaacaggtcgtaatggcaattcgtagatgcacctaagtctatgcccgtttgcgcctccacaatagaactttgatttctgttatactggataagagacttattgaaatccttacgagttatcttctggagtttcttgaagtctttgtcaatgataccatattctatcggctcatccgttacttgctgcaaaccattgatgcaaaaatattgctggttgccatcatcgtatgcctccatgagcagcccaggtaatccacagagtttccaaggtccatcgctgacaggcacatccgaagcaaaccatgccgtccaatgacgaccacggaaattgcaggttgccttctggcattcatgacccaagacggtcttggtactatcctcgatattccagtcctgcggattcaagtcatcctcatagacataattttggcgcatcatatagtctgtgaccgtcacttttccggcaggatagttcttatagaccacggtgttcatacgcttatgagggaacgcctgacgcaagtctccacccttgaatccgcccttgatggcagaatgtaagagttgagtccactccttctcgccgttaggtgtactaagaagagaatcacactggtaggtgtaatagctgaagcacttggatatttggtgacctatctggagataaagcaagtcctcacgaggtgcatcctcatgtttcaaggtatcaaactcccacttatagtaataggagcacttcatgtaagccttgtctatcacttcctgcttggcaaagagcgataaaggcagaagcatcaaagccagcatcaatacgattttttctttcatatgtatctattatattttttacgcaacgaagatttcataaacgaatacaaaggtacaaagtttccttctaaaaaggaaacttttgcgttattatttccttttcagaaggaaactttctttagttttgatgtgttagattcaaagaataatgacatgaggtataacttctgagtcgtggttatatgccgtgacatccttattctatcacccagtcttcgatattgcccgtggtggaatcgaagttgatgcccaccttggtaataggcaagccactgagggcgaaacgcttgtggtactgtcggagattgatttggttcatcgccacctgcgcactcttgttcagcttcagttccaccaggtaaaggtcggtcttggtctgcaacaccatatccaccctgccctttggcgtatgcacctccacatccaccacgaaggcggtgagaagggtaaagatgatgtagagcatctgctggtaatgcccctcgtagttggtcacgttacaataaggcaccgtgccgaggtaatcctgcaagagatgcaatgctccgtccatgtccctgcgacgtatgagccccgacatacgggctatcgccactccaccacgctcggcatagatgccatccacatagttagggaggaggttctcgaagagccccacacgaatctccttgttcgggatgtcgagcgtatagagctcgatgtctgggtcgtaatccttgatggtgacatagccgctctgatacaggagaggcgtgatggtcttcatcttctccgtaggcgcatcgaaagccgaggcaagggcttctatcggggcgatgttggtaggcaagacatcaaacttgcccaacatattgatgagataggtcggcgtgccagagctaaaccaatacttgccaaactcttgcttagagaaactattgaacaagctatacggattaaacacatcaggcgacttctttgaaaaatgatagccatcgtaatgctccttcagcttggcgatggtcgcctccctgctcagcccttgtgccttagcaagcatatctatgtcttccgacatctgtgtcaacaattcatccttggtgacaccacagattcctgcatattcatcatccattgaaatattggtgatgttattgagctcgctaaagatgctcacttgtgagaacttggtgatacccgtgaggaagcagaaccgaagctttgcctcgctgtatttcaatgggctgaagaaattgcgcatcgtattgcgaagcacatcgagctgttctttctcatgcacgacatcgagcatgggcgcatcatattcgtcgatgagcaccaccacctgcttgccgctcttctggtaagcggtgtctatcaattccgtcaatcggttgttggcatccacttgtggatgttcgataccccattttctttcctcggcttgcaggataaacgcaaggtatctttccaactgttccttctccatatgcttgcctccgctcaggtcgaagtgcagcacaggatattccgtccattccttctccagtttttcgatggcaagtcccttgaatagttccttcctgccctcgaagtaactttgcatagtggttacgagtagcgacttgccgaaacggcgtggccgtcctaagaagcaatacttgctatccgtatgagtcatacggtagatgtattccgtcttgtcgatatagagcttatccttctctatgatttccgagaaggtctgaatgcccaaaggatataattttcgtgccataattgctatttttctgcaaatatacaatttttatttgaaacacaaattaaatcaattaacgataattgtatgtagtataattaagaaagcatttggatggtccttgaaggctttcagcgtatgagaaagacaaaaaactcccaccgaagcgggagcataggtcaaaaaccttcggcccttgcgggccttattgtgataagatgtaggaaatcttattctgtttgcaaaaatacggtaaaatatttgcaattcaaaattatttgccgtatttttaccgatatttttttaatctttatctattgttactgaaaatgaagaagatattaggcatagacacgggcaccaacagcctcggatgggccattgtcggccgagaagacgacgagcgttggctgatagacaagggagtgaacatcttccaagagggcgtgaaagtagaaaaggggatagagtcctcaaaagcagcggaacgtacggatcaccgctcccagcgcgttcgttattaccgtatcaagttgcgcaagataaaattattgcgcgtcttgagtgccaaccacctctgtccgccgctcacctcagcagagttgcgcgcatggcgcatgaagaaggtttatccagccaatgaactattcatgcgttggcaacgcaccgatgagctcacaggcaagaatccatacgcctatcgtcaccgttgccttcacgagcaacttgacctcagtagtgtcaccgaccgctacgtgcttggccgtgccttctaccacctggcccagcgtcgaggtttcctgagcaaccgcaaagacgcgggaggcgatgacactggcaaggtgaagcaatctatcagccagctcacggaagaaatgcgcgaggccggctacgcgtatcttggcgattattttcatgacctctacaacaagggagtgaagatacgttgccattacaccgcccgaaacgaacattacttggcggagttcaacgccatctgcgagcgacaggggctcgatgccgaccttgtctctaagatacgccatgccatcttcgaccagcgtcccctcaagtcgcaaaagggacaggtgggcaagtgcgtcttcgagaagaacaaagccaagtgtcctgcttcccatccccgttatgaggagttccgcatgttgtccttcctcaacaacatcaaggtcaaggcgcccggcgacctcgccttgcgtccgctcaccggcgaggagcgggcgaaggtcacgcctttgttctatcgcaagacgaagcgtcaattcctctttgaggacatagccaagaagttggcacccaagaaacaatatggcttctgcaagcgcagcgaggacagccagatgccctacctcttcaattatcccatggacacgcccgtcgtgggttgccccgtcacggcggccctgcgcgacctctttggcgacgactgggagcagggcctctgtgaggtctacacgctcgccaagggcaagagccgagaggacattgtcaatgacgtttggcatgccttgttcttctattctgacaacgacaagctgtcacagtttgccgaggaccgcctgcagttgtcgcccgacgaggccagggcgttcagcgacatcactttgccgtccgactatgcctcgctgagcctgaaggccatccgcaagctcctgccctatctcaggcgaggcctcatctattcgcatgccgtctttttggccaacttgggaaaggtgatgcccgcctacgagtggggcaacgaggccatgcgcgaggctgctatcggccatgtcattgaggccatggacagccatgacgagcgcgatgaccgctccatggagcaacgtgtgaaagactgcctgcgtgagcgctactgcgtcaccgacgaggcgttgtcgcatctctaccatccctccatgatggatgtctatccgccggtgccccaaaatgagaaccgcctgggttcgccccgcatcggcagtgtgcgcaaccccatggccatgcgctccatgtttcgtctgcgccacctggtcaaccagttgctggccgaaggccgaatagaccgcgacacggaggtgcacatcgaatttgcccgcgagctcaacgatgccaacatgcgcaaggccttggatagccaggcgcgcgccaatcagaaggccaatgacgctgcccgcaagcacatagccgaactctacaaggaggagacaggacgcgacatcgagctcaccgaccgcgacgtgctcaagtatgtgctgtgggacgagcagaagcacatctgcctctacacgggccagcagatcaagctggccgacttcgtgggcgacaaccctcgctttgacatcgagcacaccataccgcggagtgtgggcggcgacagcacgcgcatgaacctgacgctctgcgacagccacttcaaccgcgcagtgaagaaaaccaagctgcccaccgaactggcttgtcatgatgacatcatgcagcgcatagccgaatggaaagacaaggtggaggacctcgataagcagatacacaagttgaagggcgcgtcaaagggcaccacgaccaaggagcaaaaggacagaatcatacaacgccgccatgagctcgaacttcagcgcaactattggcgtggcaagtatgagcgtttcaccatgacgagcgttcccgaaggtttcagtcgtcggcagggcaccgacatcagcgtcatctccaagtatgcgcgcctctacctgaagtcttatttccatcatgtctacactgtgaaaggcttggccacctccgactttcgcaagatatggggcgtgcaggaagtctatagccgcaaggaacgcgtcaaccatgtgcatcattgcatcgacgccattgtcatcgcctgcataggcctcgacgactacaacaaactcggagcctactatcatgacgaggagaaccatgagtggtatggcgcctccaaggcatcgtttcccaagccgtggcccacgtttgtggaggatgtcaagcgcgtgcaagacgagatcttgatctatcaccacacgcccgacaacatgccgaagcaggggcgccgtcgcatccgtgtcgacggcaagcgagtgctcagctgtggcgacgccgcgcgcggatcgctccacaaggatacctactatggggccatcgagcatgagggcgacatccgctacgtgaagcgcatggcacttgctgacctcaaagatgccaaagacgtggagaagattgtcgacgagaccgtgaagtccatcgtcaagcaagccatcaaggagaagggattcaaggcggccatcgacccgtccaacaccatttggatgaacgaggaaaagcgtgttcccatccgcaaggtgaggtgctatcagccctcggtgaccaatccattgcacatacgccagctgcgcgacgtgtcaccgaaggagtacaagcgacagtttcatgtggccaacgatgacaactatctactggccgtctatgccagcaaggataagaagggcaaggataagaggactttcgaactggtcaaccgcctgcaggctgcagagtttttcaagacgagcaacgacaaggaggctgcggggcataatctggtgcctgtgaagagccgagaagactatccgttggctttcacgctcaagataggcaccatggtgctgctctatgagaagtcgcccgacgaggtgtgggaggccacgcctaaggaactgaacaggaggctgtataaggtggtgggattgtcgtccatggtaataggtggaaatccatacgccacaatcaagatgcggcaccatgaggaagcccggcaaagtaaggacatcaaggctaagaacggagcctataagcaaggagaggaattgcgtcctgccattctgatgttgcacactcaactgcgtgctcttgtgcaaggctacgactttgcgattaacgaattaggagaaatcaaatggctgagaactcatgattaagcagactcttttcttcaccacgcccgtccgcttgtcgctcaaaaactgtcagttggttgtttcctggaaggacagcgacggccaactgacacgtcccattgaggatctcggctgtgtgatactggaaaatcagatggtcagtgtcaccctgcctctgctgggcgagctggtgcgcaacaacgtggcggtcatcctctgcgacagcaaggggatgccttgcgccatgctgcagcctctcgaggccaacgcaacacaggctgagagcttgaaggcgcaactggccgtgagcgaaccgatgaagaaacaggcgtggcggcagattatcgaagcgaagatacgaaaccaggccgccgtgctgactcgtatgggtaaggagggcgtggcgctgaggcacctctacgagaatgtgaagagcggcgataccgacaatcgcgaggggcaggcagcccgactctactggagcacgctcttgggacgtggtttccggcgtgagcgcgatggcgagccgcccaacgccatgctcaactatggctatgccatcctccgtgctgctaccgcccgtgcgctcatggggtcgggcctgttgccaggcctgggtatcttccaccgaaaccgctacaatgcctttccgctggccgacgatgtgatggagccttatcgcccttacgtcgatgagatggtctgccgtctctatgaccagggagcggtggacctcaccaaggaggtcaaggccgaactgctgcgcctcttgaccaccgatgttaacatgggcaaggtgacaaggcccttgcagatagccctcacgttcaccaccgcttcgctggtgaaatactacgcaggagaaatcaagaaactgtcgttgcccatcatgacatgaccgaataccggctcaacgcctatcacatcatgtggctctttgtgtttttcgacttgcccgtcaccaccaagaaggagatgaaggctgccgcccttttccgaaagaacctggagaaggacgggtttgccatgatgcaatactctgtctacattcgccactgcgcttctcacgagagcttggcggtgcatgtcaagcgtgtcaaggctatgctgcccgaatcgggcaaggtcagcctgctctgtgtcaccgacaagcagtatggcaacatctacaacttttggggaaagccaaagagcatgagcaaaagcaagattgataaaaaatatatcagcgagcccatccaactcgaaattttttgatatctttgtggcggaaagaacatcctgcacaccatttcttatcagtaagagtgaacatgacatgctgataatcagtatattcaccgctataggttgtggtttgatgtaggacat

SEQ ID NO: 4237 - DNA, 11510 bp, synthetic construct
  source 1..11510: mol_type = other DNA
  misc_feature 1..11510: note = Synthetic
tacgtcgggcctgagcatcggccacatttcgcccgaagcggcagccggcggcagcattggcaaactggtggacggcgacatcatcgagatagatatccccaaccgcactatcaacgtccggctgaccgatgccgaactggcggcacgtcccatgacgcccgtcacccgcaaccgcgaggtgtccaaggcgctgaaggcctatgccggcttggtgagctcggcagacaagggagcggtgagaattatataattgaaaattgagaattgaaaattaatagtcttgtgatttcgctggcaatttcccattttcaattctccattatccattaaagaaatgaaagatacaattacaggcgcagaagccctgatgcgctccttggagcacgaaggggtaaagacgatattcggctatccgggcggcagcattatgcccgtgttcgatgccttatacgaccatcggaagacgttaaaccacatcctggtgcgccacgaacagggggctacccatgccgcgcagggctttgcccgcgtgtcgggtcaggtaggtgtctgtctcgtgaccagcgggccgggtgccaccaataccatcaccggcattgccgacgccatgatagacagtacgcccatcgtggttattgccgggcaggtgggtacaggtttcctcggtacggatgcctttcaggaagtggaccttgtaggtatcacgcagcccatcaccaagtggagttaccagatccgtcgggccgaagatgtgccttgggccgtggcgcgtgccttctacattgcccgtagcgggcgtccgggacctgtagtgctcgactttgccaagaacgcgcaggtggacaagatggaatatgctcccgtgacggtcgactatatccgcagctaccagcccgtgcccgacatggatatggaagccatccgcgaggctgccgatctcatcaatgccgctgatcgcccgttggtactcgtagggcagggtgtagaactgggcaatgcccaggctgaactccgggccttcatcgagaaagccggattgcctgccggacgtaccctgctgggactttcggcccttccttccgaccatccgttgaataagggcatgctgggtatgcatggcaatctgggaccgaacatcaataccaacaagtgcgacgtgctgatagccgtgggcatgcgcttcgacgaccgtgtgacgggtaacgtagctacttatgccccgcaggccaagatcatccacttcgacatcgaccctgccgagatagacaagaacatcaagaccgacgtagccgtgctgggcgattgcaagcagacgctccccgctgtgaccgaactgctgaagcccgctacccatcaggaatggctcgacagcttccgcacctacgaggaagtggaggaagagaaggttatccgtcccgaactccatcgcacgacccgcgaactgagcatgggcgaagtggtacgtgccgtgagcgaagctacaaacaacgaagccatcctggtgaccgatgtcggacagaaccagatgatgtctgcccgctacttcaagtacacccgcgagcgcagcatcgtcacttccggcggactgggcacgatgggcttcggccttcctgccgccattggtgccacctttggtcgtcccgaccgaaccgtctgcgtcttcatgggcgacggcggcctgcagatgaacttgcaggaactgggcacggtgatggagcagaaagcccccgtcaagatgattctgctgaacaacaattacctgggcaatgtgcgtcagtggcaggccctgttcttcaaccgccgctactcgttcacccctatgttgaaccccgactacatgcagatagccgccgcctatggcattccttcgcgccgcgtcatggagcgttcggagttggccgatgccatccgcgaaatgctggccacggacggtcccttcctgctcgaggcctgcgtggaagaagagggtaacgtaatgccgatgacgcctccgggcggttcggtgaaccagatgcttttggaatgctaaaagatacagactatgactgacaagacattatataccattatcgtccattcggaaaacattgccggcttactcaatcaggtgacggcggtgttcacccgcaggcagatcaacatcgagagtctgaacgtgtccgcttcttccatccagggcgtacacaagtacaccattacagcgtggacggacaaggataccatcgagaaagtggtgaagcagattaccaagaaaatggatgtgctgcaggcccactacttcaccgacgacgaaatctaccagcacgagatagccctctacaaggtagagactcctgcgctggagcagacgcccgaggtgtcgaaggtcatccgcaagaaccacgcccgcatcgtcgaggtgaaccctgtcttctccattgtcgagatgaacggcgtgagtgacgacatcactcacctttatcaggagcttcaggcattcgggtgtgtgcttcagtttgtgcgttcggggcgtgtggccatcactaccagctgcttcgagcgggtcaacgagtacctggccgaacgggaggcaaaatatttgaaagataaaaaggagaaagacaatgagtgagaacaacaaaataggaacctataacttcgtggccgagcctttccatgtagactttaccggacggctgacgttgggggtgctgggcaaccacctgctcaattgtgcgggtttccatgccaccgaacgtggtttcggcatggccgagctgaacgaagaaaactatacgtgggtactgtcccgtctggctattgacatggacgagatgcccttgcaatatgaacccttctcggtacagacgtgggtggagaacgtctaccgcctttttaccgaccgtaactttgccatcctcgacaaggacggccgcaagattggttatgcacgttccgtgtgggcgatgatcagcatgcagacgcgcaagcccatcgacttgctggccatcaacgatggcgatattgtaaactacgtatgcgacgaaccttgccccatcgagaagccttcacgcatcaaggtgatggccaccgagccggtcgcttcgctcacggccaagtatagcgacatcgacatcaacggccatgtgaacagtatccgctacatcgagcacatcctcgacctcttcccgctggagaagtatcggacgcagcgcatccgccgtttcgagatggcctacgtggccgaaagttactatggcgacaccctttctttctacctcgatgacgacggtaacggcgtctacggcgtggaagtgaagaagaacggcgatgaaaccgtatgccgtgcaaaactgatatttgaataaaagatatatattaaccgggcgaaagccacaaataaaaacaataacaacaatggcacaattgaattttggcggtgttatcgaaaatgtgatgacccgcgaagagtttcccttggaaaaggcacgtgagattttgaaagacgaaactattgcagtaatcggatatggtgtacagggtcctggtcaggcttgcaacctgcgcgataacggtttcaacgtcatcgtcggccagcgtcctggcaagacttttgagaaagcgattgccgacggatgggtacccggcgaaaccttgttcggcattgaagaagcagccgagaaaggcaccatcgtgatgtgcttgctctccgatgcagctgttatgtccgtatggcccacactgaagccgcacctcacggctggcaaggcgctttatttctctcatggttttgccattacttggaacgaccgtacaggcgtggttcctcccaaagatattgatgtgatcatggtggcaccgaaggggtcgggtacgtcgctccgcaccatgttcctcgaaggccgtggcttgaacagctcctacgctatctaccaggacgctacaggcaaggctatggaccgtacgttggctttgggtatcggtatcggttcgggctatctgtttgagacgactttccagcgtgaggctacttccgatctcaccggtgagcgtggttcgctgatgggtgctatccagggtctgttgctggctcagtacgaagtgctccgtgagaacggccacacgccttccgaagccttcaacgaaactgttgaggagctgactcagtcgctgatgcctctctttgccaagaatggtatggactggatgtatgccaactgctctactaccgcccagcgtggtgccctcgactggatgggcccgttccacgatgccatcaagcccgttatgcagaaactgtacgaaagcgtgaagtgtggtaacgaagctcagatttccatcgacagcaattccaaacccgattatcgcgagaagctgaacgacgagctgaaagctctgcgcgagagcgaaatgtggcagacggccgttaccgtccgcaagcttcgtccggagaacaactgatcgatctgactgattgaagatactataagggagcgtatcggcgtgcttggcacggcggtgcgctccctttattatggaatataaacaactggataccttaagtctttttatatttctaatgttggtggctaattggttagatataaaaaactcccaccgaagcgggagtataggttttatccttcggcccaagagccttattgtgataagatgtagaaaatcttatattgcaaagataaatattattttctaaatttgcaagcagtgagataaatgattttttaatatttaaccatagcatataatgaaagaacgaatcttaggtattgatactggcactaatagtattgggtggtctattgttgagtataatgacgaaatatctgaaaataaatatactctgatagataggggagtaaatatctttcaagagggtgtaaagatagaaaaaggaaaagagttttctaaagcatctgaacgtaccatgcacaaacatcagcgtgttggttattggcgtcggaaaatacgaaaaattaagttacttaagattctcataaggaatcagctgtgtccatctttatctgtagtggaattgaaacaatggcgttcactgaaaaaatatcccttgaacgaggatttcatggcttggcaacgtacagacgacaacataggtgacaatccttattatttccggtatctatgtcttaccgaaaaactggatcttactaatttgaagaatcgttatatagtaggccgtgccatttatcatctaaatcaaaggcgtggttttttaagtaaccgtaaagaaaataccagagagaatgatggaaaagtcaaacagggcatagaaacattggcacaatcgatgaaggattgtgaaacagagtatttgggagagtatttcaatctgttatatcagaaaggtgaaaagatacgctctcattatactagtcggatagattgtgaaagagagttgcttgccatctgcaagaaacaaggtttgtctgaagaacttactcaggagcttcgtcatactattatcactcaacgtcccttaaaatcacagaaacatgttgtggggagatgtgtttatgagccttctaaacctagatgtccgatgtctcatccgttgtatgagcaatatcgcatgtatgcttttattaataatataaagatgcaaggtcctggagaccatatattaaggccgttgactgaggtggaaaaacagactataattcctttgttccttcgaaaatccaagaaggagtttaagtttgaggacattgctaagaaactttcgggcggtaaaaagattttctgttattacaaagacaagactgaatgcgcctaccgtttcaattattatatggatacattggttagtggctgttctgttatagcccaactatccgaagttttcgatgttaaggataatgtagacgattggttggaaagggcctgcgaagtatatacacatggagatgggaagaaccgttatgaaatcatgaatgatatctggcacgtgctattcttttttgatagcgaagacaaactgaaagaatttgccttggaaaaactacagatggacgaagcgcatgccattctatttagcaagatacacttgccttccgattacgcatcactttccttgaaagccatcagaaagattctaccttatatgaaggagtatggtatgatttattcacacgccgtatttctggccaaccttcccagtgtgattccctgcaaggtggataaggaagctttgttgccgatgttgttgcgtgaggaagcggatgatatcgtaagggcattttacgagtatgacccttccatgtcggctatccgtacacaggaggaatacgtcaagcggtatattgcttacaaatacaatcttgatgaaaaggatgagcgcaagctgaagaacctttaccatccatccatgatagagacctttcccaaggtgcgtcaacaaacagctgaaggatattatcaattgggatcacctcgtaccagcagtatgcgtaatcctatggcgatgcactcattgttccgcctacgtcacgttattaatgcattgttgaaagaaggaaaaatagatgaatataccactatacgtattgagtttgcacgtgaactcaacgatgccaacaagcgtgcagctattcgtcagtggcagaacgaaaacaacaaaaataatacggaagctatcgagcggatcaaagagtatttgggtaaagactatgttccttcgtcaactgatatacttaaatatcaattgtgggaagagcaaaatcacttgtgcctttatacaggagagacaataaaccttgctgacctctttgattctaacaaatatgacatagagcacaccattccccggagtgtaggcggtgattctacagccatgaatctaacggtatgcaacagccggtataaccgggaagtgaagctggcacagattcccactcaactatcttgtcacgaacagattttggaacggatagccagctggaaagaaacaatagaaaaattgggtaaagaaatacgcaagattaatactcgaggtgtcagtgataaggaagttaaggatcgtatgattcaaaaacgctaccgtctcatgttagagcgtgattactggaaaggcaaatacgatcgatttgttatgactgaggtgcccgaaggattttcccgtcgtcagggagtggatataagcatcatatcaaaatatgcgcgtttatacttgaagtctctatttcacaatgtctatattgtcaaagggattgtaacctctgactttcgaaagatatggggaattcaagatgagtatgaaaagaaacagcgtatcaaccattgccatcacgctatagatgcagtgactatcgcatgtataggcaagactgaatacgataaactggctcaatattaccgtgatgaagaacgttgggaatggggactggataaccgtcgcgcagtatttccaaaaccgtggaaaacatttactgaggacatgaaacgtcttgatgaaacattgcttgtcagccattataccacagacaacatgaacaagcagacgcgcaagaaagtgcgtaagaacgggaaattcaccggacaatatatgcagggagatacagcccgcggttcactgcatcaggatacttattacggagcaattgaacacgaaggtgaaattaaatatgtagttcgcaagccactggaccaactcgaagaaaagaatgtgaagaatattgttgacaatgtggtgcgtggaaaaatagaaacagccatagaacaatatggaaatctgaaaaaagctgtagaagctggcatttggatgaacagggagaaaggtgtagccattaaaaaagtaagaatatacacatcacaagtcaaacgtccgttggatattcgccaacagcgtgacctttcacccaaagaatataaacgcaacttccatgtggccaacgattcaaactacatgatgggtatttatgcaggcaaaagcaaaaacggcaaggagaaacgagagtttgaacttattaacaacttaaatgccgtagaatactataacagcggagtttcagtacaagacatcgatatattaccctcggaaagtaaaaatggatatccgctaaaatggaaactcagagttggaacaatggttttgttatatgatgaaactcctgaagaaatatacgaacttgacgaaattcaactatgcaaacggctttataaaataacaggaatgtcttccatgatagtaacaggatgcaattatggagtactttctttgctattccatcaagaggcccgcccttcaaaagatgttactttgaaaaatggaatttataaacatggtgaagccacaaggtctggcataactttgcttcacactcaatttaaagctttagtgcaaggctatgattttgagatggacgatttgggtaaaattaaatttaagaatcgatgataaagcagaccttgttttttacgacacccgtgtcgctatcactgaaatacaaccaaattgagataagatgtaaagatacggaagaggttatcacaaggccgatagaagatgtaggtgtcgtaattgtggagaaccaaatggttcatttcaccgtcccgttactaaatgccttggcagacaataatgttgccgtgatattctgcaatgctcaatgtatgcctaatacgatgttgatgcctttggaatcgaatgctgttcaacaagaagtgtacaggtttcagatagaagcatctttacctacgagaaagaggatatggaaagacatcatcgagtataagatacggaatcaggcagcgttactcgatattttaggtcgcgacggtaaaatactgaagccatattatatgaatgtactatcgggtgacagtgacaaccgcgaagggttggccgccaagatttattggcggcaaatgtatggacggcagttcaaccgtaaccgcagtggtgaaccacctaactcattgttgaactatggatatgccatcctccgtgcagctgtagcacgcgccttgttgggttccggattgttcccggcatttggtctgtttcatcgcaaccgatataatgcgtttcccttagccgacgatgtcatggagccctatcgcccgtttgttgatcaagtggtctatcagatttttgtatcatctccagatatctgtttagacaaagaggccaaacaatcgcttgttaaagtattgttttccgacgtgaaaataaacggtcagatgcgccctcttcaagttgctttatcgatgactacagcttcccttgtccgtgcactgaaagataaaaaggagagcgtcatttatccttcgtttgtatgactgaacaccgtttaaatgcctatcgtgttatgtggctgtttgtgttctttgacttaccggtaacaaccaagcgagagcgaaaaatagcctctgactttcgaaaaaacttattaaaggacggatttgtaatgatgcagttttctgtgtatatccgccattgcgcatctcacgaaagcctggtagtacacaaaaaacgtgtaaaaatcgcaatgcccattacaggtaaaataagcatgcttgccgtaacagacaaacagtatggagaaattgaaacaatttttggaaaatctgcaaaaaaagagataaaagccccaatccaattggaatttttttagtactttcgttaagtattatacatcagtataactacttcgtattattaaaaatagtgtatatatattgtaaattcaagcacttagatggattatgttgtggtttgatgtagaaaatgaaagatatacaactttttgggacgaaccatttgtatgattctgttgtggtttgatgtagaaaatgaaagatatacaaccggctctcgtctgagtcaaccatgcacattgttgtggtttgatgtagaaaatgaaagatatacaacttgttgcttcaagacctttcaggaggaaagttgtggtttgatgtagaaaatgaaagatatacaacccggaaaagtgtccgacacttcaacacttgttgtggtttgatgtagaaaatgaaagatatacaactgccgcgtgcgttggatggactgcctgtgggttgtggtttgatgtagaaaatgaaagatatacaacgcaatagagttatctgatgcacttattgaagttgtggtttgatgtagaaaatgaaagatatacaacttatctattttcataacgctgtcacttttcgttgtggtttgatgtagaaaatgaaagatatacaacccgtcgagcagcatggtccagtcgggatggttgtggtttgatgtagaaaatgaaagatatacaaccaatacatataagtaccgacccccgtgtgggttgtggtttgatgtaggaaagagaagggatatgaaggcagagtcggaaacggctgtcttgttggtagacttggttctttccctctgaatcatcccttgttttcccctgaaacattgcctcttttgcctcaaaacattccttgttttggggcaaaacatcctaccttttgctgggtgacaatccatgtcatttttcggatgtcggtttaagctggggaaagcggtgctttaagctggacaaaccaatgctttacccagcttaaacggacgtttttcccagcttaaatcgttgctttccccagcttgaacggggaacatcatgcagagggggaggccagttcgcggatgtgctccagcagcttccgatagaaggcatgccgtcccagcgtggcggcgtcgcccaggatgacgagcttcatgcgcgcacgggtcatggctacgttcatgcggcgcaggtcgccgagaaagcctatcaggccttcatcgttggcgcggacgaggctgataaagatgacgtcgcgctcctgaccctggaatccgtcgaccgtgttgaccgtcatcaggtggcggtagggacgcagggcggcactgccgcggagcttgccgcgcaggtattgcacctgtgccttgtagggcgagatgaggccgaagtcgatgcgttcgtccagaatgcgctgtccgccgatgcgggcaatgtatttttccagctcgctgagcagcaggtcggcctcctggcggttgatgcggccgaaactttcgcccacaaactcttccttgaaatccatttccgacgtgtcaatccacgagatgggggtgtcccagtcgaggatgccgcgatggcgcacttcgggggcggcctgcagctgcccgccgtagaaccagtcggacgagaagcgcatgatggcctcgttcatgcggtattgggtggtgagcagcgagacggtctcgggcttgcgggccacgacggtctccatcagtgtacgttccagtccgccgcgtgccgcatcgtagcacttgatagtgggcggcagttgctggtggccgcctgccagcaccacgcggtcggccttgcggatggctatccagcaggcagcttcgagggcctgtgccgcctcgtcgataaagagggtgccgaagcgtcggccggccagcacacggtggttgctgctgacgagggtggaggcgatgacgtgggccg

SEQ ID NO: 4238 - DNA, 9920 bp, synthetic construct
  source 1..9920: mol_type = other DNA
  misc_feature 1..9920: note = Synthetic
gcaaaggtaagcaataatattggattgttaaaaacacaacaatattatttgatccaatattcctccaaaaggagtgagtttctcggattttatttgtacatttgccatgtcattcggagattttgctatacttgtttgcagcactaaggtaggtgaaaaatctgacatggcatcatcccgagcaccctatagttgctcaggtacttataaaaacaactaactcatagtactgcggaaattagagtataaaaagaatcacatcgaattatgaaatccgcaaataaagaaataggatttggcaaacaaactattgctaaggttttcgaggagtggtacactgttccttcatatcaaagacattacgtatgggaaagcgacaacgtgaatgacatgttggatgactttgcgtctaattatatagaacatgccaaggaggaatatttcctcggctcctacattattcaaagtaaaagcaacaacaatgacctgcttgatggacagcagcgtatcactaccttgtttctcttgtttgctttcttgcgcgactatgctggttcttcagaggatgtcaaggtcaactgcgttgacttgatattccaaaaggccaataagattaagcaaattcccgaacgcatacgcctttcttatgagattcgtggcaatgtgaggaagttcattgaggaatacttaatgacgcctggaagtattacgcagcattgggacgatattgtcaagaaagccaatgacaaaaaagaatgcacgtctattcaaagaatgtgcaatgcattggtttgctacaacgagttttttaccaatcataaagaaatagatttagattcctttctcatattcatcctcaacaatgttgtgatgatctatatatcagcagactcgttagaggatgcatttcgcctattctccgtgatgaatgatcgtggccaaaaactgagcaatgctgatattctaaaatcatccaatcttgaaaaaatcgaggatggcagcgaaatgaacgagtatgcgcgcgaatgggaaaacatgcaggaggatttgggtaatgattttgaccgtttccttgcctatgtacgaacgatgctgctcaaaaagcgccaaaagacgaatctgcttgacgaatatgagaaacagatttttaaagcagggaaaatcaaacagggaaaagattttttcaactatgtctttagggcgtatgaggattataacaagttgatcaacttggcaggcaatgaagataccaagtattgttcgttgataagaaccctcatcgagtgtatgccttcgaccgattggattcctgtcattttggcgtatggaagaaaatttggagacaatgggcttcttgaattttcacagaaggtagcctgtaaaaacattgcagatgcagtatgtggcaaaagcccatcgtatcgcatcgaccacttgaatagtatcatccacttgatagaagagtctggaaaaccctccgatgtacttgacgctcaaggatattattcatttaatgaacatgtatttatggcaaatatccaatcagagatatacggcagacgatacacctatgcgctcctgatgcttcttgaatacaaatacaaggacaagtctgaatggaaagatttcggaacgacatccattgagcatattcttccacagaatcctaaagctaccagccagtgggtgaaggactttagcgaggaacagagaagctattatacacataggataggaaacctgtgcctgattggacgcagaaagaattcctcccttggcaatcttgattatcaggagaaactaaaaaaatatttcgagaagaatatcggatcctttgcaagctcacaaaaaatataccaaacatatccgaacgcatggacacctgaaaccgtgaaggaaaatcaagaaagagtcatacaggatctgatggaaatatttggtatcaagagtccaagtaccatcatagacgactctacatacatggagcagcaaagatctgtttaccctaatgcttatcagccatggacagaatcagatgacgagagattagtggccctatacaacgaaggcaaatctattagcgaactcgcacaaatgtttcttagaaatcatgtcgctataaaatccaggattcgtaaattaaccggagaacggttctaataagcaacgcctgttctttaaaaacaacaatcagacaggggaggaattgtcgcccaccatcgtgggcaactatgtacttttttgcgcccgacttgtgtataacaaatattttatgtatctttgccgcgcgataaccgaagataatcttcacgtccgaacagacaggctttgcacgcatgccgatgctgccaccaaggaagaagcccgcaggttcgttgagcaaaaactcggggagatagaaatctctgttgataatcttcgcgcacagattgccggagaaacgtatcgcctgctgcctctgtcgtatattgctgagcattacttcggcaagagtgtggcctggctctcacagcgcctcaacggcacgctcgtacgcgggcggtcctatacgctcaacgaagagcaaaagaagattttcaacgacgcaatgcaggatatcagccttcgtatcggatcaatccatttggtctgatgactcattcgccgtcatcttttcgccccaaatcccaacgactttagggaaattttacgagaaaacctccatcaagtagccaacacggcgacctgcaaaagggttgccacattatcatcaacgtcatggaaaaagcagaaaaagacaacaccgtaaaacagcgcatgcaggacattctcctctgcgtatcatggagagagattgccaacacctatttcgaccgccccgcatcatggatctacaataagctcaacggaatcgacgacaacggcggtttcaccgaaaaggagaaagagctactgcgtggcgcgctcttcgatttgagcgaacgcatccgccgtgcggcagagaccatttaggcaggttcttcgttgcaccttttaagacagaagtcgtccgcgcctacggacgcaagccccgaggattactcggggtttttcttgaaatatggagccgtgggtagtttaaggtcttctatatttgggacgcctgaaagtggagagccttaccttttattagctcaaataaacaaaacagccctctcggcaagctataaaaaaagaaaactcccaccgaagcgggagtataggttttacccttcggccattgctggccttattgtgataagatgtaggaaatcttattctggatgcaaaaataccactttatttttgtttaaacaaattttttattgtaattttaccgaaaaatttaaaaccgcatcaaaaatgactaaaatacttggcattgacacaggcacgaacagccttggatgggctatcgtagaaaagaaggcagagcaatactgcctgcttgataagggagtgaatattttccaagagggagtcaacatcgacaaggacaacgagtcttccaaagcggcagaaaggacgggctaccgtgctatccgagtacgctactatcgcataaagctacgcaaaatcaggcttctgcacatcttgacccagcaccacctttgtcccccactcacctcctgggagctgcgccaatggcgactaaagagcatatacccaaccgatgagttgttcatgcaatggcagcgcacggacgaggagaaagggcaaaacccatacgcctatcgacatctatgcctgcatgagaaactggatttgccccaggttgcgaaccgctacatcctcggtcgcgttttctatcactttgcccagcgccgtggctttctcagcaaccgcaaggatcagagtggtgaggacgtgggcgtcgtgaatgacggtatcagtgccctctccgaagaaatgcgggaagcgggatgcgaataccttggcgattatttctaccagctctatgagaaaggcaaaaagatacgcaaacactacaccgcacgcaacgaacactacctcaaagagtttcatgccatctgcgaaaagcagcaattggacgcctcgctcgtgtcggagttggagaaggccatttttacccagcggcctttgaaatctcaaaaaagacaagtgggcaagtgcgtatttgagaaaaacaaagccaaatgtccagcctcccaccccttgtacgaggagtttagaatgttgtctttcatcaaccatatcaaaataaaaacaccaaaggaagatgagctccgaccgttgaaccacgaggagcgcgagaagattcttccgcttttctttaggaagaccaagaaaacctttaatttcgaggatattgccaagaagttggctcctaaaaagctctacggattctacaagaaggccgctgatacggaaatgccgtatctcttcaactatccgatggatacttccgtctctggttgtcccgtcacagcggcgctacaagatattttcggtgacgattggctcgactccatctgcaaggtctatacgctggccgatggtaaaagccggcttgagatcctcaacgacatctggcatgcacttttcttctattccgaccaagacaagctggctgagtttgccaaggtgcgcctacagcttgacgacgaacaagcccaggccttcagcaacatcaaccttccctccgcctatgcttcgctaagcctcaaggcaatttgcaagatcctcccctacctcagaagaggacttgtctattcccatgcggtctttttgggcaatctttgtgaagtgatgcctgcctatgaatggggaatcgaggaaatgcgccaagctgccattgactgcgtcatcaaagagataaacagctatgaccccaaaacagacggacgcactctagagacgtgcatcaaagagtatctaaaagaaaggtatcatgtctcagacgaaaatctcaaaaagctctaccatccctcgatgttagagacttaccctcgtgtgcgccctggtcaagacggaatatatcaactcggatctccacgcaccgacagcgttcgcaacccgatggccatgcgatcccttttctgccttcgcaagctcgtcaaccgtctcttgaaagagggaaagatagaccaagagacggagattcacatcgagttttcgcgtgagctgaacgatgccaacaagcggagcgccctcaagcggtatggcaggaacaaccaaaaggcacacgacacagcccgaaagcacatcgtcgaggattacaaggcagaaacaggcaaagcaatagaaccgacacccacggacattttgaaatatgaactatgggaagagcagcagcatatttgcttatacacaggtcagcagattcgcatatctgattttatcggacccaatccgaaatttgacatcgagcacaccttgccccgaagcagaggcggagacagcaccaagatgaacctgactctttgtgacagccgcttcaaccgcgatgtgaaaaagacacatctgcctaccgaacttgccaaccacgatgaaatcatggcccgcatagctatatggcaggaaaaatacgaggagctgagccaacagattcgcaaacagaaacgcaaatcacaggctgcgacaaccaaggagcaaaaagacaaagccatcagctaccgccattacctggaactccagcgtgactatttgcgcggaaaacatgaacgtttcacgatggaaagcgtgcccgaaggattcaacaggcgacagggtgtggatatcggcatcatctcaaaatacgcccggctctatctgaagtcggtcttcaagcgagtgtatcctgtaaagggcctcgccacatctgatttccgaaagatatggggacttcaggacatttatagcgccaaggagcgcgtgaaccatgtccaccattgcatagacgccatcgtcgtagcctgtatcggactggacgaatatggcaaactggccgagtactatcacgatgaggaaaagcatgagtggtacggtgcgtccaaagccacttttgccaagccctggccgacattcgtcgaggacgtgaggcggatgcaaaacgaactgctcgtttatcaccacactcccgacaacatggccaagcagggccgtcgcagaatcatcatcaatgggaaaaaggtcctggcaaagggagacgccgtgcgtggctcactccacaaggagacttactatggcgcaatagagcgcgaaggtgaggtcaaatatgtgaaacgtgtagagctgtcacaactggaagaaaagaacatcaagtatatcgtggatgacaccgtgaggcaaatcgtccaagaggccgtcgatcgcttgggcttcacagaagccatggcttccaccatttggatgaacgaggagaagcagatacccatcaaaaaggtacgctgctatacgccccaagtcacccaaccacttcatatccgctaccagcgggatgtctctgacaaagagtacaagcgcaaatatcatgtggtaaatgacaaaaactatctcctcgccatctatataggggctgacaagaaaggaaaagagaaacgagactttgagttggtcaacaacctccaggcggccaaatactaccggacgagcaacgataggacaggctctggcgatccgatagtccccgtcaagagtagccatgactatccgttggcctatacattgaagatcggcacgatgctcttgctttacgagaactcacctgccgagctttacgaagcctctcaagcagaactgaacaggcgtctgtataaggtgacagggctttcttccatgaccgtgggcactcgcagctacggggtgattgtaatgaaataccacacggaagcccgacaaagcaaggacttgaaaggcaagaacggtgcctatcaaactggtgaggagctgcgtcctgtcattagaatgcttcacacccagataaaagcggcggtacaaggcgttcacttccgtatcaacgagttaggtgagatcaaatggcttgcgcggtatgattaagcagaccctcttcttctccacaccagtgtcgctttccttaaagaacaaccaaatggtcatttcctggaaagacagagcagacaaggtgacgcgccccatagaggacatgggatgcgtcgtgttggaaaaccaacaaattagcgtcaccttgccgctcttgaacgaactggtgaaaaacaacgtggccgtcgtcctgtgcgacaacaagcagatgccgacggccatgcttcaatgtttggacggaaatacgacacaagcggaaagcctcaaatatcaactggccgtcggagaagcaacaaagaaacaggcttggaagcaaatcatcgaggctaaaatcaagaatcaggcagttgtacttcggcactacggaaaacggagtgagctactaacaccatattataaaaacgtgaagagtggcgacacggacaaccgcgagggtcttgcggccaaacagtattggacagaactgttcggtggatgcttcagacgggatcgggaaggaggttcccccaacgacttgctcaattatggctacgctattttgcgagcggcaaccacccgtgcattaataggctcaggactgctacccaacttgggtatcttccacaaaagcagatacaacgcctttccattggccgacgacgtgatggaaccctatcgtccttatgtggacgaaattgtctattcgctttacgaaggtggagtttacgagctcaacaaagagtctaaatccgccatactccgcttgttgacgtgcgacgtgggcatgggaaaagtcacgcgtcccctacaaattgccttgacattcaccactgcttctttggccaaactgtatgctggagatatcaaaaaactaactcttcctatcatgacatgaccgaataccgtctcaatgcctaccatataatgtggatgtttgtatttttcgacttacccgtcacaacaaaaaaagagagaaaagccgctgcgctctttcgtaagaacttggagaaagatggattctccatgatgcagttttctgtctatatccgccattgcgcgtcgcgagagagccttgcggttcaccttaagcgtgtcaggtccttgcttcccgcgactggcaaagtctccatcttgtccgtaactgacaaacaatttggagacatctacaacttttgggggaaaccaaaaaacgccaatcaaagtaaaatccacaataaagtcatcagtgagcctatccaattagaatttttttaataaatttgcagtaggaatcgtcctgcacggccatttcttagaagccaaaaacgaagtatcttactgattaccagtagatttacagctataggttgtggtttgatgtaggaacaagatgataaacaactcataaataattgtagtttccatttctttgttgtggtttgatgtaggaacaagatgataaacaaccacatgaatattattaacggagtagcgagtgttgtggtttgatgtaggaacaagatgataaacaaccgatcccgcgacatcattcaggccaccaggttgtggtttgatgtaggaacaagatgataaacaaccgccatgtcggttgctatggctgcacgcttgttgtggtttgatgtaggaacaagatgataaacaactaatgtaggtttgacgttgagacttgtcggttgtggtttgatgtaggaacaagatgataaacaactcaacggtgtcgccattcataccaagcatgttgtggtttgatgtaggaacaagatgataaacaacgcaaaggactttggcaacttctcgatgcgcgttgtggtttgatgtaggaacaagatgataaacaacattgcgcctttgcttattcagagagcaaggttgtggtttgatgtaggaacaagatgataaacaaccgcttgcgctcttgatagttcttaaagtagttgtggtttgatgtaggaacaagatgataaacaacatgtgctggctgctgattagcaagctgtgcgttgtggtttgatgtaggaacaagatgataaacaactgcaatatctgttgtttcctagcttctattgttgtggtttgatgtaggaacaagatgataaacaactcgagattccagcgattttgttcacgggcagttgtggtttgatgtaggaacaagatgataaacaacttgacagtgaagttaatactagcagataggttgtggtttgatgtaggaacaagatgataaacaaccgatgaagcgccatcagtttgaaagtaaggttgtggtttgatgtaggaacaagatgataaacaaccagctcggcgttcatgttgccgacgttctggttgtggtttgatgtaggaacaagatgataaacaacgtagctggaaatggaactgcgcaccatttgttgtggtttgatgtaggaacaagatgataaacaacacttcgtgccctatggtttcgcaaagtattgttgtggtttgatgtaggaacaagatgataaacaacgagcgttagaagcagcttgaatagcttgcggttgtggtttgatgtaggaacaagatgataaacaacttgggcctttagattacgcttggaattaccgttgtggtttgatgtaggaacaagatgataaacaactttaatgtacgtttgtcgctgagacttgtcagttgtggtttgatgtaggaacaagatgataaacaacccggaaccgttgccagttacgctatcattggttgtggtttgatgtaggaacaagatgataaacaactgctgaatgattgggtcgttagaattgaccgttgtggtttgatgtaggaacaagatgataaacaactcgggcaaagatgagctatcgaataaggagttgtggtttgatgtaggaacaagatgataaacaggctcacccgataaacctgggggattaagcatacagctttgtaagtctgaaaag

SEQ ID NO: 4239 - DNA, 8774 bp, synthetic construct
  misc_feature 1..8774: note = Synthetic
  source 1..8774: mol_type = other DNA
agagaccgggattcgaacccgggaaccagttttgccggttacacgctttccaggcgtgcctcttcagccactcgagcatctctcctcgtgtgctgttttgagttttgcgggtgcaaaagtagagctttttcgcgacacgaccaaataatttccgagaaaagtgaaagtttttttggtaatactacaaaaacggactaactttgcagcacgacgagaccttttccgactctaaaagccacacaacgatgaagcctattctgaccctcctcattgccatctctgcgctcaccgcgagcgcacgagtcatcgatatcgagcccgacacctgggtggccaccgacgcactcggacgcaccaccccgacagctgccgaagaaccgttgcgctccgacaagagacgaacagtcggcattttttacatcacctggcacgacgagggaaagttcaatctccactccccctacggaggcgacgtcacacgcacgctggcagcagcacctgaggctcgcctcgatgcctaccaccccgcgtggaaggaatggagcctccactggggcgagcccgaggcgggctacttcctcagccaggaccgctggctcatacgccgtgatctgtctatgctagccgatgctggcgtagacgtgctgattctcgacgtgacgaatgcagtcctgtactgggacgagtggaaggtgctgttcgaggagatgcaagcgatgtacgacctcggtaaccaagtgccgcagttctgcttctgggctttcaacggaaatgtcgtcagcgtcgtcacgcaactctacgagcgtatatataaagaggaacgcgcgaaggacttctggtttatttgggacgggaaacccctgctgctctacaacgccgaacccgaccatgacgccaacggtgggggctacgaagcgggcaagtatccgcaggaggtgctgaatttcttcactcttcgcaatatgtggtggggctactacgaatggggaggtcatcgctacgtagggactgaggacaattggtcgttcggctacgagatgaacgacgaacgagtggcagccttgacgccagcctcactcgccgcgcgccacaatggacgcctcgagcagatggctgtcacacccgcacagcatcccatcagcatcacgggcaagagctggcgccgcgagacgaaagaaccctcgctgaaccaatacgacatgcctgattcggcctacgtgccctggctgggacactccgtggcgcaccccgaaggatatggtatctatttccaggaccgttgggacgaggcactgcgcgtagaccccgatttcatctacatcaacgactggaatgaatggacggcgggcaagtacgtctcgggcttcgcacccggcagcaccaccacgcccggcccaacctctttcctcggtcggccgaaccccttctatttcgtcgaccaatacaatgccgagttcaaccgctcgatccaacccatgaaaggcggctataccgacaactactacatgcagatggtacagaacatacggcgttacaagggtgtgcgttcctcccctgtcacgcacggctacaagcaaaccgccaccttccgcgacacacgcggcgacatcctccaccgcgaccataacggctatggcggtcttcattacaccgacaccaccggtcgtaacgacatcatcacggccacagtcagtgtaacccgtaagaacctcgtcttcaccgctacaacagctgaggcactcacacccgccaccgatgccaattggatgattctctatctcgacaccgacctcaacacctccacgggctggcagggcttcgactatcttgtcatgagtagcctcctctatcggttcgatgcctccacctctgcgtggcagcctctggcatctgtcgccaccaccctcctctccgactctaccctcgcctataccatttcccgtaaactcctctgcctcaacgcctcttccgtaacgctcgacttcaaatgggccgacaatcctgccacgcccttcgacatcatctccgtcagcaccactggcgacacagcccccaaccgccgttttcgctaccgtttcatctgggtgagagctgcgcagtgaggtctcgactcctttaaaggcatcggagtctgggtgattgatttgtggatttaactttcgcaagctccgcttgcttgatacttcaagcgctcggccctacaggacccttcgctctgcgaagaactccttcataacaaccgaaacttgaatttgttgattgagcgcgcgcgaccattcttgatgtcctcagcgacccgtcacattgcgcattgcgactcgtcgcgcggggcctctcgaatgatggtgcaaagatacaacatcttttcgacactaccaaatatgaggggctgtagcgtgttaaaaatcgtaaaagcggaagggagggctgatgagggggagagggaggggtaattagggcgcgagagggggaataattagggcaagagagggctaattagggcgagagcgaggggataattagggcgaaagtgggcggcaggattgatgcaaggggcgcggataattagggcgaggtagaagggcgggattgcgcgatagcccctgattagggcgagggcggcggccggttatagcggggacgggtggcagggttgatgcgaaagcccttgattaggcgaggggtagcggccttttatagcggggcggtggcaaggtcgtgcgaggggtgtgcttgctgctgattgtgggcacgtgggggagattttgcaacattgttacattgcaacattgttacattaagcttttttgggtgcgcgggaggggagggatattaatatatatattattattaataattatataattagtaatctattctcacttggcgcgatttggggatatcgaaaatccttaatgtaacaatgttgcaatgtaacaatgttgcatttttaggctgggtgtactgtacttccctagaagaaaaaggtcgtcctgcactcaagcaagcatcagaccactgctgaagccaactaccaggtcgatggcatgacgatgaaaggccgcaaactgagcctatcagccttcacccctccccctaagaagccaccgaaatttgcatcgaagcatgaaaaaatgcgctatttctgcttgccattccgcacttttctttatctttgcagctgataaaccttaacccctttattcccacggtatgcgtattcgattgaatgcttctgccataccttcagaccctttccgaatgccttccagcctaatctattggtgcagggcgtgaaaagtcgttcttgttgaggagtccacatcaaaaaaaactcccaccgaagcgggagtataggtaaaaaccttcggccataatggccttattgtggtaagatgtaggaatcttacggcacaaaagtaggcatttattttggtagttccactaaaatgagtacctttaccgcgcaaatttaagacaaattaatattatgaaccgtattttaggtatagacacaggtacaaatagccttggatgggctattgtagacaaggaaggtgatgaatatcgcctcgttcacaagggaaccaatatcttcacggaaggcgtgaagatagaaaagaacatcgaatcctcccgtgcagccgaacgcacggagcatcggtcagtacgtcgtcactattggcgtcgcaaggtgcgcaagattcgtctcttgacccttcttgcagacaaccatctgtgcccgcctcttgcgaaagagagcttgcgcgagtggcggctgaagaaggtttatcctcaggatgacggcttcatggactggttgcttacggaggacaagacgggcgtcaatccctatcatttccgctatctgtgtctgacgcagaaactcgacctctcaatagtcagtcagcgctatatcctcggtcgtgcgttgtaccacttgaaccagcgccgcggcttcttgagcaatcgcaaggaaaacacgaaggcgtcggagggcgatgtgaacaagggcatcagcgacctgacgcaagagatcgaacaagccggctgcacctatcttggcgaatatttctatcgtctgtacgaacgcggtgagaagatacgcaagcactacacggcgcgcaaggagcactatctgaaggagttccacgccatctgcgagaagcaaggtttagattcgactctggttaagaagctcgagggcgccatcttcgcccagcgtcctctgaagtcgcagaagggattggtgggcacgtgcacgttcgagaagggcaagccgcgctgtcctgtgtcccacccgttgtatgaagacttccgcatgtatgcgttcctgaacaatataaagatacagatgccatccgacgcagaactgcgtccgctgacacatcaggaaatagattgtctcattccgctgttcaagcgcaagtcgaaacgctcattcaacttcgaggacatagccaagaaactggcccccaagaacagttactgtttctacaaggacaaggttcagaagccctaccgcttcaactatccgatggacacctccgtgtccggctccatcgtgagtgcccagctggaagacatcttcgggcatcagtggctggatgctatttgcgagacctataccttgggcgccggcaagagccgttttgagatattgaacgacgtctggcacgcactcttcttcttcgacgacgaggacaagttgaaggagtttgccaagaaccgcctgcaactcactgacgacgaagccacgcgcttcagcaagatatccctgccgcaggattatgcctcgctgagcctcaaggccatccgcaagattctgccttacatgcgcgactacggcctcatttactcccatgccgtgttcctcggcaatctgaaagaggtactgccctcacatgtgtggggtgttccccaggtgcgcgaagcggccatcgaggagatcatcaaagtgctgctctctgtgcagcagacttccgacacccgcacgcaggagcgatgtgtgaaggatttcctgaaagagcgttatcaggtggacgaggagccgctcgacaaactctatcacccctccatgatagacctctatccccgcgtaaaacctaacgacgagggcatctatcagttgggctcgccacgcatcagcagcgtgcgcaacccgatggccatgcattcattgttccgcctccgcaaggtggtgaacctgctgcttcagaagggctatatcgacgaggaaaccaccatccacatcgagttctcgcgcgacttgaacgatgccaaccgccgatgggctatccagcagtggcagcgtcagaacgagaaagagcgcgagcgctgcaagaaggagattgagaagctgttccaagaagctactggcaaaccgatcgtagaggtttccgaccgcgacatcctcaaataccagttatgggaggagcagcaccacaaatgcctctatacgggcgaggaaatcagcctctcggatttccttggcgcacaccccaagtacgacatcgagcacaccatccctcgcagcgctggcggtgacagcacgaagatgaacctgacgctgtgcagcagttcctacaatcgcgaggtgaaaaagacccatcttcccactgaactcgccgagcacgaaaccatcttgcagcgcatcgaagaatggaaggagcgctatgaggatcttgaccgccagattcgcaagaccaaaggtgtgtttgccgccacgaaggaagagaaggacaagaagatacgccgtcgccatctgctctcgctcgaacgcgattactggcgtggcaagtaccaacgcttcacgatgactgaggtgccagaaggcttctcgcgccgtcagggcaccgacatcagcgtcatctcgcgctatgcccgcctgttcctcaagtcggtgttccgccacgtttatatcgttaaaggtatagccacctccgacttccgcaagatatggggcatacagaatgaatacgagaagaaggagcgcgtcaaccacgtgcaccactgcatcgacgccatcaccatcgcctgcatcggcccagacgaatacgccaaactggcccaatactaccacgacgaggagaaccacgaatggtacggcaagtcgaaggggcatttcacgcctccatggcccacgttcgccgaggacatcagcaagattcaggacgaactgctcgtggctcattatacggaggacaggatgcagaaacgggcgaagaaaaagataaggaaaagtgatgggacagtcgttagaaacaacaaaggaataatccgttatgcacaaggtgatactgcgcgcggcatcttgcaccaagatacattctacggagccattatgcatcaaggagaactaaaatatgttggccgaaaggaattaactaagattacagaaaaagatgtagataatatagttgatgacgtagttcgcaggaaagtgcaagaagctatacaggagcaccgaggactgaaaggagctatcgccgctaaaatatggatgaataaagagaaaggtatagaaatcaagaaagtccgcatatttgtcaagcaaacaacgccactcacaatcaaagcccatagagatctgtcaagacatgactataagcagcaatacttagtttggaatgatagcaactatttgctggcaatctatgagggaaaagacaagaaaggcaatttagcaagagcttttaaggaaattaaagtaatagatgctgcaaaatattatgcacagaggcattcctctcatatcgttcctgctatcagcaacgaaggctatgtcttaaaatacgaattgaggattggagcaatgatattattatacgataaaagcccagatgagatatggaatgggacgcctcaaactatgaaagaaaggttgtacgtaattacaggtatgtctttgacaaatggtcgaatgactgttgtgcatcatcaggaagctcgtcaagccaaagaactcaagccagaagctgccgcctatgattacgatggcaacttgcgccctatgctgcgaatctccttatcaaaattcaaagccctcatccaaggcttcgatttcgacatcaacgacctcggtgaaatacagcgcctcagatgattaagcaaacactgatgttcacattgccagcctatttgagcctgaaagataaccagattgtcattcagctcaagggcgcagagcaggcggtgacacgtccgatagaggacatcggcgtggtggttgtggagaacgcgcaggtcacgctgtctgttccgctgctgaacgccttggtggacaataatgtcgctgtggttttctgcgataacaagcagatgcccaagtcgatgttgatgaacctcgacggcaacactacgcagcaagagagctatcggtatcagatggaagccacacaacccatgaagaaacagctatggcggcaactcgttgagtgtaagatacgcaatcaggcggcattgctcagcaagatggacaaggatgccgatgcgctcaagccctattacatgaatgtcaagtcgggcgactcggacaatcgcgaggggttggcatcgcgcatctattggccgttgttgatgggagcagatttccgcagagatcgcgaaggcgagccccccaaccaactgctcaactatggctattccattctcagagcagccgtcgcaagggccttgattggttctggattatatcctgcctttggcctcttccatcggaaccgatataatgcctacccgttggcagatgatgtgatggagcctttccgccccttcgtagacgaaatcgtataccatttctactttgatggagcggcgtctgagttggacaaacaaagtaagatagaactgttgcgagtcctttttgctgatgtgaagatgggcaagctgacccgtccgctcgaagtggcattgtccatgacgactgcctctctgctgaaagtcctgaaaggtgagcaagagaaattggttttgcctgttctgccatgagcgaaatccgtctgaatgcttaccatatcatgtggctctttgtgttctttgacttaccggtagtaaccaagaaggaaaggaaggtggcagcacttttccgcaagaatcttatgaaggacggtttcgtaatgcttcaatattccgtctacatccgccattgtgcttcctatgagagccaaaaggtacacgtcaagcgtctgaaatccttccttcctgagacaggcatggtcagcatcctctccgtgacggacaggcaatatggcgacatcatcaacttctgggggaaagaaaaaaaggaaaatacgccctctgaacctttgcaactcgaatttttttgatacctttgcacaagaaatcaaccttgtcaaccacttcttgagtgatatgctgaatgtaaatagctgattaatagataatagaaatgctcacgttgtggtttgatgtaggaaatggacgatatacaactgacccgcataaatgggaggattttcataagttgtggtttgatgtaggaaatggacgatatacaacatcagtaggtgacggactaagtgctggacagttgtggtttgatgtaggaaatggacgatatacaacaccacctgacgtttccacggtgaccatggggttgtggtttgatgtaggaaatggacgatatacaaccgaaaggagaagtcaagcagcagcagcaggttgtggtttgatgtaggaaatggacgatatacaacccttggcacgggcataggtggccattcacagttgtggtttgatgtaggaaatggacg

SEQ ID NO: 4240 - DNA, 8375 bp, synthetic construct
  misc_feature 1..8375: note = Synthetic
  source 1..8375: mol_type = other DNA
tacgtgttgacaagcgagtagaggaggaaggtctcgacatctacgagcatggtgaaagtgcttatagcaactaattgcgaaattcgattatcagcataaaatttaggtcaatggtgtttcattttgaggaatgaaacaccatttttttatgataaatcctcaacttgcacaatgaaattgcctcaacttgcacaatggaaatgcctcaacttgcacaatgaaaatgccacaacttgcataatttaacgtttaaaatgctagtattcaataacttttgattatctttgcagcggtgcttaaaaaatatgattatgaagaaatataaggcaagaatagcagataaaatgttaagtcggagacttttggggagtggtgccgttttgatacaaggccccaagtggtgtggaaagacgacaaccgcagaacagcaagcaaagagcgttgtgtatatggatgatcctgaatacatggagcagaatgtggaacttgcaaatctttctcccaaaaagttgctttcaggagaagtgcctcgtcttattgatgaatggcaattagccccgcaactttgggatgctgctcgttttgaggttgatcatagagatgaactagggcaattcatctttactggttctgcagtccctgttgatacaagcaaaattcaccattcagggactggtcgatttgcatggttgacaatgagaacaatgagtctttctgaatctggcgattctacaaatgaagtcagtcttgaagaattgtttgccaatcccgtagcagatgtttttgcaactaatcctctcaatattgattctctggcatggttgatatgtcggggtggttggccaaaggcaacgatggttagtaaggaggtagcacttgatatggcatatagatattatgaagccgtggtacactctgacatttctcgtgtagataatgtgagccgtgatccggaaagagcaaaaagaatattgcgttctctagcaagaaaccaatgtgctcagataacggtaaatactatctgtgctgatttggagaataatgatgttgtagccaccaatcgcaatacggtggcttcctatatagaagcattgaagaaaattttcgtattggaagattccttggcatggaatccaaatttgcgaagtaaaacggctattcgcacttcggatacccgatatttttctgatccttctattggtgttgcggctttaggtataggtccaaatgatttggtgaatgatctcagtacgatgggtttgttctttgaatcaatgtgtatcagagacttgcgtgtttatgccgatgctattgatggaacagtgtatcattatcgtgatggtaatggtttggagtgtgatgctgtagttcatttgcgtaatgggaattatggactgatagaagttaaattgggtggtgagaagaacatcgaagaaggagcaaagaatctaaagctcttggcttctaaaatcgatgatacgaaaatgaaatccccatctttccttatggttctgacaggtacatctcgttatgcagttcgtagacctgatggtgtgtacgttgtgccaattggttgtttgaaagattaatcaaaatacagaatctttgtactctagcaccttgactgtatgtttagtacggtcggggtgctatctttatataataaggtgtaaaccgtttttttactgtaatctcctgattcttctccttttctagtgcttttttatgttaaatctctatgttgtttggtgacaacatcaaatattctttttatatttgtcaacaaattaaaaagctgacaattatgattaatgaatcattttctataagattgcgggaagcgcgacagatgatggggctcagcatggataaactcgtagagcgaaccaacggagccatcaccaagcagagcatctcccgatatgagaaaggcatcatgcgccctaagcgtgatgccctgcaagccatagccaaagccctcaatatcagcgaggaatatttcgaaggaaccaatctcaagatagatatgccgatgctccgcaccacctccaatggcaagttgtccgaagacgagttgcaagcccttgaagcaaaactctcgttttgggcagagcagtatcttacgaaggagaaagaagcgggatttcctacccggttcaagaatccgataaaaggcactaaggtatcaacccttgaagatgccatccatgctgccgaccttcttcgtgagaagtggcattgcggtgatggacctatcgccagtatcctgagactcttggaaagaaaaggtatcatgatacttgcagctaatcttcccgagtatattttcggaatgagcacttgggcagataagaagcatccgctgatgattctcgatttcaatccggaaaagagtagcgtagagaaacttcgtttcacggcagttcatgaactggctcatctgcttctcctcttcccagaagatagtccgctgaggctagagaagcgttgtgatctctttgccagtttctttcttcttcctaaattggcgcttatcgaagagttgggttccaagaaacgtgagaagataacgctggaagagatgatagacatcaaggaactgtatggcgcatctctcgccgcttccattattaccgccagagattacggcatcatcaccaccgagtataaacgggcatggtatgccgagcatatagagcctaatcctcgagaaataggtaatggccactatgcatttcccgagacattgggaagggagaagagagtcaattcaatcatcaaaagtatggaggaatagaatatgcagaatgaaagtcaaaatatagaatataaggaatcatggcgtgatgaatatctgaaatggatatgtggtttcgccaatgcccaaggtgggcgtatttatatcggtgtaaacgaccagaaagaagtaatcggtttatctgatgccaaacggttgttggaagatattcctaacaagatagttaattatctgggcatcgtagaagatgtaaaccttcttatggaaggtgataaagagtatatagagattgtggtctcaccaagtaatatgccgatagcctataaaggtacgtatcattatcgtagtggttctaccaagcaagaactcaaagggcttgctttgcagcaattcattatggaaaagatgggtcattcatgggatgatattcctgtttatggtgctactcttgatgacatagaccgcaatgcgattgactattttttgcaatgtagtatcaaggcaggtcgtatggatgaatcagaggccaattcgtcgaccgaagatgtattgcgtaatcttggcttgtttaccaaggaaggtgaattgaaaaatgctgccatcttgcttttcggaaagcatgttggtcagttcttcccatctgcggtattcaagataggacgttttcatacagatgagagcgatttgattattcaggatgtgatagaaggcaacctgattcagatggctagtagggtgatggaagtactccgaaccaagtatctgctttcgcctattcactatgagggattgcagcgcatagagcagttggagattcctgataaggcattacgagagttgatatacaatgccatttcgcataaggcttataccggtcctgccatccagatgcgtatctacgaccgcagtatagaattgtggaattatggattgttgccaaaagagttgactcctgcagctttgttgcagaagcattcttcttatcctcgtaaccataatattgctaatgttttttacaaagcaggttttgtggagtcatggggacgtggtttcaagaagattgccgaggagtttgaacgtgccagcttgccattgccaacgatagaagaaaatggaggtggcgtgatggcgattattcagcgcaagacgatagacgaagttatcgcagagcgtggcggggatgtcggtgtaaatgtcggagacatgtcggagataaatgtcggagacgtgtcggagattaaactgtctgatagacagcaaattattgtttcaataataaggtctaatccaacagtttctgcgaaacaaatgtcggagactttgtcggtgacttcgagaacgatagaaagagatttggcggtaatgcaaaaagcgggtttcataaggcacgaaggtaaagataatgccggtgtttgggtgatactcgaacaaggaaatacgaattcttaatagtgttaaatatgaagcagaataataatgagcaaattttcttcgatatgttcgaagaggttgcaaccgaaagcatcgttgaggctcggaatgtatacacctatgaagaaattaatgggtgctatttggaggcgaaggagatagctgatcttgcaaggaagaatttgctggagaaattgggaggtacataaaaaaataaatcccaccgaagcgggactataggttttacccttcggcatttctgccttattgtgataagatgtaggaaatcttattttctgctgcaaatataatataaaatatttgtttatccaataaaaaggttgtaattttacagaaaattaataattaagtataaaaactatacaatatgactaaaatacttggaattgataccggaaccaatagtcacggatgggctattgtggaaaaacaggcagatgaatatcatttgcttgataaaggtgtggacatcttccaggaaggtgttttaaaaacagaaaaaggcaaagaatattctaaagctgctgagcgtacagctcataaagctgcaagagtaagaaactatcgtattaaattacgtaagatacgtttgcttcgtattttaagtgatgcacatttgtgtccaccactttctaaggtagaactttctgtctggagactcaagaaggagtatcctaagaatgaattgtttatgcaatggcaaagtactgatgatgaatcagaaaagacaccatacgcttatcgacacaaatgccttcatgaaagtttggacttcagtagtataactgataggcatattttgggtcgtgctttttatcacatgattcagcgacgtggctttttaagtaatcgtaaagatcagagtgctgatgatacaggaaaggtaaaagaaagcatcagtaaccttactcaagagatgcatgatgctggttatgagtatcttggtgattatttttactctctctataataaaggagagaagattcgtaatcattatactgcgcgcaatgagcattatctggcagagtttaaggccatttgtgagaagcaggatttagataagaatcttggtcctgaggtggtacgccaaatagaaaaagccattttcgaccagcgaccattaaagtcgcaaaagggacaagttggtaaatgcgtatttgagaagaacaagacaagatgtgcttcttcacatcctatgtatgaagagtttagaatgctctcttttatcaataatataaagattcagactccaaatgatgatgtattacgtcctctgtcttcagaggagcgagcactcattatgcctttgttcttccgtaaatcaaagaagttgtttgactttgaagatatagcaaagaaattggcacccaaaaaacaatatggtttttacaagaagtgttctgatgccgaaatgccatatcttttcaattaccctatggatacatctgtttctggttgtcctgtaactaccgctttaaaagatatctttggagataattggattgattctctttgcgaaacctatacgctagccgagggtaaaagtcgtttgaatgtagtcaatgatatttggcatgtattgttcttctatacagatgatacaaaacttgcagagtttgctaagaatcgtctgcaattgaatgatgaagaagcaaggaaattttgcaagatttctttgccgggtgattatgcgtctttaagtttgaaggctatctgtaagattcttccttatcttagaagaggtttgatttattctcatgccgtatttttgggtaacttatgtgaagtgatgccgcaatatgaatgggatatagaagaaatgcgtaatgctgctattgagcatattatccacgaaatgaatcagattgattctaaagacgaaagtactttagagaagcgtatcaaagaatatttgaaaaatcagtatcatgtttctgatgataagcttaaaaagttataccatccttctaagatggataaatatcccagagtattgcgtactaatgatcatggcgtttatcagcttggttcacctcgaattgatagtgtgcgtaatccaatggctatgcgttccatattcagattgcgtaaattggtaaaccgattgttggaagagggaaagatagatctggatacagagatccatattgagtttgctcgtgagttgaatgatgcgaataagcgtcgtgcgatagcgaaatttgcaaaagataatcagaaaaaaaatgatgaggctcgtaagaagattatagacaaaatgggggagaagtataatgttaaagatgatgatatcctaaagtgtattctttgggaagagcagggacatatctgcttatatacaggcaggcagattgccattcccgactttgtaggaacaagtcaaaaatttgatatagagcatacgattccccgtagtgtagatggtgacagtacaagaatgaatttgacgctctgtgatagtcgcttcaatagagaaatcaagaaaaccaagttgccggcagaattgcctaaccatgatgaaattatggcacgtattaatgactggagagaaaagtatgagtctcttgatgggcaaatacgtaaactgaggggaaaatcaaagggggcaacaaccaaaaagctaaaggatgacataatttataatcgtcatcttttggaattgcaacgcgattattggcgaggtaagtatttgcgtttcacgatggagattgtacctgaaggatttagtcgacgccaaggtactgatgtcggtgtgatttctaagtatgcacgtctttacttgaaatcccttttcaagcatgtctataccgttaatggtattgctacttctgattttagaaagatttggggtgttcaagatgtatatggtaagaaagagcgtgtaaatcatgttcatcattgtattgatgctatcgttgttgcatgtataagccgagacgaatatgataagttaagtgcatactatcataatgaagaaaatcataaatggtatggcatgtcaaaggcttattttaaaaagccatggcctacatttgttgaggatttaaagaatgtgcaagatgaaattttagtttatcattatactccagacaatatgcctaagcaaggacgtcgtaaaatacttcttgatgtagaagttgatggaatcaaaaagaaaaagaaggtcctttgtaagggtgatgcagcaagaggtttattgcatagcgatacatactatggtgctatagagaacgatggcgtggtaagatacgttaagcgtataaatttggcttctatgaaggtgaccgatgttaaaaatatcgttgatgatgctgttagaggtattgtagaggctgctatcagagaaaagggctttaaagaagctatggctggaactatatggatgaatgaagaaaagcaaattcctattaaactgaagtttcgcaagtgaataaatatcaacttgcttgtttataaatatacatattacgtagcgtatgggcaacaggattactttcgatgaaatctgccagcaactctgtagcatctatagagtaacgctctgctgcttccagaacgaagtccaaaatgatagcccatatcttgtccgttacggacaactcgagagtgtcattggtaacctctgtaaagagaccaccgatggtttcatacgcttcaaatctcttcactgtacacaagatgttatactgcatcattgtcaaagtgaagctagcaatttgagcggcaaaatgtacagactggcatttaccaaagttcagcaaggtcttgcaatccttgtatgcaacttcggtagcccatcgtctggcataaatacgatacgcttcaaggaagctaagagaaaggtctgtggtcaacaacccattccagtttcccttgcgtcctcgtttgcaaaagaacaaacggactggcacaccatccaacttaacgtccattgtacaataggtacagcgaagtattttgttgtgtttgcatgccttctccttttgcaggtgcttgatgatttgcttggcattcatcttgccatgcttcgttgcatagttggttttgcccagtttaatcatgcccaacaggtgacacttgatatgtctgctggaaatgaaacgcacaagcttagtgtttgtaaaccagctatctacgagcaagtaatcaaagcgaacacctcgct

SEQ ID NO: 4241 - DNA, 7892 bp, synthetic construct
  misc_feature 1..7892: note = Synthetic
  source 1..7892: mol_type = other DNA
cagcataaattaaaaataatggtcaaaatatttggattttaacatagaaagcggagaaagattttagttaaagattattctaaagatttttgttaagatttcgagcatctctgatgcgatccataataaaaccctccccaaaagcgaggaactcgagcgcattttaagttgagatttttgttaaggattttgtttgctgcctccctgaattacagattatttcttgcgaagcaacatcttaaaaaagatttcctccaaagatttcttgccgtaggcaactaaaaaacatccacggatcacacggacgacacggaatcacggaacaagcagcgccgggctaaggaagcccaatggtttccttagcccagggcaacgccctgcgtacacaacaaaacattttacaatcgtcctataaggacaaaagtaaaatccgtgcgactaaatcatccgcatgcaaccttaagaggcttcacctaccatacatctttcatcatccaactgatggtgataaaaacggcaaaagctacaaataataatatgtacataatctatatttaaattgttgataatccaatgtggtttcgttcaagcccattttccttctatatcatagtaaggttttcgcctccaaaattacacatttttcttcaatccacaaactatttccaccttttattcattaatataggtatatttgaggccaaaacgatattccatagttttggtttatcgaaactgtcaactgtaacgcttgtaattgatgacattgacctgaacccatgacattgtgatttcattggtctgttcttgtggtatttatagttgacaacaaaaaaaactcccaccgaagcaggagtataggctttacaccttcggcaattactgccttattgtgataagatgtaggaaatcttattctgcttgcaaatttatattaaaaattttgtttatccaaatatttatcagtatttttacacccaaataaaaaaaataattaaaaatcatatattatgaagagaattttaggcattgatacaggaacaaacagtcttggttgggctatagtagaaaaagaagatgatgattatcaattgcttgacaaaggagttaacattttccaagaaggcgtaaaaatagaaaaaggtattgaggcttccaaagcagctgatcgtacatctcaccgctcaatacgaataaggtattatcgcataaaactgcgcaaaatacgcctattgcgaatcttaagtgataatcatctttgtcctcctctttctacttctgaactttctttgtggagacagaagaaagagtatcccaacacaaatgaactgtttatgcagtggcagaggacagatgaccatgagggaaagaatccgtatgccgatagacatagatgtctgcatgaaaaattggatatggataatattaacgaccgatacgttttaggccgggctttttatcacatcatccagcgtaggggctttttgagtaaccgcaaagaacaaggaggcgatgattctggaaaggtaaaagaaggtattaattctcttacgcaagaaatggaagaagcaggatgccaatatttaggtgattatttttatagcctttataataaaggtgagaaaatacgcaatcattatactgatcgaatagaacattatcttacggagtttattgcaatatgtaaacagcagaatcttgacgatgatttgaaagaaaaaataggtaaagcaatttttgatcagagaccgttgaaatctcaaaaaggacaagttggggaatgtgtatttgaaaagaataaaacaaaatgcccctcttcacatcctctgtttgaagagttccgtatgctttcgtttgtaaataatataaaaataaaaaccccaaaggatgacgtgatgcgctctcttaacaaagaagaacgcgaaagtattagtcctttgttttatcgtaagtcaaaaaaacattttgaatttgaggacattgcgaaaaaacttgccccaaagaaacaatatggattttataagaagagcagcgatgtagaaatgccgtatctttttaactatccaatggatactcctgtttccggttgtccagtaactgctgctttgaaagacatttttggggagaattggatagatgcagtctgtgaagtttatacgaatgcgaatggaaaaagccgtttggagattattaatgacatctggcatgttttgtttttctattctgatagtgacaaactagctttatttgcccgaactaagcttcaattaggagagaaagaagcaaaggcatttagtgatatttctattcctgcagattatgcttctttgagtttgaaagcgatttgtaaaatacttccttatcttagaaagggtttgatttattcacatgcagttttcttgggtaatttatgtgaagtgattccttcttacatttggaaggttaaagagatgcgtgaagctgcaatagatagtgtaataaaggaaatggatacttatgactctcgagataaacgtacttttgagttatgtataaaagaatatcttaaagagcaatatcatctaactgatgagattgtcgagaaattgtatcatccctcaatgatggaagtatatcctaaagtacgtctcaatcaccaaggaatttatcagttacaatctccgagaattgaaagtgtgagaaatccaatggctatgcgttcaatgttcagattgcgtaaattgataaatcgattgttagaaatgggtaaaattgatgaggaaacagagatacatattgagtttgcgcgagagttgaacgatgcaaacaaacgacaagccattgctgaacttgtaaagaacaattttgcggaaaatgaaaaagcgagaaaggctataaaagaactctacaaagaagaaactggtacggaggtagaaccaactgatgttgatattttgaaatatacactatggaaagagcaaaatagtgtttgtccttacacgggaaaaaatatcagaatttccgactttattggtgctaacccaatgtttgatatcgaacataccatacctcaaagtgtaggtggcgatagtacaaaaatgaatttaacactatgtgatagtcgtttcaatagagaaattaagaaaacgaaattgccagcagaattatcaaatcacgacgaagtcttacagcgaataaaaggctggaaagaaagatatgagaatttaaatcagaagattagaaaacaaaagaaactttccaaaggggcaactattaaagagcaaaaagattcgataattaaaaaacgtcatcttttggaattggagcgtgactattggcgaggaaaatatgaacgttttaccatgacgaatgttccagaaggttttagtcgtcgtcagggaacggatataagtgtaatatctaaatatgcacgtctttatttgaaatcgatatttaaacatgtatatacagtaaaaggtattgccacttcggattttagaaaaatatggggaatacaggagatatatagcaagaaagagcgtgttaatcatgtccatcactgtatcgatgccattgttatagcatgtattggtctagatgaatataacaaattaggggcatattatcatgatgaagagaacaaaaagtggtatggcatgtcaggtgcatccttccccaaaccctggtccacatttgttgaggatataaagaacattcagaatgaacttttggtttatcattatactccagataatatgccaaaacaaggacgtcgtagaataatgatagatgggaaaaaggtgctctcaaaaggcgatgctgctagaggctcattgcataaagatacatactatggagctatagagaaagaaggtgaagtgaagtatgtaaaacgtatagctatcgaagaactcgatgaaaaaagtgttgatgctattgtcgatgaaaccgtaaaggctatagttaagaaagccattgccgctaaggggctcaaggaagccaaagcatcaaccatttggatgaacgaggaaaaacaaattcctatcaaaaaagttagatgttatactccttctgtaaccaagcctttaaacatcagaaaacaacgtgacttatcaacaaaagagtataaacaacaatatcatgtcgtgaatgatgataattatctgttggctctttatgctggtcaagataaaaaagggaaagaaaaacgagattttgagatcgtaaatatgttagaggcagctcaatattataaaaccagtaacgataaggaaactactggctataatatggtaccattcaaaagtaaacacgattatccatttgcttacagtttgaaaatcggtacaatggtattgctttatgagaattcaccagaggaagtttgggatgcatcaaaaagagaaatggtgaagcgactatataaaattgttgggatgtcgtctatggttgtgtcgggatgttcttatgcaacaattacaatgaggcatcatgaagaagctcgatcaagtaaaaatttaaaagctaagaatggtacatataagcaaaacgaagaatttcgccctgttatagtaatgcttcatactcaaataaaagctcttgttcaaggctatgactttgatataaacgaattaggtgaaattaaaagattaaggtgatatgatcaagcaaacattattcttctcaactccatcatgcctttcattgaagaaccaacaattggtaatttcgtggaaagactgtgaagataaagtgacacgccccattgaagatcttggatgtgttattttggaaaatcaaatgattaatgccacgttgcctcttctcaacgagttggtgaagaataatgtggctgttgtcttatgtgacgataagttcatgccaacagcaatgttacagagtttagatgctaacgctactcaagcagaaactcttaaatatcaattggaagttagtgaaccaataaaaaaacaagtttggaaacagattattgaggcaaaaataaagaatcaagcagctatgctgaattctgtcggaagaaatggcgatgtgttgaagccattttatatgaatgtaaaaagcggggatagtgacaacagagaaggtgttgctgccaagatctattggaatgaattgtttggtaacaattttaaacgagaaagagatggggggaaccctaatatattattgaattatggatattctatactgcgagcagctacagcgcgtgctttattagggtctggacttatgccaaatttcggagtctttcataaaagtcgatacaacgcttttcctttagcagatgatgttatggaaccatatcgaccgtatgtggacgaaattgtttatgctctatataaagatggggcaacagaattaaacaagaatactaaagcttccattattcgagtcttgagcagtgatgtgaaaatcggaaaggttatgcgtcctttgcaaatagctttaacctttactacagcatcattggcaaaagtttatataggtaatctaaaaaaactatctttaccatttatgtgatgacagagtatagattaaatgcctatcatattatgtggatttttgttttctttgatcttcccgtgtgtacaaagaaagaaatgaaagcggcatctctttttcgtaagaatctagagaaagacggtttctcgatgatgcagttttctgtatatataagacattgtgcatcaagggagagtgtagaggtacatgtaaagagaatcaagtctctcttgccagaaacgggaaaggttagtatcttgtgtgttactgacaaacagtatggcgatatttataacttttgggggaaaccacagagtattaaaaggtcgaaaattataagaaaaaacataagcgaacctatccaattggaatttttttagtatctttgttccgaaaatagaaacctacacagctatttcttattagtcaatacagcataaactgttgatatacagacagtaattaactataggttgtggtttgatgtaggaaacgaaagatatacaacgcttcggtgataacctgtgcggtcttgcagttgtggtttgatgtaggaaacgaaagatatacaacgcaggctgttattagtcagtcagacgacaagttgtggtttgatgtaggaaacgaaagatatacaacgggttcagcgcaatgcgcttaaaacctttgttgtggtttgatgtaggaaacgaaagatatacaactccaggactcagacgaaaaacccaaacttgttgtggtttgatgtaggaaacgaaagatatacaacccaatgtcctataattcattatcttcatagttgtggtttgatgtaggaaacgaaagatatacaaccaaacccaaaaagctttgtgaacgcatcagttgtggtttgatgtaggaaacgaaagatatacaacatatatagtgagtattacgtatttgggtgggttgtggtttgatgtaggaaacgaaagatatacaacttccaccgattcatatcattagaagtttcagttgtggtttgatgtaggaaacgaaagatatacaacgtggtatgtggttggcaatatcgatatatggttgtggtttgatgtaggaaacgaaagatatacaacatcaacggaatgaaggcaaacggctttattgttgtggtttgatgtaggaaacgaaagatatacaacctgcggttgcgcttgctaaaaacaatttgagttgtggtttgatgtaggaaacgaaagatatacaactgaagcgcaaattcgtagtcgtagtggtttgttgtggtttgatgtaggaaacgaaagatatacaacacggtcacagatacactgataagccgcgagttgtggtttgatgtaggaaacgaaagatatacaacatgtttgtgcttggcagtatcgttacatggttgtggtttgatgtaggaaacgaaagatatacaactacaaaacatttcgccatcatgcaagaaagttgtggtttgatgtaggaaacgaaagatatacaaccatgtcttgtttgatttttcactcattttgttgtggtttgatgtaggaaacgaaagatatacaacagaagaaaatccaaacaccaccactacgagttgtggtttgatgtaggaaacgaaagatatacaaccggaaaagcgtgaaccaggggtgaaccaaggaaacaggttcctgttccacttgccaactattaaatccgcaaaagccattgttgtgtatgtgcgattttgctattcaaaaactgtcaaactgtcaactgtaacgtctgtaacacaaaaaaatcatttttggaaactgtcaactgtaacgcttgtaacgcaaaaaaaatggtttatggaaactgttatctgttatctgttatttgtaacgcttggtgtaaattggcgttgtccaagaaagatccacggatataaaatttctgtgatttctgtgcgacattaaaaattcgtatttccttgtccgagtatcacccaaacaccggcattatctttaccttcgtgccttatgacacccgctttttgcattaccgccaaatctctttctatcgttctcgaagtcaccgacaaagtctccgacatttgtttcgcagaaactgttggattagaccttattattgaaacaataatttgctgtctatcagacagtttaatctccgacacgtctccgacatttatctccgacatgtctccgacatttactccgacatccccatcacgttctgcgataacttcgtctatcgtcttgcgctgaacaatcgccatcacgccacctccattttcttctatcgttggcaatggcaagctggcacgttcaaactcctcggcaatcttcttgaaaccacgtccccatgattccttatattctatattttgactttcattctgcatattctattcctcc

SEQ ID NO: 4242 - DNA, 7328 bp, synthetic construct
  source 1..7328: mol_type = other DNA
  misc_feature 1..7328: note = Synthetic
cccttacaggacttgccatcagcattacttgcataggagaagccgaaaaagagcaaatagtctatcgtaacggagctcacgaaacagacttaatctgcgttacaggcgatttgggcgctgcctatatggggcttcagctccttgaacgtgagaagaatgtattcaaagggcagaaagaaatcaatccggatttttcaggaaaggaatacttattagagcgacaactcaaaccggaagcccgtcgagacattattgagaaattgcgcaatgcaggcataaagcccacagccatgatggatatttccgacggtctctcttccgaattaatgcacatctgtacccagagcaatgtgggatgccgtatctacgaagagcgtattcccctcgattaccagaccgcagtgatggccgaagaactgaacatgaatgtaattacttgcgcactgaatggcggagaagattacgagcttctgttcacagtccctattgccgagcatgagaaaatttcagaaatggaaggcatacgcattataggccacatcactaagccggagttaggttcggcccttatcacgcgcgatggtcaggagtttgaattaaaagcccaaggttggaatcctttgcaaaagaattaagcatagggacataacctggtgagtattcgataccaacaaaaggagttcttttttaatttagttgaaaagtaagtttggttatagcccggttaacatcgtttgctgtaaatagctgtctaagcggtagctttattctacgttcaactaaatgaaagagggccaaaaggggtcttaactttacagaaaatgaagtgaaataccgcctttagttctttcattgctccagcccttacaaaggaattcaataaaataaatgttcgtagcaactagtaacgggtatctatttccatcgcatttataaaggaattcaataaaaaaatgctgataataagttcattacaattattatcagcattttttcattacaaaacttgtaaaatagaaatgtttgccttacctttgcaaccgcaaacaaaaacaaggtgccatagctcagttggtagagcaaaggactgaaaatccttgtgtcactggttcgattcccgttggcaccaccttgaaagagagagagttacagaaatgtgactctctttttttattctctaatagagctaaagactggctaaagcagacaaatgttttctccaatgttttaactaaaagaacaattgtagatattatatgcatcccaaacctatttagatggcaacttattatggggttccataaaagaggtctccgtttcaggattgaatgaaattccgtaattaggaaaaaaattgtattcacactccctcatattatgtttatcgttatagatatatagtaattccatatttattctaatgatagtagatattaaaatttaccaaatcctatcatcctgaagcggaattgtaattcctcgatgcgggaaacgagggcatcaaaaaaataatatcctttctaatagatataaaaaactcctaccgaagcaggagtataggtctaacaccttcggccataaaggccttattgtgataagatgtaaatctttatattacaaatatataaattttatttgtaatataaaatattattattaatttcatccagaaaattagcaaacgttaatgttatgaataaaatattaggaatagacacaggtacaaatagcatcggctgggctattgttgaaaaagtagaaaacaaagattataaacttttagaatacggcacaaacatatttcaagaaggggtaaaagtagagaaaggagataaaccatcaaaagcggcagaacgcacaatgcaccgcaacatacgcaaacattattggcgcagaaaagtacgcaaaattcgtttgttaacaattctaatagagaataatctttgtcctccaattacaaaacaagagttgcgtgaatggagaactaaaaagaaatatccgcaaaatgagttattcttggattggcaacgcacagaagataaagaagatatcaatccgtatcatttccgttataactgcttaatgcagaaattggacatgagtgacatcacccagagatatattctcggacgtgccttatatcatctcaatcaacgacgtggatttctgagtaaccgcaaggagtctaccaaagaatcagaaggacaagttaaacaagatatctctcaactgacagctgatattaaatctgccggatgcagttatctaggagagtacttctaccagctttatcagaaaggagaaaaaatacgtactcactatacagcacgtaatgagcattatcttgcagaatttcatgctatctgcaagaagcaggagttagacaacgaattaatagaaaagctagaaaaagcaatttttaatcaacgccccttaaaatcccaaaagcaacaagttggcaaatgtacatttgaaacgaagaaatcatgttgccctacttctcatcctttattcgaagatttccgtatgtacagtttcattaacaacataagaattcagactccacaggatgatggattgcgtccactatcagcatcagagaggaagactatcactccgctatttcttcacaagccaaagcgcacattcctcttcgaagaaattgccaagaaattagcaggtaagaataactattgctacatcaccgataaagtcgacaaaccatataaatttaattattatatggacataaatgtaaacggatgccccgtgaacgcacaacttacagaaatttttggagacaattggctggacggagtaaatgaactctatacacttgcaaaaagcaaaagtcggattgaaatattgaatgatatatggcatgttcttttcttctatgacgatgagaaaaaactaaaggattttgccaaagaccgtttgcagctgaatgagaaagacgcagaaaagttctctcaaattcacatgccccaagaatacgcctcactaagtttgaaagccataaaaaagatacttccgtatttaaaagattacggattaatttattcagatgctgtattcctcgctaatttatgcgaagtcctgccatctcatgtttggtgtgtgaaggaaatgcgtaatgcagcaatagaacgtattatagaagttatacacgaaaaacattctattatagaaagcagaggaatagagcaccgtataaaagcttttctaaaggaatattatcatgtagaagatgaaaaattaaagaaattatatcatccttccatgattgatgcatatccccgtcaacaactcaataatgtcggattgtatcaattaggaagtccccgcataaacagcgtacgcaatcccatggccatgcactcattatttcgtctacgtaaagttatcaaccttttactcaaagaaagaaaaatcgatgaggaaactatcatacatattgaattctcacgcgagctcaataatacaaatcgtcgtaaagcgattcaagccaaccaacgtaacaacgaaaaatatcgagacgaatgccgtaagaagattgctgaactatataaagaacaaaaaattggtcgagagccatccgatactgatattttgaaatatcaactttgggaagagcaatttcataaatgcctatatacaggagatgaaatcagtcttattgattttttaggagacaatcctaaatacgatatagaacatactgtgccacgtagtgtgggtggtgatagcactaaaatgaatctcactctttgtcaaagtaagtttaatcgtgaaataaagaaaacaaaattaccgtctcaactagctaaccatgaggagatattgcaacgaataaactcatggaaagaagaatacgagaaaatagacaaacagatacgtaaactaaaagggtctcataatacaacgaaagaagcaaaagaccgtaacatacaacgccgtcacgaattgtcgctcttacgagattattggcgcggcaaataccaacgcttcattatgactgaagtgccagaaggtttttcacgtcgtcaaggtacagacatcagtatcatatctcgctatgccagactatatctaaagtctgtattccaccatgtatatactgtaaagggaattacaaccagcgatttccgcaaaatatggggaatacaagacgaatacacaaaaaaagaacgtataaaccatgcacatcattgcattgatgcaatcaccgttgcctgcataggggccaatgaatatagccagttggcacaatattaccacacattagaagaccacgaaaaatatggtatgtccaagccccactttccaaaaccttggacgacatttgcagatgacataaagcatatacaagacaatctgcttgtagctcattacactcaagataatatgccgaaagctgccaaacgccgcattatgacttcgcaaggcaaaatcatggcccaaggggatgtagcgcgcggctcattgcatctcggtacttattatggaaagattgaaagagatggagagataaagtcagtcattagaaagcctcttaataatgtaacaaatatagacaatatcatagatgaaattgtgaaggaaaaggtaaagcaagcaatatctactcatggaagtctgaagaaagctgttgaagcgggaatctggatgaacgaggagaaaggtattcctattaaaaaagttagatgttttacttctattcagagaaatacattggatatccggaaacacagagacatatctcgacatgactataaacagactttccatgtttggaatgaaaacaactatatgattgctatttatgagggacaagatgaaaaaggacggataaaaagagaatttgaagaaattaaaaacattgatgctgcaagatattatcgcaccagcaatgatcgtttagtaaccggcgatagtatagtacctatacagagtgccagtggatatgatttgttgtacaaattacaaattgggacaatggttcttttgtatgagaatactccggaagaagtatgggagcaagataaattgggattacaaaaacgtttatataaagtaacaggaatatccttagctgatggacggatggttctatttcatcaacaagaagcacggctatctacagaagtaatacaaaaagatggtgcattttcagtaaatgaagagtttagatctaaaataagagtaagcttaaatcagtttcaagcgcttatcggagggattgatttcaaaatcaatgatttaggagaaattaaacgaataatataacttcttatgattaaacagacattgacatttcagaatccagcatctcttttgttgagagacaagcaattgattatacagttgaaagacattgactatgaaatcactcgtcctattgaagatataggagtaattataatcgaaaacccaatggtaaagacaacggttcctctgctcaatgcattagcagacaacaatgtagccgtaatcttttgtgacgaccatgccatgcccaaatcgatgctggtaacacttgatggaaacgccacgcttcaagagacatatcgctatcaaaaagaagtcacattgcccatcaaaaaacaaatatggaagcaaattgtagagattaaaatcaagaaccaatcagcattgctcaacaaattgaataaagatggtgacatactcaaaccatattatacaaatgtaaaatctggcgatagtgacaatcgagaaggcattgcagctagagcatattggaatatacttttgggtgatgattttcggcgtgaacgtaatggtacacctccaaacaatcttctgaactatggctatgccatactccgtgcggctacagcaaggtcattagtagggtctggattatatccagcttttggaatatttcaccacaatcgatacaatgcatttcccctagcagatgatataatggaaccctaccgtccatttattgacgaagtagtttatcgtttatattatgacggcgcttgttctgatttaaacaaaaatgcaaaaatggctctacaacgggtcctattttgtgatgtaaaaatgggtaagcttacgcgacctttagaaattgccctcagccttactacagcttctcttgtaaagatgtataaaaaagaaacggaaaaactagtactaccttttttataatgagtgaaaatcgactaaatgcatatcatattatgtggctatttgtcttttttgatttacctgtgaccactaagaaagaacgcaaagaagctgctctgttccgtaaaaacttgatgaaagatggattcacgatgcttcaattttccgtctatatccgacatagtgcttcatacgaaagccaatccattcatataaaacgagtaaaatcatttgttccagagacaggaatgataagtattcttagtgttacagataaacaatatggtgaaataataaatttctggggcaaagaaaagaaaaaacttattacagcaccgatacaattagaatttttttagtatatttacctcgtaaaaacgccataaatgccacttcgtagaataaaatacttatataattcattggtaatgaatagatttcaatgtttacgttgtggtttgatgtaaagatagaagaatatacaacttctctgtaatttctctctctgtaatttctgttgtggtttgatgtaaagatagaagaatatacaactgtaattctgtaatttctctctgtaattctgttgtggtttgatgtaaagatagaagaatatacaacccaacatcagttttcgtctaaagtcactcagttgtggtttgatgtaaagatagaagaatatacaacaacaagaacatctccagcagaataatctagttgtggtttgatgtaaagatagaagaatatacaacaagataattgaggacacaactgtcgacggagttgtggtttgatgtaaagatagaagaatatacaaccctgttttggttttggagtcatagcgtttagttgtggtttgatgtaaagatagaagaatatacaacattttgaaagatagaattaacagcattagagttgtggtttgatgtaaagatagaagaatatacaacatttatttagatacttctcgcagtcagagagttgtggtttgatgtaaagatagaagaatatacaactctacacaagcggaggagtaccacactacggttgtggtttgatgtaaagatagaagaatatacaacacatagtagtttttgttatcggaagaggcgttgtggtttgatgtaaagatagaagaatatacaacttggtcaaggtctataaacgggtcg

SEQ ID NO: 4243 - DNA, 7105 bp, synthetic construct
  misc_feature 1..7105: note = Synthetic
  source 1..7105: mol_type = other DNA
aaaacgtcttcacccaagtggcgggtgtccatgccgatggcgacaacaagagcaacctctattgcaacgacctcctgcccgaacgtttcggtcgccggcgcgagtacgccctcggcaagaacagcggcaaggcgaacatccgcaagaacctcgaagacctgggactgcaacttgacgaggaatccatgcgcaaggtcacggcacgcatcatcgaactgggcgacaagaaggaactggtgactcaggaagaccttccctacatcgtctccgatgtcctgaagcacggcgtgcaggaagaccgggtcagactcaaaagctacatcgtgaaccttgcctacggactgaagccgatggcgacattgaaaatagaaatcaacggcaaggagtatgaagagagttccagcggtgacggtcagtacgatgcctttgtgcgtgccctgcgcaaggtctataaggtcactttaggccgtaagttcccgatgctgaccaactatgccgtgaccattcctcccggtggtcgtaccgatgcctttgtgcagaccgtcattacctggagttttgaagacaaggtgttccgcacacgcggcctcgatgccgaccagacggaagccgccatcaaggcaacggtgaagatgctgaatatcattgagaaggagtatgaaggataaatatgaaggattaaatatcaaatattaaatattatggactttaaaattgcagtattggccggtgacggcatcggccccgagatttctgccgtaggggtggacgtgatgagcgccgtttgcgagaaattcggacaccatgtgagttatgaatatgccatctgcggcgcggatgcgatagacaaagtgggcgaccccttcccggaggcgacatatcaggcttgcaagcaggcggatgccgttctcttctccgccgtgggcgacccgaaattcgacaacaaccccaccgccaaagtgcgccccgaacagggactgctggcgatgcgcaagaagctgggactgtttgccaacatccgtcccgtgcagaccttcaagtgtctgctccacaaatcgcccctccgtgccgagctggtggacggtgccgacttcatctgcatccgcgaactgaccggcggcatgtacttcggcgagaaatatcaggacaacgacaaggcgtatgacaccaactactacacccgtcccgagatagagcgcatcttgaaagtgggcttcgagtacgccatgaagcgccgcaagcacctgacggtggtggataaggcgaatgtgcttgcctccagccgcctctggcgtcagattgctcaggagatggctccccgctaccccgaagtcaccaccgactacatgtacgtggacaacgccgccatgaagatgattcaagaaccgaaattcttcgatgtgatggtgactgaaaacaccttcggcgacatcctcacggacgagggctcttgcatcagcggttctatgggtctgcttccttccgcctccaccggcgagagcactcctgtcttcgaacccatccacggcagttggccgcaagccaagggcttgaacatcgccaatccgctggctcaaatcctctccgtcgccatgttgttcgagtacttcgacctgaaagaggaaggcgcgctgattcgcaaggcagtggatgcctcgctcgatgccaatgtccgcacccccgaaatacaagtggagggcggagagaagtatggcacgaaagaagtgggtgcctggattgtggagaccatccgaaactattgattccatccatcaagctctgttgatgggacgaaggctgctttacgaaggtagggcagccttttttgcatttgagtggaattgcccgttccatcgggtagaatgtatttgtcggcataaaatgacaaaaatagcagatacttgtatctgtcaaactaagggaaaataaatggctggttataattggtttgcaaataaaaaactcccaccgaagcgggagtataggtttaataccttcggcatatagccttattgtgataagatgtaggaatcttattctctgaatgcaaatatagagtaaataatttgtctttcctaataaaacttgatatttttgtgaaaatgacttttcaatcgaaatatgggaaaaatattaggtatagatacaggtactaatagcttaggttgggctatcgtggaaaaatcgaatgaaggatgtaaactgcttgataagggagttcatatttttcaagaaggtgtaaaaatagagaaaggtatagaggcatcaaaggctgctgaaaaaactggacatcgggctactcgtgtgcgatattacagaatccgggtacgcaaaatacagttgctgaaaatcttgatagacaatcatctgtgtcctccgctttcagaggatgaattgaaaaaatggaaacagagaaaggtgtatcctttgaatgaacagtttatgtgttggcagcgtaccaatgacaatgagggtaagaatccatacgctgaccgacacaaatgtttacacgagaaacttgatcttgaaaatcttatggatcgttacattcttggtcgtgctttttatcatttgatacagcgtcgaggctttttaagcaaccgaaaggatcaagatggggatgatacgggtaaagtaaaggagggtatcagttcgttgtcagaagaaatgcaaaaggcaggctttgaatatcttggtgactatttttattccttgtataataaaggtgggaagattcgtggtcattatacagctcgtaacgaacattatcttaaagaatttaaagcgatatgcgagatacaggaacttgacaaacgtttgggtgtggatgtggttaaggctattgaaaaggcaatattcaatcagcgtcctctgaaatctcagaaagggcagattggcaaatgtgtatttgagaaaaacaagtcgaagtgcccggtatcacatccactttttgaagaattcagaatgttgtcattccttaataatgtaagaatccggactccaaaggatgaagtcttacgtcctctaaatgtagaggagcgggagaagattatgccattgttcttcagaaaatcgaaaaagaactttgattttgaggacattgccaagaaacttgctcctaagaaaatgtatgctttcaataagcagaatccgaatatgccttatctgttcaattatcctatggatgtatcagtctctggatgtgttgtctcggcttgtttgagagatatttttggtgaagactggctttctgcaatttgtgaggtttacactttgggcaacggcaagtcccgtttgcagattttgaatgatgtgtggcatgcactgtttttctattccgataaagagaaactggcggaatttgcaaaagtgcgtctgcaattgaatgatgaggatgcaaggaagttcagtgaaatatctatgccttctgaatacgcatcgttgagtttgaaagcaatatgcaagattcttccttatttgcgtagaggtatgatttattctcatgctgtgttcttgggcaatttgtgtgaggtgatgccgcgatatgtttggaaaactgctgaaatgcgtgaggctgcgattgagaagattctcagtgaaatggataattataatccgaatattgacggagccgctcttgaggtatgtataaaagattatcttaagagagaatatggagtgactgatgaagacttgaagaaactataccatccttctatgatggagacttatcctccggtgcgtcctaatggtgatggcttgtatcagttaggctctccacgaataagcagtgtgcgcaatccgatggcgatgcgttctatgtttcgtttgcgtaaattgataaacagactgttacaagagggaaagatagacaaagacacaactataaatatagaatttgcccgtgaattgaatgacgccaataagcgtaaggcaatagctgacaatgtgagggagaatcaaaagcaacgcgaggatgcacgtaagaggattatcgagttgtataaggtggatacaggtaaggatattgtcccaaacgatgatgaaatcgtgaaatacatcttatgggaagaacaggggcatgtatgtctatatacaggcaagcagattcgtatatctgactttattggggctgatccaaagtttgatattgaacatacagtacctcaaagtgtaggaggtgacagtacaaggatgaatttgactctgtgtgatagccgttacaatagagatgtaaaaaaaacgcaactgccgtctgaacttttcaatcatgatgagattctgtcgcgcatagagtcgtggaaaaagaaatatgaggaatttgacaagcaaatgcggcgactgcgcacgaatggcgtagcaaccaaagctgtaaaagacaagattattcagcgcagacatttgttacagctgaaacgtgattattggaaaggcaaatacgagcgtttcatcatgacggaggtcccggaaggtttcagtcgtcggcaaggtactgacatcagtataatctctaagtatgctcgtctttaccttcgatctgtgtttgataaggtttatacagtaaagggtattgctacatctgattttcgtaagatatggggaatacagggtatatatgcttcaaaagaacgggtaaatcatgtccaccattgtatagatgccattgtgatagcatgtataggcaaggcggaatatgacaaacttgctcaatattatcatgacaaggaaaatcatgtatggtatggttatgcaaaagctgattttgtgaaaccatggcccacatttgttgaggatataaagaatgtgcaaaacgaaatatttgtgtcgcactacactcctgataatatgtcgaagcaaggtcgcaagcataccgttgtcaatggtaagaaggtgctgagtaaaggagatgctgcaagagggaccttgcataatgatacttattatggagcgatagagcgtgatggcgatgtgaagtatgtggtaagacgtgaacttgcttctttggaagaaaaagatattaagaatattgtcgatgatgcagtccgcggtaaaatagaggcggctattgccgagaaaggattcaaggaagctatggctggcactatttggatgaacgaggaaaagcggatacctattaagaaagtaagatgttatactccgtctgttaccaatccgcttaatatccgtaagcaccgtgatgaatcattgaaagaatataagcgccagtttcatgttgcaaatgatagtaattatgcgatggcaatatatataggcaatgatgccaaaggaaaagaaaaacgtgattttgaacttgtaaacatgattgatgccgcttcttattataaaacaagcaatgataaagaagttgttggacatagtatggtgcctatcaagagtaaacatgattatccgttggcgtacattctgaaaatcggaacaatggtattgctgtatgaaaagagttcagaagagatttgggaaggaaatggcgttgaacgaagtaaacggttatataaaattgttggaatgagttctatgcgagtgtcgggctgttcttatggcgttatcttgttgaggtatcatgaagaagcgcgtcctgcggtagaaataaaggcaaaaaatggggcttatttgcagggtgaggaatttcgtccaggtataaaaatgcttcacactcagttaaatgccttaatacaaagttacgattttgatataaatgagttaggtgaaattaaacggttaagataatatgataaagcagacattatttttctcaactccagcttgcctttcattgaaaaattgtcagttagtgatttcatggaaggatagtgatgataaggtgacgcgccctattgaggatataggttgtgtggtgttggaaaatcagatgataaatatcactatgcctttgcttaacgagttggtgaaaaataatgttgctgtcattatatgtgataataggcagatgcctacatccatgttgatggggcttgatacaaattctactcaagcggaaagtttgaaatttcaagttgctgtaagtgagccgcaaaagaaacaggcttggaaacaaatcatagaggtgaaaattcgtaatcaggcggctttgcttgaaaaatacggatttgcctataaagaactaaagtctttatatatgaacgtaaaaagtggtgatacggacaatcgagaaggacttgcagccagaatatattggaacaacttgtttggcgatggctttaagcgtgaaagggagggggctcctcctaatgcaatgcttaactatggctattctatacttagagcggcaacagccagggcgttgttaggttcaggcttattgcccaactttggcatttttcataaaagtagatacaatgccttccctttggcagatgatgtgatggagccttatcgcccgtatgttgatgaaattgttttcgaactatattccagaggctgtgtggagctgtcgaagaatgctaaaatggatattatgcggcttttgacttgtgatgtgtctataggacagttgagacgaccgttacagatcgcgcttactatgactacagcttcactaatgaaatactatagtggtaaactgaaaaaactctcattgcctgtgtttgtatgactgaatatagacttaatgcttatcatatcatgtggttgtttgtcttttttgatcttcctgtaacgacaaagaaggagatgaaggcggcacagcttttccgaaaaaatctggaaaaggatgggtttgctatgatgcagttttctgtttatattcgtcattgtgcttcacgcgagagccttgaagtacatgtgaaacgggttaagttgcaacttcctgaaacaggacgggtcagtttattgagtgtaacagataaacagtatggtgatatgtataatttctggtgtaagcctaaaagtatgaaagtaagtaaaatcaagggaaaaaatattcaagaacccgttcagttggagtttttttagtattttcgtcaaagaattaagtcctgcacgccatttcttatgtgtgttaatatctaaaatgtgttgattaatagaatgttaaatgctataggttgtggtttgatgtaggaat

SEQ ID NO: 4244 - DNA, 7048 bp, synthetic construct
  source 1..7048: mol_type = other DNA
  misc_feature 1..7048: note = Synthetic
ataagttattgatttacagacgattaaatgttaatttaacgcagtattattataaatacttagttacaaaatcaactctttttcttatatttgtcaacaaattaaaaagctgacaattatgattaatgaatcattttctataagattgcgggaagcgcgacagatgatggggctcagcatggataaactcgtagagcgaaccaacggagccatcaccaagcagagcatctcccgatatgagaaaggcatcatgcgccctaagcgtgatgctctgcaagccatagtcaaagccctcaatatcagcgaggaatatttcgaaggaaccaatctcaagatagatatgcctatgctccgcaccacctccaatggcaagttgtccgaagacgagttgcaagccctggaagcgaaactctcgttttgggcagagcagtatcttacgaaggagaaagaagcgggttttcctacccggttcaagaatccgataaaaggcaccaaggtatcaacccttgaagatgccatccatgctgccgaccttcttcgtgaaaagtggcattgcggtgatggacctatcgccagcattctgagactcttggaaagaaaaggtatcatgatacttgctgctaatcttccagagtatgtcttcggaatgagcacctgggctgataagaagcatccgctgatgattctcgatttcaatccggaaaagagtagcgtagagaaacttcgcttcacggcagttcatgagttggctcatctgcttctcctcttcccggaagatagtccgctgaggctggagaagcgttgtgatctctttgccagttatttccttcttcctaaattggcgcttatcgaagagttgggttccaagaaacgtgagaagataacgctggaggagatgatcgacatcaaggaactttatggcgcatctctagccgcttccatcatcgctgccagggattacggcatcatcaccaccgagtataaacgggcatggtatgccgagcatatagagcctaatccacgagaaataggtaatggtcactatgcatttcccgagacattaggaagggagaagagagtcaattcgatagtagattcgtgaatgttgaatgtcggtgtaaatgtcagcatttgatgatatttaaaataggaaatactaattcttaatagtgttagatatgaagcaaaataataatgaacaaatcgtcttcgaaatgttcgaagaggttgcaaccgaaagcatcgctgaggctcggaatgcatactcctatgaagaaatagatgggtgctatcaggaggcgaaagagatagctgatcttgcaaggaagaatttgctggagaaattgggaggtacataaaaaaataaatcccaccgaagcgggactataggttttacccttcggcaattactgccttattgtgataagatgtaggaaatcttattttctgctgcaaatataatataaaatatttgtttatccaataaaaaagttgtaattttacagaaaattaataattaagtataaaaactatacaatatgactaaaatacttggaattgataccggaaccaatagtcacggatgggctattgtggaaaaacaggcagatgaatatcatttgcttgataaaggtgtggacatcttccaggaaggtgttttaaaaacagaaaaaggcaaagaatattctaaagctgctgagcgtacagctcataaagctgcaagagtaagaaactatcgtattaaattacgtaagatacgtttgcttcgtattttaagtgatgcacatttgtgtccaccactttctaaggtagaactttctgcctggagactcaagaaggagtatcctaagaatgaattgtttatgcaatggcaaagtactgatgatgaatcagaaaagacaccatacgcttatcgacacaaatgccttcatgaaagtttggacttcagtagtataactgataggcatattttgggtcgtgctttttatcacatgattcagcgacgtggctttttaagtaatcgtaaagatcagagtgctgatgatacaggaaaggtaaaagaaagcatcagtaaccttactcaagagatgcatgatgctggttatgagtatcttggtgattatttttactctctctataataaaggagagaagattcgtaatcattatactgcgcgcaatgagcattatctggcagagtttaaggccatttgtgagaagcaggatttagataagaatcttggtcctaaggtggtacgccaaatagaaaaagccattttcgaccagcgaccattaaagtcgcaaaagggacaagttggtaaatgcgtatttgagaagaacaagacaagatgtccttcttcacatcctatgtttgaagagtttagaatgctctcttttatcaataatataaagattcaaacgccaaatgatggtgaattacgctctttgtctgccgaggagcgagaacttatcatgcctttgttcttccgcaagtcgattataaaaaagaagcagtttgtttttgaagatattgcaaagaaactggctcgtagggaacagtatgggttttataagaagagcactgatgtcgaaatgccatatcttttcaatttccctatggatacatctgtttctggttgtcctgtaactgctgctctgatagatatatttggggagaattgggtcgatactctttgcgaaacctatactcttgctgagggcaaaagtcgattggatattgttaatgatatctggcatgtattatttttctatacagatgaggcaaaacttgcagagtttggcaagaatcgtctgcaattgaatgatgaagatgcaaagaaattcagtaaaataactctacagaatggctatggacgattgtgtttaaaagtaatttgtaaaattctaccttatcttagaagaggattagtgaaagatcatgcaatcttgttaggaaatttatgtgaagtgatgccgcaatacgaatgggatataaaggaaatgcgtattgctgccattgataatatcatccgcgaaataaataagacagattctaaagacgaaagtactttagaaaagcgtaccaaattagagaagcgtatcaaagaatatttgaaaaatcaatatcatgtttctgatgataagcttaaaaagttataccatccttctaagatggataaatatccaagagtattgcgtactaatgatcatggtgtttatcagcttggttcacctcgaattgattgtgtgcgtaatccaatggctatgcgttccatattcagattgcgtaaattggtaaaccgattgttggaagagggaaagatagatctggatacagagatccatattgagtttgctcgtgagttgaatgatgcgaataagcgtcgtgcgatagcgaaatttgcaaaagataatcagaaaaaaaatgatgaggctcgtaagaagattatagacaaaatgggggaggagtataatgttaaagatgatgatatcctaaagtgtattctttgggaagagcagggacatatctgcttatatacaggcaggcagattgccattcccgactttgtaggaacaagtcaaaaatttgatatagagcatacgattccccgtagtgtagatggtgacagtacaagaatgaatttgacgctctgtgatagtcgcttcaatagagaaatcaagaaaaccaagttgccggcagaattgcctaaccatgatgaaattatggcacgtattaatgactggagagaaaagtatgagtctcttgatgggcaaatacgtaaactgaggggaaaatcaaagggggcaacaaccaaaaagctaaaggatgacataatttataatcgtcatcttttggaattgcaacgcgattattggcgaggtaagtatttgcgtttcacgatggagattgtacctgaaggatttagtcgacgccaaggtactgatatcggtgtgatttctaagtatgcacgtctttacttgaaatcccttttcaagcatgtctataccgttaatggtattgctacttctgattttagaaagatttggggtgttcaagatgtatatggtaagaaagagcgtgtaaatcatgttcatcattgtattgatgctatcgttgttgcatgtataagccgagacgaatatgataagttaagtgcatactatcataatgaagaaaatcataaatggtatggcatgtcaaaggcttattttaaaaagccatggcctacatttgttgaggatttaaagaatgtgcaagatgaaattttggtttatcattatactccagacaatatgcctaagcaaggacgtcgtaaaatacttcttgatgtagaagttgatggaatcaaaaagaaaaagaaggtcctttgtaagggtgatgcagcaagaggtttattgcatagcgatacatactatggtgctatagagaacgatggcgtggtaagatacgttaagcgtataaatttggcttctatgaaggtgaccgatgttaaaaatatcgttgatgatgctgttagaggtattgtagaggctgctatcagagaaaagggctttaaagaagctatggctggaactatatggatgaatgaagaaaagcaaattcctattaaaaaagtaagatgctatacttcgataaaaaatccaatatctttcgataagaaaaaacaacgagatttgtcggataaagaatataaaagaaactattatgttgccactaagggtaattatatagttgcattatatgttggttctacaaaaactggcaaaagaaagacattttatgaatttgtgaatatgatggaagctgctggttattataagacgagtaatgataagtctgttgttggacataatatagtgccacttgaaaaagatgattgccagttggcttttatcctaaaaaaaggaactatggttatcttttataaagaaacaaaagaggaggtatgggattattctcaaaaagagacagtcagaaacctttactacgtatccgggatagaatccgatggtagggtaacgtttaagtatcatcaagaagcgagacgagacgaagaacttcctcgaaatgcttctgacacatcagatataaagcctaagataagagtcggtttggcttctgcaaagatactggttcaaggctatgatttcgagattaatgaattaggtgaaattaaaagattaagataaaaatgatatgattaagcagacattgttcttttcaactccagtttgcatttcacttaagaattgccagattgtaatctcttggaaagatagtgacgacatgattacacgcccaattgaagacatagggtgtgtagtcttggaaaatcaaatgataagcattactttaccgcttctcaacgagttggtaaagaataatgttgctgttatcttatgtgataacaagatgatgccaacatctatgttgcaaagcttagatgctaatacaacgcaagctgaaagtttaaaatttcagcttgctgttactgagccaatgaaaaagcaagcctggaaacagattatagcgtcaaagattgaaaatcaagccgcagtcttggctcttgctggtaagaataaagatattctcaaaccttattataataatgttaagagtggagattctgacaatagagagggattagcggcaaaggtgtattggattagtcttttcggtatctcctttaaaagagaaagggaaggcagtccgcctaatgcccttctaaattatggctatgctatattacgtgcagctgttgctcgtgctttgctaggttctggtttgctccctaatttgggcatctttcataaaagcagatataatgcttttcctttagctgatgatgtaatggaaccatatcgaccatttgttgatgaaatagtttttcgactttatggcaatggaattactgaactgaataaagaatcaaaggcagagataatgcgtgtgttgaattgtgatgtcaatataggaaaggttaagcgacctttgcagattgctttgaccataacaactgcctcacttgtgaaatattattctggagaaatcaaaaaactttcattacctattatgacatgacagaagatagactaaaagcttatcttataatgtggttatttgtatttttcgatttatctgttactacgaaaaaagagatgaaggcagcttctctcttccgcaagaacttggagaaagatggtttctccatgatgcaattttctgtctatatccgtcattgtgcatcaagggaaagtttggaagtgcatataaaacggataaaatctttgcttccggaggcagaaaaagtaagtttgttaagtgtaacagataagcaatatggagatatctataacttctggggtaagcccaaaagtattaataagagtaaaatatcgaaaaaagttatcagtgaacctgttcaattggagtttttttagtacttttgcattagaaattatatcctactcaccatttcttattagatagagtggttgttatgtactgaaaatcagtacattcaaatctataggttgtggtttgatgtaggaatcaaaagatatacaaccaccaaattaagcgtaaagtgtatcgtcaggttgtggtttgatgtaggaatcaaaagatatacaaccagagcaagagaaacgtgatgcagagaatggttgtggtttgatgtaggaatcaaaagatatacaaccagcacttaacctaagcagctttcggggtagttgtggtttgatgtaggaatcaaaagatatacaacgccaacaccatcacacagaaatgctttttcgttgtggtttgatgtaggaatcaaaagatatacaactcgaaattactgcgagtagaacggttgactgttgtggtttgatgtaggaatcaaaagatatacaacaggttgggcgataggtgcgagcatgaaccgttgtggtttgatgtaggaatcaaaagatatacaactcctgggatatgatgtgctctgttcctatagttgtggtttgatgtaggaatcaaaagatatacaacaggttgggcgataggtgcg

SEQ ID NO: 4245 - DNA, 6812 bp, synthetic construct
  source 1..6812: mol_type = other DNA
  misc_feature 1..6812: note = Synthetic
atttcaaagaagtcgaaaaccgacatattaaacgctaaccattaatattatacaactatgataacttacgaatttcttcaacaatattggtggttcctgatttcggtgctcggagcgctgttggtgttcttattgtttgtgcaaggaggacagacactgctgtgtggcgcaaaaaccgaaggagcacgcacaatgatggttaattcactcgggcgcaaatgggaactgtcgtttacaatgcttgtagtgtttggcggcgcattcttcgcctccttcccgctgttctactccaccagcttcggcggtgcctattggctgtgggtgataatccttttcagctttgtaatccaggctgtgtcgtatgaataccgcagcaagccgggcaacatctttggcacacgcacattcgacacattcctgtggctcaacggcatagtgggctgcttcatgcttggcgtggcggtatcgacattcttctatggcgcagagttcaccgtagagaaaggcaacctgctcgacgcatcggctccggtaatctcgcgctgggcatccacacgcggtcttgaggctctgctcaatataaacagcatcgttttcggacttgcaatcgtgttcctagcacgcacacaaggtgcgctctatttctgcaacaacatagccactcccgaggtgtttgcacagcagaaaaagaatgtgctctacaacggagcggtgtttgtggttctgttcctcattgtcgccggcacacttctccttagcgatggctaccaagtgggcgctgatggcaaaatcgagacagtggcttacaaatatttcctcaacttcatcgacatgtggtgggtattgctgttgttcctcgtcggcgttgtggcagtgctctacgcgataatccgcacagccttctcggagcggtttacttgcggcatctggtacagcggaataggcacagtgcttgtagtgctcgcactcttcttcattgcgggctacaacaacactccttactatccatcgcttctcgacccgcaaagttcgctcaccattcaaaacagttcgtcgagcgaatttacgctctcagtgatgagtgtggtgagcctcttggttccctttgtagccgcctatataatatatgtgtggtacaaaatggacaaaacaccaatcacggaacaagaaatggaagaaacagcacacaaatactgattcccccacccgatttcacaaaaatggtcgccccggcggccattttttgtgcttttatgcctaaattttaacagatgaagcaaagtttaactttcatgtgcccgaatccggcacacccaatgtattatatttgtgcgcatgaacattgacatgatgaaaatcgactccgccgacagaaaaatgggatggggacaaaaaaactcccaccgaagcgggagtataggtcttataaccttcggccatcgcggccttattgtgataagatgtaaaaatttatgacgcaaattaaaggataatatttggaaatctcaaatatttgcaataattttattgtcaaattaataaaaattaactgacatgacaaaaatattaggtatagacaccggcacaaacagccttggatgggctattgtagaacgaaatgaagagacaaacgaatacacgcttttagaccacggaacccacattttcgccgagggcgtgaaaattgaaaaaggtattgaatcatcacgcgcatccgagcgcaccgagcaccgcggagtgcgccgccactattggcgcaggaaagtgcgcaaaattcgcttgctcaaagtactaatcgacaaccacttgtgcccgccgctatcggatgccgacttgcgccgctggcgactcaacaagcactaccctatcgacgaggctttcatggcatggcagcgcaccgaggacaaagagggaatcaatccctatcgtttccgtcacatttgcctctcggagcggctcaatcttgatgacctcacccagcgatatatcctcggtcgagcactctaccacatcaaccagcgacgcggcttcttgagcaaccgcaaagagagcacaaaagagagtgatggaaaggtaaaggaaggaatatcaaaactcgaagatgagatgcgcgcggctggatgcgcctatatcggggactatttcttcaccctctacgagcgcggcgagcgcattcgcactcactacacttcgcgcaaagagcactacctcgccgagttccgcgccatttgtgccaagcagcaactcgacacagaactcacctctcgcctcgagaaagcgattttcttccagcgtccgctcaagtcgcagaagcagagcgttggtgtgtgcaccttcgaaaaagggaaggcgcgctgtcctgtttcccatccgctctacgaggaataccgaatgtggagttttatcaacaacattaagatgcagggaccgggcgataccgcactgcgaccgctcaagcccgaggaaatcaatcgaataattcctctgtttatgcgcaagagcaaatcttcgttcccgatggaggatatcgcaaaaactttgggcggaaagaaaaactattgctgcattaaggaggattctcccaagcagtacaagtttaactacttcatggacacatcggtgagcggatgcccggtaacagcccaacttatcgacatctttggcgacgactggaaatcggtaatctgccaggtttatacagccgccggcaacaagagcgaggagcaaatagtgaacgatgcgtggcacgcccttttcttctttgacgacgacgacaggctccgcgattttgcccgcgccaagttgcagttgagcgacgaagacgccgccaagtttgcagcaataaaaatgccacaagactatgcggcactgagcatcaaggcgatacgcaagatattgccctatctgcgcgactacggcttaatctatagcgaggcggtatttctcgccaacctgtgtgcagtgctccctgccggagtgtgggaggatgagaaacgccgcgcccacgcaatcgagggcgccatcgaagcgatacaccgcccaggcgacgacactatggagcaacggctcaaagactatctccgcttgagttacgatgtagatgacgagcacctcgcccgcattttccacccttcgatgctcgaaacctatcccgactgcaagcccgatgaacgcggaatatatcgcctcggcagcccgcgcgtcaacagcgtgaaaaacccgatggcgatgcactccatgttccgcctgcgccgagtggtgaacaggctcctcgccgaaggcaaaatcgacaacgaaacggttatccacatcgagtttgcccgcgaactcaacgatgccaaccgccgcaaggcgataaaggatttccagcgcgacaacgagaagacccgcgaggagtgcaggaagaaaatcgccgaggtgtttaaagatttggacatcgcacgtgagccgtcggacaacgacattctccgctaccgcctctgggaggagcagaaccatgtgtgcatctacaccggcgaatctatcagcctgagcgatttcctcggaagcaacccgaaatacgacatcgagcacactgtgcctcagagcgccggcggcgacagcactatgatgaacctcactctgtgccaaaaccgcttcaaccgcgaagtgaaaaagaccgccctaccctcgcaactcgccaatatcgaggaaattctcccgcgcattgcccattggaaggagaaagccgaggaacttggcaagcagattcgccgtctcaagagcgcgcgccctgccgccaaggaggacaaggaccgaaacattcagcgccgccatctcctctcgctccagcgcgactattggctcggtaaataccgccgtttcaccatgaccgaagtcccggagggcttctcgcgccgacaaggaaccgacatcagcgtgatttctcgctatgcccgtctctacctcaaatcggtgtttaaaaaggtgtttgtggtgaaaggtattgccacaagcgatttccgcaagatgtggggaatacaggaggaatactctcgcaaggagcgtgtgaaccatgcccaccactgcatcgacgctatcactattgcctgcatcggcccacacgaatatgcccgcctcgctcaatactaccacgaggaagccgacaacaaattctacggcagggagaaaccgcaaaacttccccaagccgtggcgcacgtttgtcgaagacatccgccacatccaggatagcctcttggtgtcgcactacaccgccgacaacatcgccaagagtgcgcgccgacgcatcgacacccccgacggccgcttgctctgccgcggcgatgtggcgcgcggctcgctccacctcgacacctgctacggcgctatcgaccgcgatggcgacattaaatatgtggtgcgccgttcgctcgattcgcttgatgaaaaagacatcaaactcatcgttgacgacgaggtgcgcgcccgtgtagagcagagtgtgaaggaatatggctccctcaaaaaggccgtggaagccgacggagtgtggatgaaccgcgaaaagggtgtgagaatacgcaaagtgcgtgtgttcactccttcggttacgcgtccggtgaatatcagacaccatcgcgatgtgtcccgacacgaatacaagcagcaaatccatgtgatgaacgaccgcaactacgctatggctatctacatcggcaaggatgccaaaggtaaggaaaaacgagacttcaaacttgtgaatatgctcgacgctgccaaccactaccgtcgcagcaacaagcgcgatgccaatgagcctctcgttgagcctacaagtccaaagggctacccgcttgcctatttcctcaaacccggcactatggtgcttctctacgaaaatagcccgaaagaggtgcttgaagcccgcaaagaggaattgcaacgacgattgtataaggttactggattgtctatattagtttccggtaatagcagttacggacgtatttacattacccataatcaagaagcaagaagcactactgaatacaaattccagaatggagcattcgcttcaaatgaagcaataaggcctgcgataatgctcctaagcagccaactaaatgctcttgtagaagggaaggattttgtgatgaacgaaattggtgaaatagttttcaaatgagttgtcatcatgtaaatattgacagccatgctgaaacagacgctcacctttcaaagtgcggtgtcgttgagtctaaaggaccgccaactggttatcaagccgactggcgatgacatcgcaatcacccgcccaatcgaggatatcggtgtggtggtcgtggaaaaccaaatggtgcgattcaccgttcctgttattaatgcccttgccgaaaacaatgtggctgtggtgttttgcgacgccacatcaatgcctcgctcgattcttatgtcgctcgacggcaacaccacgctgcaagaaatccaccgagcgcaaatcgaggcgggtgagcctgccaagaaacgcgcttggaaacagattgtagagagtaaaatcaagaaccaatcgctcttgctcgagtcgctcggactaagcggggcaccgctgcgctcgctcctcgccggagtgaaaagcggtgaccccgacaaccgggaagggcgcgccgcaaggctttactggagccaaatctttggacccggtttcaggcgcgaccgcaacggagagccgccaaacggcttgctgaattacggctattctatcctgcgtgccgcagtgataagggcattagtgggctcgggtctttatccggctttcggcatctttcatcgcaaccgctacaatgcgttcccgcttgccgacgacatcatggagccttaccgcccgatggtcgatgccatagtgtatgacctgtattccaagggatgcctaatgctcggaaaagaggaaaagatgactctccaacgtgtgcttgtgtgtgatgtggcaatgggcgaagttacacgacctctgcaagtggctttgtcgatgactaccgcctcgctcgccaaatattacaaaggtgataccgacaaactgcaactccctgtgctgaaatgagcgagtcgcgtatcaatgcctataatatcatgtggctctttgtgtttttcgacctcccggttaccaccaaaaaggaacgaaaagaggcggcgacatttcgcaagaacctgctcaaagatggcttcaccatgctgcaatactcggtgtatatcaggcactgcgcctcgattcaaagccgcgatgtgcacatgaagcgtgtgaaaattatggttccaggaaccggacaagtgagtatgctatgcgttaccgataagcaatattccgaaattgtcaacttttggggcgttgagaagaaaaaaatcgtgccccagcctcgacaactcgaatttttctaattctacacctattatatatgtgttgaattaatactttacaggaaattccctctttacctattgacaaacgagaaaaaatgttgtaaatttgcccatgaaatgtgataaaatgcttttatcaaaccactttttaagcgagaaaacagccataaatcgctgtaaaacagcctaatacagcgcttaggttgtggtttgatgtaaaaacggaatgatattcaacaaaatgccgatgccgcctctgacgtttttagttgtggtttgatgtaaaaacggaatgatattcaacgtgctacgtgtatgcgtgtgatatatctatgttgtggtttgatgtaaaaacggaatgatattcaactatgttttgggcgtttacagaccgacaagcgttgtggtttgatgtaa

SEQ ID NO: 4246 - DNA, 6394 bp, synthetic construct
  misc_feature 1..6394: note = Synthetic
  source 1..6394: mol_type = other DNA
cagcccatcaccttgacacactttcgtttcccgtgcactttcttcatgatgcgcacagaggtactgcccgatttgttctgcttcttctccacaaacatgccacaaaggtagcacttattcttcaaatgacacctggcgaggtgaattttcttggtggctgacagcaaaaaatggtctctgagacgaaacgaggtgacccaaaacgataccttacaaagccgtaactatcttattttcaaaaggatgacttttttaagacagaatcgtgcggaaaacaggagctcccaccgaagcgggagcataggttttacccttcggcctatgggccttattgtgataagatgtaggaatcttacggtgcaaaagtacggaaatattttgttatatcaaaataaaattgtacctttacacccaaatttatcaaatattaatactcatggaaagaattttaggtattgacacaggaacgaatagtcttggatgggctattgtggaacatgataatgaccagtataaacttctgtacaaaggtaccaacatatttgcagaaggagtgaaaatagagaaaggcattgagtcttcgagagcggccgaacgcactgagcaccggtctgtcaggaagcattattggcgcaggaaagtgaggaagataagcctgctgtcaattttggtagacaatgacctgtgtcctcccgtcggaaagaatgatttgcggctctggcgcttgaagaagcaatatccgatgaatgatgagttcatggcctggcagcgcacagaagacaaggagggtgtgaatccttatcgctaccgatatatctgcctcacacagaagctcgacctctccgaccagacgcagcgatacattctgggacgcgccttgtatcatctgaatcagcgtcgcggtttcctgagcaatcgaaaagaagctaccaaagagtcggaaggtgctgtaaaggaaggaatttcagagttgagccaggatatagagaaagccggatgcacgtatctgggcgagtatttctatcatttatataatgaaggaaagaagattcgctccagatatacagcacgcaaagagcattacctgaaagagtttcgtgctatatgtgagatgcaagaactcgaccatcaattggttgaaaagttagagaaggccatcttcacccaacgtccattgaagtcacagaaaggaaccgttggcgtgtgtacgtttgagaagggtaaggcccgttgtccgtcatcccatccgctgtatgaggatttcagaatgtacagcttcttgaacaacatcaagatgcagacacctcaagaccatcaattgcgctacttgactggcgacgagaaggcgctcgttatccccttgttcaagcgtaagtcgaagaagactttcccctttgaggacatcgccaaaaagttggcaggcaagaacaactattgttacgacggcgatgaagtagcaaagccatatcgcttcaattaccagatggatgtgtcggtgtcgggaagcacagtcaatgcacagttggaagaactctttgggactgattggctggatgctgtctgtgaggtctacaccttagccgaaggcaaatcgcggttccagatactcaacgacatctggcacgccctcttcttcttcgatgatgaagaccggctgaaaaactttgccaagaacagattgcagatggatgaagagcaggcagctaagttcagcaagatcacgctaccatccgactatgcatcgctgagcctgaaagccatccgtaagatgctgccttacctgaaagatttcggactcatctactcacaagccgtattcctcggcaatctcgttgaagtgctgccgcagcatgtatggggcatcaaggaaacgcgcgaggcagccatcgagaacgtcatcaaggtaatgcagtcgtacgacaaacggactgacagtcggactttggaattttgtgtaaaggactatctacgcgaaagataccaagccgacgaacaacagctgaagaaactctaccatccatcgatgatcgacctgtatcctcatgcgcaacccgacgatgaagggaagtatcagttgggctctccccgtatcagcagcgttcgcaacccaatggccatgcattcgctgttccgactgagaaaagtggtcaacctgttgttgaaagaggggaagatagacgagaataccatcatccacattgagttctcacgcgacttgaacgatgccaatcgccgaaaggccatacaagactaccagcgggaaaacgagaaagacagagaggcgtgccgtaagaaaatagaggagctgggattcagtcatgtcacggatactgacatcttgaagtatcagctatgggaagagcagcatcacaagtgcctttacacaggagaagaaatcaaacttgccgacttcttgggaagtaatccgaaatacgacatcgagcacaccgttccgcaaagtgtcggtggcgacagtacgaaagccaacctcacactttgcaacagcaagttcaatcgcgaagtgaagaaagccaaattgccttctgagctggccaaccacgaggaaatactgcagcggattgccgactggaaggagacctacgaagagcttgacaagcgcatccgcaaactcaagggcagccgtgccagtacgaaggaagagaaagacagcatcatccgtcgtcggcatctgctttcgctccagcgcgactattggcgaggcaagtatcagcgctttacgatgacgcaggtgcccgaaggtttctcccgtcgtcagggtacggacatcagcgtgatttctcgttatgcccgtctttacctgaagtctgtattcaagcaggtgtacatcgtgaagggtattgccacttctgatttccgaaagatttggggcatacaagaagaatacagcaagaaagagcgcgtcaaccatgtacatcattgtattgatgccatcacaatagcatgtatcggcaagagtgaatacgacaagctcgcgcaatactatcacgacgatgaggcccatcgttgggggcagtcgttggataaagcgcaattctcccagccttggcccacattcgtcagcgacatcaagaacattcagaacgaactgctgatagcccactattcaaaagacaacatgagaaagcacactcggaaacgtggtgagaacggttatgtacagggagataccgccagggcttcgctccacaacgatacctattacggagcaattgaagtggatggtgaagtgaagtatgttgtgcgtaagaatttggatagcttggtggaaaaagatgtcaagaacattgttgacgatgcagtccgccaaaaggtggaagacgctatcgaaaagcacggcaatctgaagaaagcgcttgagaatacaatatggatgaatgaagaaaagcagatacctattcggaaggttagaatctttactggctctgtaacccggcctattcacattcgtcaacagcgcgacttgtcgcgtcatgaatacaaacgtcagttccacgtgcagaatgaccgcaactacctgatggccatttacatcggaaaagacaagaaaggaaaggaaaaacgcgagtttgagattgtcaacaacattgaagctgcccgacacttcaagcgtagcaacggtagcattgacggccttgtaccacagacaagcgcaaagagcgggtatccgatggcctattgtctgaagataggaacaatggtgttgctctatgaaaattcacccgaggaagtgtgggaattggatcagaggaatttggtaaggagactgtataaggttactggattgtcttctatggttatttcttcatataattatggaaccattaatctgatccaccatcaagaagcacgtcccagcacggatgtcaagcaaaagaacggtgtgtttaaagccaatgaagaattccgttctggcataaagatgctccatacacaaatcaatgccctcgttcaaggtgtggacttcgaactcaacgatttaggagaaataaagaggttgatatgattaagcagacattaatgttttcgtcgcctgtatcgttaagtctgaaagaccggcaactggtaatcgccaaagaagattcagacgaaatagtaactcgccccattgaggatattggcttcgtcgtggtggagaatcagatggtcaagatgaccgttccgttgctcaatgctttaaccgacaacaatgtgtccgttgtcttttgcgatcataagcagatgcctcggtcgatgctgatgagcttagaggggaacacgacacttcaagagagctatcgctatcagatcaatgcttctgaaccaaccaagaaacgtgcctggaagcaaattgtggaaagcaaaatacgcaatcaggcgacactcttgcagaaagtggggaaaaatggcgatgccctgaggcctttttacatgaacgtgaaatcgggtgatgcagacaatcgcgagggcgctgcttcgcgcatttattggcaaatgttgttcgaagatggctttcgtcgtgatcgtgaaggagactcgcctaacaacttgctgaattacggttatgccattttgcgggcagccgtagcaagggcgcttgtggggtcagggttatatcccgcattcggattgttccatcgcaaccgatataatgcattccctttggccgatgacatgatggagccgtatcggccttttgtcgatgagatagtttatcgactctatgtcaatgaagccatcgagacgcttgacaaatcagcgaaagcagagttgctcaggatcatggtgacagatgtgaagatggataagataacgcgtccgctgcaaataggtcttacgatgacttccgcttccctgttgaaagtattcaagggtgatgaaaccaagctctcattgcctgtttttccatgagtgaagttcgacttaatgcataccatatcatgtggttgtttgtgttctttgacttaccggtagtaactaaaaaagagcgtaaaatggcagcgctgtttcggaaaaacctgatgaaagacggtttcacgatgttgcaatattccgtctatattcgacattgtgcttcttacgaaagccagcaggttcacgtcaaacgggttaaatccttcattcctgaaacagggacgatcagcatcctcagcgtaacagacaagcaatacggcgacatcatcaatttctgggggaaggaaaaaaagaagaaaatccatcaagaacccttgcagttggaatttttttagtaaatttgcacttgaaacagcaacatcaacaccacttcttgtgcagcaatattcatataaagttctgattttaaacaaattaagtaacacaggttgtggtttgatgtaggaaaggaaagatatacaacctaaaggcgaggaagatagaaaacttgaagttgtggtttgatgtaggaaaggaaagatatacaacccacgtccgacgatggtttctacgtcacggttgtggtttgatgtaggaaaggaaagatatacaacaatcgcgcagcagtgaataatactgcaaggttgtggtttgatgtaggaaaggaaagatatacaacatgtattacgttaatcagcttaataagctcgttgtggtttgatgtaggaaaggaaagatatacaacagcagcgcgcagcgattgcagcctatcaggttgtggtttgatgtaggaaaggaaagatatacaacatattgcccagatcgcgaatgtttacaccgttgtggtttgatgtaggaaaggaaagatatacaacaaaatccgctgatgtcgcccgtgttgatcgttgtggtttgatgtaggaaaggaaagatatacaacattccctcgctcatcacagataattgatcgttgtggtttgatgtaggaaaggaaagatatacaaccgggtttgacatcaccgaggggaggataggttgtggtttgatgtaggaaaggaaagatatacaacaaatccaatttaaagataatcaacacatggttgtggtttgatgtaggaaaggaaagatatacaacggcgtggagacaggggaagtattgaccattgttgtggttttgatgtaggaaaggaaagatatacaacttcaccagaatgtcgatgctgtagggtaccgttgtggtttgatgtaggaaaggaaagatatacaacatgcttgaaccaagcgataatcttccattcgttgtggtttgatgtaggaaaggaaagatatacaacttgcctcgttgagttctgatacgttgcaagttgtggtttgatgtaggaaaggaaagatatacaacggggcagtgtcagttcgccgtaactctgcgtcaatttgggtgatcataaaatgccaattttccaaacgaaaattttttttgcgaaaatacctacacttgtgcact

SEQ ID NO: 4247 - DNA, 6391 bp, synthetic construct
  source 1..6391: mol_type = other DNA
  misc_feature 1..6391: note = Synthetic
cagatacccgggaagtatcttttctattactgttggggaagccaggatcattcctttggttcccaatgttttaattaattcaggcaattcgtataaaataccctgaccctgaatgtatttaccaggaaaaactgcttttgtatgcatcgttattaatatttatgaatttgcggattatttattaaatagccgctgaacaaaggtgtaaaacaaatcggagtaatgaaaggggggagggcaaacattaaaatgggaggcattattttgtcctatccatttaggtttaaagcggtcagtcaccgcaacagtaaactctgcggctctctgagcttcctctgcggtaaaaaaaagatttaaccgcagaggaccgcagagatttacgcagaggaccgcagagaaatcccgtaattacaatattatcaactgattggatcaacctggaatggctattcaagaaatgtccaaatttatgccgtttccggtctatcaggaaaaactcctgacttggaggtcaataatctagcaaaaacaataacccacagccatttccaccagcatgcttcaaaggtcgtaaatatatcgctgaccttgcgaaactggctgattggattttacatggttgagtacgaatgaagcacccttgttcttgtcgggttctttacctgttccaattgtggggtcggcaaccccacaatctcgatcgttgcaaaaagtggggacatcgcgaactccccaaaaaggaacaactcgaagcttttattacaaacgagttaatgaaatggaaccgatgaggtgtatgttgctttttctgctccaaatcatcagtcgctgtccgatgaattccacctggctgttaataataatgatacagttcaggatctgccgtttaaccatcttatgttgttgctctccctaaaaaaaactcccaccgggtaggcgggagttataggataaaatccttcggcatgtagccttattgtggtaagatgtagaattacttactaaccaaaagtaacacattctattggtttcttatggctttttttgaaaaaacattttttttgagccaatccattcagaagtacttttgagccggatggtgctaaccagccggattttttatccattgttaattgtcagaaacctttcatggaatttacctacctttattccgtagaaggattcaagatatcatttttgccattaatgtattaaaaatcaataaaatatctaaaaacatattgttgttttgcacctattcagattattaaaccttcagcaaacgcaaaaaatggaaaaagtattgggtcttgatcttggcaccaatagtatcgggtgggccataatcgaaagaaatgaaaaagtcagacttgttgaccgcggagttcatatctttcaggaaggggtaaaaattgaaagtggcattgagtcatccaaagcggctgacaggactagtcatcgttcactgagaaaacattattggcgacgccgggcacgcaaggtggaaaccctgaaaattctgtccgacatgggattttgcccgaaactttctgctgatcagctgaaagcttggcagcagaaaggagagtatcccgacactgaggattttatggcctggcagagaaccaatcagaatagcatggctaatccgtactattatcgttatttggctgtaaatgagaaattggatcttagcctggtaacgcaccgatatatactgggtcgcgctctgtaccatattgcccagcgacgaggtttcctcagcaatcgtttggaaaaaacaaaggccagtgagggcgaggtaaagaaatccataagtaccctgagccaggaaataataaatgcgggctgcgtctttttaggtgaatacttctaccaaagctatcaaagcggcaaaaaaatccgaaaccactacacatcacgggttgagcattataaacctgagtttgataaaatatgcgagttgcagggcttatctatcgaagacaaaaagaatctggagaaggctatattttttcaacgtccgctgcgctcacagaaggggttggttggaaaatgtacctttgaaaggaccaaaccacgatgcccggtttcacacccaagatatgagtattacagaaccctttgttttctgaacaacatcaggatcaagactccatcggacgagcagttgcggcagttgaattctgctgagcgtgagaaaattctaccgctgttttataggaaaagtaaagagaattttgattttgaagatattgcgaagttggttgctggtagaggtaattattcttattttaaagaacctcagggaaaaccatatctctttaacttcaaaatgaataccaatgtctccggatctcccgtcaccgcccagctcaaggatgtttttggagcggattggatgggcaggattgaaagatgttacgtagatagcgggaacaaaacccggaaacagataatcaacgatatctggcatgtgctgttttcttttgacgatgaagccaggctttttgaatttgctcaatcgaaacttctgttggatgaacaaaaggccaaaaaattcaccaacattaacattccccaggactatgcatcgctcagcctcaatgcgattgacaagatcatcccgctgcttgaagaagggttaatctactcacatgctgtttttttagccaacctggcaaaggtcgttcctaaggagatctgggctagcctggaaaaccggaaatttattacggcagagataattaagctggtggatgatcataaggttcaacctgatgtgaccattcagccaaagattattgattttcttagggacaacttcgatttaaaaccattcgcagagaataaactttatcatccatcattgatagaaacctatccggaggtgcgcgaaacgaaaggggatttttttcaactggagtcgcctagaaccaacgtcatccggaatccaatggccatgagggcccttttccagcttcggcgtctgatcaaccaactcctcaggcaaggcaggatcgacaggcagacaaaaatcaatatagaactctcgcgggaactgaacaatgccaatacccgcaaggcaattgaacaatggcagcgagaaattgaaaaagagaataaagggtatcgtgatgatattaagcaagatgtaggaattgcagaatacgaacccaatgaattggatatcctgaagtacaggctgtggatggagcagaataagatatgtctgtacacaggacgcaacataagcgtagaggactttatcggggcaaatcccagatttgatattgaacatacgatcccaagaagtattggcggggataattcccaaatgaacaagactctcgccgatcaggtatacaacagagagataaaaaaagcaagaatgccagttgaaatggcaaaccatgacgacattctggttagaattgaaaagtggaaagcgaaaatagatgagctggaaaaacagattgaaacctcaaaaaaacgcaggtttttcttatcaaaggaagataaggacaagcatatcactgcccgccaaaaagtgatcattgagttaaggtacataaaaggcaaatacgacagattcattcaaaaagaggttgatcctggtttccggaacagccagggtgttgatgcggggatcatttcgaaatatgcccgtctgtatctccaatctcttttcccaagggtatattcggtaaaaggtgagataacagcggaattccgtaagctatggggcttgcaggatgctatcagtaaaaaggaccgttcaaatcacgttcaccattgtattgatgccattaccattgcctgcataggtaaaagtgaaaacgattctttatcggattattaccggcacgatgaagagtaccactggggaaagaggggaaaacctcgatttgacaaaccatgggcgacgtttaccgaagatgtaaaaaacgttgaaaacgaattgcttgtttcccattatacagcaagcaacctggtgaagcaaaccaaaaagaaagtgagggtcagcggtaaaattatactggatgtaaccggaaagccgctgatgaagcagggcgactcggcccggggttccctgcataaggaaactttttatggagcgatccggaaaggtgaagaaataaaatatgttgtccgtaaatcattggcacaactcaaggacaccgatgtggagaaaattgttgataaagctgtcagggaaaaggtaaagaaggcaattgcacaattggggttcaaagctgccattgtatcaactatttggatgaatgaacaaaaaggggttccaatcaaaaaggtgagatgcctgactccaaccataacagatcccctgcatatccggcaacaaagggaccaatcgcgattcgcgtataagcgtcaataccatgttgccaatgacggaaacttcatgatggcggtttatgaaggaatagacgggaagggaaggacaaaacgcgattttgagctggtaaataaccttgaagcagctgccctgcttaaacagagtgccggaaagacaggactctccaatttgtttccggataaaaagggaaacctcacctttaaatgccggttgaggattggatcaatggtaattttctatgaaaactcatctgaggaggtatggggccttgatgaggcggatgtcaagaaaaggctttataaggtcataggtttgagcaccatacctgtaggaacctcctatggtaaaattacccttcttcatcatcaggaagcccgtccggcaaaggatttgaatgccaggaatggagcttataaatgcaatgaggagtacagggcacaaatagttataactcataatcagcttaacgcccttgtacaaggttttgattttcaaataacagtgttggggcagattgaatggataaaaagttaggcaatgcttaaaagagctctgtttttttcaaatccccttgttcttaccctgaaagacaatcaactggtattttgtaccagggaggatcctgacgagaaaagaaaagtgccgattgaggatattgggtttgttatacttgaaaaccaaatgataagtgttacccttcctcttctgaacgctttggtggagaataatactgcaatcattatttgcgatcaggccatgatgcccagcgccctggttcaaccgctggtggggaacagcatccaggaggaattgtataaaatccaggtgagcgccagcgaaccactcaaaaaaaacctgtggaaacagtgtgtcgaagcaaaaattgaaaaccaggcacggctgctcattcttttaggattagagggcgacagactcaaacctttttatttgaatgttaaaagcggggattcggataatcgggaagctgttgcagcaaagctttattgggaaatgttatttggcaaggaatttagccgtcaaagggaggggctccctcctaataatctgctgaattacggatatgcaatcctgcgtgcagcagtaactcgctctttagtcggttccggattgttgcctgccttcgggatttttcaccggaaccgctacaatccgttcccgctttcagatgacctgatggaaccttacaggccatttgttgacaggtcggcccgtgagctctataccaatggggaaactatgttgaccaaagaagttaaggcaaagctgatcagcttattatttacggattgccatttcaaaaaggtatgccgccctctggatataggactgaccattacaacggcatcattggttaaatgcctgaacggtgagcaaaagaccttgtcctttccgtttcttgaatagatgggagagataaggcttaatgcatatcacattatgtggttgttcgtcttctttgatttgccggtcaccttgaaaacggataggtgcaacgctgccaggtttcgcaaggacctggaaaaggatggatttactatgatgcagttttctatttacaacaggcattgcgcctcccgcgaaagcatggatgtgcatgtacggaggatcaggaagcttctgccaccaagagggctggtgtccattttgagcgttaccgataagcagtttggcgatatgatcaatttttggggaaagattgagcgaaaaaatgatcatcccccacaacaattggaattgttttgatatatttgaaattgatttttacatcataatttaacttcccaagtccggatgaaagttttttttaaagatattttcttatgtaactctcagattatgagtttatatagtcacctgggttgtggtttgatgtagaaagcgattgataaacaacgccggatcagcagaggagcgcaccaacgaagttgtggtttgatgtagaaagcgatttataaacaacattcttcgtcgatagtcacggatgcgtcggtt

SEQ ID NO: 4248 - DNA, 6181 bp, synthetic construct
  source 1..6181: mol_type = other DNA
  misc_feature 1..6181: note = Synthetic
cccccagtcccctcggtgttttatggtatatattttttcaatatattcctcaactccgattgcacttctatcttgaacttgcaatcaagaggggtttttcccactgccgttttagggcgtttgaggcccctttttaacactttttccgctataccccatcattacggcattttgaacgatgcataattttccaaacatcgtgcagaatttcctatctacgttgtttatcagtcaaaaacacgaagggtacaacgggtgatattctttagtttttcgtaaaaaccgtatttttcttcggtttttaacgtataaatattcgttagctactctaaatggttgattatcaacgcctctgtaatctgccttctcgtcagtatattcaaccgtctgtaccgctcagttttcagaaccgtgttaaaatctttagctttcgcgagaatatagaattgaacaagagtggtatatatagctttttgggccacctacaaaaggatcgggaaggcgcagcaggtccccgatagggggccaacatgattaaccccgggcggagggagggcgagcgcagcgagaactcccgccgcccggggtgtccccgagtcctctccctgccgcgtccccggagggggcgaacgacagcggcgacgcggcggatgttcgccccccttcggggacgtccgataggcagatacgcaaagccccgggcgcccggtccggtgatgtccatcgctttgctctggccatcaccgtcccgtgtgcccggggttcatcgtgttggcccccttcggggacctcttccgtggcagtccgtgtcatccgttgccaaaacatccgtcttgccgacggcagtccgacatcattctctattttctattctctattctccatttgcgaagaacccttggggattgggcaacggatagccgcgggatgaattttttgggcaacggatttcacggatttacacgggatgaattttgttgggcaacggatttcacggattaacacggatgccattctttacccaagggttcgccctcttcgagggcgctgcgccaaatgatggcggcgtgtatgatgaccaatgtggtaatgctgaataaaaaaagccctcaccaaagcgagggcataggataacatccttcggcaattgctgccttattgcgataagatgtaggatgatatttttcttatctgctgcaaaaatacaaaaaatatttggaacttaccaaattttttcttaattttacacgtaaattacgaaataactaaacaggtctatggaaaagatattaggaatagacacaggaacaaacagtttaggatgggccgtcgttaataaatatgatgacggacattatgaattgttggacaaaggcgttgatattttccaagaaggtgtcaacagagatcaaagtggagaatcttcaaaggcagccgcacggacggagaagcgtgctcttcgtgtgcgctactatcgtatccgcctgcggaagatcgagttgcttcatattctgacggagaatcatctctgtcctccattaagtaaggatgaactctccttatggcgtcataagaagatttacccgaagaacgagttattcatggaatggcagtccaccgatgacaagacgggtaagaatccgtatcatgaccgttatgtctgtctcactcagaagttggacctcactgatctgcaaaaccgctatatgcttggtcgtgcactctatcatatcaaccagcgccgcggtttcaagagcaaccgtaaagatctctccaaggaggataaggataccggtactgtcaatgaaggcatcagtgagctgagccaggagatcaaggctgccggttgtacctatcttggggagtacttctatcatctctatgagaaaggagagaagatccgcaagcactatacggctcgtgaggaacattatcacaaggaatttcaggctatctgtgagcgacaaggattggattccgaactggtcagcaagttggagcatgctatcttctatcagcgtccgttgaagtcacagaagggattggtcggccattgtgtctttgaaccgaaaaagacgaagtgccccgtttcccatcctctctttgaggagttccgtatgctgtcgttcatcaacgctatcaagattcagacgccatcggatacagaaatgcgaccgctcaacgacgatgagcgctctaagatcaagcctctgttttatcggaagagtaagagagacttcgacttttccgatattgccaagaaactcgccggtaagagtaaatatgcctattataaaggaggcatagcaccttatcttttcaactatttcaaggattccaatgtatccggctgtccagttactgcctcccttcgtgatcttttcggcgaagactggctgaatggtatcaaggaagtctatgataaggttgacggaaagtctgacctgcagattatcaatgatatctggtcggctctgttcttctatacggataatgacaaactggctgaatttggtaagcgccatctccagctttccgatgaggatgccaagaaatttggcaatatccccattgacgagggctatgcctccctcagtctgaaagccatcacgaagatcctcccttatctgagaagaggaatgatctattctcatgctgcctttatgggcaatctcgttgaggtacttccggctgatgtatggaatgatccgcagcgccgtgaagaggctataaaagaattggagacaacgatccacaactatggaaaggttgcggaggcccgaacattggagcagtgcctcaaagaccatctgtccgtaaaatatggcgtgcctgatgagcgattggaaaagctctatcatccgtcaatgatcgagatgtacccgaaggtaccgcttggcgttaataagttgggatcaccacgcaataattccctccgcaatccgatggctatgcgctccctcttccagatgcgtcataccattaaccaactcctcaaggagggtaagatcgaccgcaacacgactattcatatcgagttcgcccgtgaattgaatgatgccaacaaacgaattgccttggcacactatacccgtgacaatcagaaagagcatgacaactgcaaaaagaagatcatcgaactctacaaggaagaaaccgggcagacgatagagccaacggaaacggatatcctgaaataccagttgtgggaggagcagaatcatatctgtttgtatacgggaaaacagattggtatagctgacttcatcggtcccgatccatcctatgacattgagcataccattccccgcagtaaaggcggtgacagcacacgtatgaatctcacgctctgcagtagtaagttcaaccgagatgttaaacagacaatgctgccgtctgaacttcccgatcatgaattgattcttcatcgtgttgaggactggaagaagaaatatgaggatttggatgctcagatccgcaaggtacgaacctggagcggaatggagaagaatacaaaagaccacttaattcagaaacggcatcgtctccagttgcagcgtgattattggtatggtaaataccatcgctttgagatgaccgaggtccccgagggattcagtcgccgtcaaggagtggacatcagtgtcatctcccgttatggtcgtctctatctgaaatccttcttcgaccgtgtattcatcgttaaaggtctggccacatctgatttccgcaagatatggggcttacaggatgaatatagtaagaaagagcgcgtaaatcatgtccatcattgcattgatgccattgtcattgcttgtatcggtcctcatgaatatagccagttggcggaatattaccatgacgaagagaaccatgaatggtatggaacctctaagccgcatgtccagttgccttgggacactttcgttacggatatcaaggatatacagaatgagatctttgtcgttcacaatacgaatgataatgtccccaagcaaggcagacgagtaagacgcaaggatggcacgatgtccaagccttgtgacagtgctcgtgtacagctccatcttgatacctattatggagccattgagcagaacggcaacatcaagtatgtcgtcagaaaggcattggacagtaacttcaaagagtccgatattaaaaacatcgttgacgaaactgttcgggagaaagtacaggaggctgtcaagcgccttggctttaaggaggctatggcttctacgatatggatgaacgaggagaagcgtatccctattaataaggtaagatgccttacttctattacccgtcctctgccgatccggcatcatcgcgatcagtcggaaaaggactataagcaaacctaccatgtggccaataatggtaactatgcaatggcgatatatatcggcaaggataaacgtggtaaggagaagcgggccatggagacggttaataatatcgaggctacacgactcttcaaggccagcacggataaggagatgacggacaacaaccttgttcccttatctaagaatgactttccattggcttatgtgctgaagaaaggcatgatggtacttctttatgagaagacgccagaggaactgaaggaatgctccaaggaagagctcgtcaaaagactgtataaggtgacgggacttgcaacgatggttatctccaagaatacttatggagtcatagaattgactttccatgaggaagcccgtgcgagtacagaggtcaagggaaagaatggtgcttacaaaatcggagaagagttacgttcgaagatagtcatgcttcatacccagtttcgtgccctcgtagaaggcaaggacttcgagctcagtgccacaggagaaatcaaattcaaggactgatgctcaagcaaacattatttttctctactccggtgagattatcgttgaaaaacagtcagctggtgatctcctggagagattccgatgatatcgtgacaaggccgatagaagatattggctttgtcatcatcgagaatcagcaggtctccgtgtccatacctcttctgaatgaattggtacggaataactgtagtgtcatcttctgtgacgagaggcatctgccctcttgcagtgtcatcgggtatgacgtcaatgccacacaagcggaatctgtcaagatgcaggtatccgtttccgagcctcggaagaagcgggcatggcaacaaatcatcgagatgaaaatcaggaatcaggctgcccttcttaataagttggataagaaagggaatacacttaaacgttgctattccaatgtcctcagcggcgacagttccaaccaagaggggcaggctgcaagaatctattggaagcagctcctgggtaaagatttcatccgggaacctcatggctttccgcccaataatttcttggattatggttacacgctgctgagggctgctatggcaagagccatcgtcggttccggcttgtcgccgatcttcggccttttccatcgtaatcgatatgatgcctatgcccttgccgatgatctgatggagccttatcgcccctatgtcgatgagatcgttatgatgctattggaccaaacggaattgacaaaggaaaataaagtacaactcttaaaagtcctcaccacagatgttcaaataggagaagtcacccgaccgctacaaatagcgctgacgatgacgacggcatccctggtgaaatattataaaggagaaacgaataaaatttctttaccgaacttcaaatgactgagttacgattaaatgcctatcacattatgtggctgtttgttttctttgatctaccggtgatgactgtaaaagaacgtagggcagctatgctcttcagaaagaatctggagaaagacggcttctccatgatgcagtattccgtctatatccgtcactgtggatcccatgagagtctggatgtgcatttcagacgggtgaagggactgcttcccgaagaagggaatgtcagtgtgctggctgtgacggataaacagtatagcaacatctacaactttacaaacgtgacgaaaaaaaaagggaagaagaatattatccgaaaggaacccgtacaactcgaacttttttagtatctttgcaacagaaacaagcctacatcatccacttcttatgtaggaaacgctatccacactaatgatt

SEQ ID NO: 4249 - DNA, 6108 bp, synthetic construct
  misc_feature 1..6108: note = Synthetic
  source 1..6108: mol_type = other DNA
aaccaggatcgttcttgtcaaacttcagcagacgttcaactgcctttacttttaatgccataatgaatttaaaattttaagggtgtaaatgtttttcctcttccttaaaacctcttccttagtccgtgtttctgcggtttcactatgaaaaacttactagtgcacttagaaaaattttttctatagttatgccgcaaattttgttgccttatgtcttttttgaacaacgatacaaaggtacgaaattttggtgaatttaccaaatttttaagcgactttttttgctgaaaatcgaacttttttttaggtgaggtttcccactttcccactttcccacttttgacatttgtattttcgattttactaaaacgaaaattttaatattatatattatatataatatataatattaaatatatatagagatataatttaatgattaccctttaagctactaccagggtttcttatagtaaaaaccttaatgtcaaaagtgggaaagtgggaaagtgggaaactttgaaaagtaaaatcttatgttacttatagagatagagatcggtgggggcaggtcattgatcttccaaaagaatcaaagcccagacctccggttgttatagcccgatttcatcaaagagcgagtcctcgccctctatgatgccgcctattggtggtatgaataccaaaagagggtgcttcattgcggcttgtcttctgccgtggtggtttattctggtttgcattatcgcaacaatctttaatatgatctttttccccaaaaagtattaataatgcattctttgtcgttatgggaatattgcaaatagacgtgacaggggacaatcccttgccacatatatccaataatctgtccctacgactaagtaaactcctttctctcagaggctgtcccttgtcaaaggatattgtggagcgtgttcatcttataatgaaaaactcccaccgaagcgggagtataggttttacccttcggccattgtggccttattgtgataagatgtaggaatcttacgagtgcaaaaataagaaaatactttggtatttcaaaatttattcgtaactttaccgcaaaatttaactaaatattactattatggaacggattttaggcattgatacaggtactaacagcctcggatgggccattgtagataaggatgagaatggatacagactggtctccaagggtactaatatattctcggaaggtgtcaaaatagaaaagggcatagagtcttctaaagcagccgagcgcactgagcatcgttcagtgagaaaacattattggagaagaaaagtcaggaagatcagacttttgaccatattatccgaaaacaatctatgccctccattgaagacttcagatttgagacaatggcgattgaagaaagtatatcctaaagatgaggattttatggaatggcagcgcacagaagacaaagccaacgtgaatccatataagttcagatacatctgtctgaaccagaagcttgatttatcagacatagcccagcgtttcattctgggtcgtgccctttatcacttgaatcagcgacgtggatttctgagtaatcgcaaggaatcaacaaaggaatcagagggcgctgtgaaggaaggtataagcaacttgtctgaagatatgaatgctgctggatgcgagtatttgggtgaatacttctatcaactttatcagaaaggcgagagaatcaggaaccattataccgcccgtaaagagcactatctgaaggagtttagagccatctgttccaagcaggaacttgatgaagatctggtgacaaagttagaacatgccattttcgaccaacgtcctctgaaatcgcagaagggtcaagtgggcacctgtactttcgagaaaggtaaatcccgttgtccttcatcccatccgctttacgaggatttcagaatgtatagtttcctcaataatatcaaggttcaggtaaatacgatgtttgagaaaggcgaaaggtatctcactaacgatgaaaagcagaagattattcctctgttcaagcgtaagtcaaagcgtgcgttcccatttgaggacatagcaaagaaactggcaggaaagaataactattgctacaataaaagtggagaagataaaccatacatgttcaactatcagatggacacccaggtgtcgggtagtcctgtcaacgcccaactcgaagaaatatttggtgaggactggttaaccagtgtttgtgaggtctatactctttcaaaggataagtcgcgtttccagattatgaatgatatttggcatgccttgttcttctatgatgatgaagataaactgaaagagtttgccaagaatcgtttgcaattgggcgatgatgatgcagagagattcagtaagatatcgattcccaacgactatgctgccttgagtttgaaagccatacgcaagattataccttatatgcgtaacaatggcttgatctattctgaggctgttttcttggcaaatcttgtagaagtcttacctcagcatgtttggggtgtaaaagaggtgcgcgaggctgctattgagaacgttatcgatgtgatgcattcttacgataagaacaatgtggatggcattaccctcgaaacttgcgtcaagacattcctgaaagaaagatatcaagtgagcgatgaaggcctgaagaaactatatcatccttcaatgctggaactttacccacgtcaacgccctaatgatgatggcatattccaattgggatcaccacgcatcagcagcgttaggaaccctatggcgatgcattctttgttcagactccgcaaggtggttaatctgatgttaaaagaggggtatgtcactcccgacactaagattcatatcgagttctcgcgtgatctgaatgacgccaatacgcgaaaggcattacaagcctggcagcgagaaaacgagaaagacaggaatcagtgtcgagataaaatcaaggagtttggaattgctaatccttcagatactgacatactaaaatatcagttatgggaggagcaaaagcatatttgcttgtatacaggtgagacaatcaaggaagaagatttcttgggcaaaaatcctaaatatgatattgagcataccatcccccgtagcgctggtggagatagcaccaagatgaatcttacgctatgtagcaataggttcaatcgtgatgagaagaagacaaaacttccctcgaaattagccaatcatgaagagattctagagaggataaaggattggaaggagaagtatgaggatctggatcgtcaaataaggaagataaccaccaagggggctacatcaaaagacgataaagacaggaaaatccagcgtcgcaggttcctaatagagcaaagcagatattggcgaggcaaatatgaacgttttacaatgccccaagtgcccgagggcttctctcgtcgtcaaggtactgatatcagtgtgatttcccgctatgcccgaatgtatctcaagtctgtgttcaaacaggtatatattgttaagggtttggccacatccgaattcaggaagatgtggggtattcaggaagaatatacgaagaaagaacgtgtgaaccatgttcaccattgtatcgatgccattaccatcgcatgcattggtaaagcagaatatgatcagttggctcagtatcatcatcagaatgatgaattcgaatactatggcaggggtaagagacctgagttcgtgatgccttggccatcatttgtaaacgatatcaagaagattcaggatgagttgctgattgcacattattccaaggataacttggaaaagtatacaagaaagaaccttcgtgggaaagatggtcggataattagggataagcaaggtaataagctgcaaatgaaaggtgatacctcaagaaactccttacataacgataaattttatggtgctatcaatcatgaaggaaccataaggtatgtttacagaacaaacatagaggatcttgatgccaaatccgttggtaacattgtggatcccgctgttaggaatataatagaaactgcaatagctactcatggtagcatgaaggctgctttgagttgtggcatctggatgaatgaggaaaaacgtattcccattaagaaagtccgcatattccgaaatgatgtaaagaagcctcttgaactcaaagatcagcgcgacttgtcagataaaggatataagcaacattattatgtgacgaatgatggtaattatatgatgcttattttttctaaaatcaacaataaaggccgcgaaattcgagagcatgtcgtgattaatagtttagaggctactgaagttataaaaagtcataagaggacacaaaatgggaaagtagcgtgggaatcatattattcaaaggaaggatatgatttgatttataaattgaaatcaggcactatggtcctcttgtatgagaataatggagatgagatttgggatcttgataaacgtaacttgcaaaggcggttgtatataattacaaagatgaaatttgatggaagaatatatatgatgcaccaccaagaagcgagagagaaaaaagatctagaagaaaaatctggctcatttaagatagacgaagattatcgtccaataattgtaaatagttataatcaattcaaagccttgattcaaggagtagatttcgagattaacgatttaggtgagataaggaggttgatatgataaaattgaccgcagaccctttacaattggaatttttttagtaaatttgctgcagataatccacattctaaccacttcttaggcattaaatagtatataaatgcctgatatacaatcaagaagtcaacctaagttgtggtttgatgtaggaataggatgatatacaacttggtcggttcatcagtgaccatcaagatagttgtggtttgatgtaggaataggatgatatacaactctatcaacttctggggacttgagaactgggttgtggtttgatgtaggaataggatgatatacaacatttaaggttagacaatgaaggggagccggttgtggtttgatgtaggaataggatgatatacaactgcaaacgaaaaaggtagaaaattctaattgttgtggtttgatgtaggaataggatgatatacaacggtcgctgaaaaagtagagaccatggtaatgttgtggtttgatgtaggaataggatgatatacaacagatagagaacgtggaggagtttatgtgcgttgtggtttgatgtaggaataggatgatatacaaccgcagcagctgcagatgctcgaagcggtcggttgtggtttgatgtaggaataggatgatatacaacgccacggccagtccccagtcgtagtcctgcgttgtggtttgatgtaggaataggatgatatacaactcctcggtctcgaaggtaccctcgtagaagttgtggtttgatgtaggaataggatgatatacaacgatgctgacggtcaatatctccgtctcatagttgtggtttgatgtaggaataggatgatatacaactttgtacagcattaaacattgaagacacaggttgtggtttgatgtaggaatagaatgatatacaactagcgcaggagatactgatccttcagcagcgttgtggtttgatgtaggaataggatcatatagcaaaggggctcgctatctcagcgaaccccgtatgctaattcattacaaacaaaaccaaataaccaataacctaaaacaaatatgcaataagaaaactaaaaacgtatgaacttttactgatgcaaaggtacggggattttgggctgattccaagaaattagccagattcttgtcgaagttgttgcgacaggggaatgagatagcgacagagtaggggaagagggtgagaatgtgtcgtgaggatgtcttatggcttaggatcagacagcggttcgctggccatcataggttcaaactcataggctggggaactttctacttgatgaaccacctgcaggatggggtcaccaagggcggcagaaatcttgcaaatggtagagagtgtcaggttatgcgttcctgacagccatctactcact

SEQ ID NO: 4250 - DNA, 5544 bp, synthetic construct
  source 1..5544: mol_type = other DNA
  misc_feature 1..5544: note = Synthetic
gggggtgggagaacgaaccgctgtggcaatagatacaatatacgacaacgaggcggacgaggatggaaaatagacatcctcgcccgcctcgccccagcaaggggcacataacccagcgcaggggattgccctgtgtaatgtcgttgacgtttggggaggcccctgtcgggggcgcataaccaatccgttcaatctgttcaatctgtagagcagtgtgactggaacccggcaaaaacgtccccgaaaacaacaaaaatctccgcaatccctgtcccaaggcttgtgaatgttaaaaaattgggggaaaatttgggcagttcggaaattttccgtatatttgcggcgggtattacaatattctttgctcgtataaaagacatcatataacaaaaaactcccaccgaagcgggagtatagggtcaagcccttcggccattacagccttattgtgataagatgtagaagattttttatcacggtgcaaagatagaacattttttcggaatagcaatctttttgataaaattataagtttttttaacatagtgcataattcagatacaatcatatggaaacgaaagtattaggcatcgatacaggtaccaacagtttgggttgggctattgtcagtcgtgatgaagaacttggaacctgtcatctcgaagagcatggtgtgaatatttttcaggagggcgttaaacgtgaaaaaggaatagagtcgtccaaagctgcagaaagaacagaaaaacgttcttcccgcaaacattattggcgcagaaaagtaaggaaaatcaacttgcttcgtattcttattgccaaccgtctttgccctccattagctaatgatgcattgaaagactggcgttcaaagaggatttatccgatggatgagctcttcattcagtggcaacgcacagatgatcatcataacataaacccctattattatcgttatctttgtctaaaagagaaactcaaccttgagcttccggagaaacgtttcattttggggcgtgccctctatcatcttaatcaacgccgtggttttctgagtaaccgaaagagccaagataaggaggacgaaacaggcaaagttaagaaaggtatttcccaattgtcagccgatatggaaagtgccagatgtgagtatttgggagagtatttttatcatctttacgaaaaaggcgaacgtatacgcaatcactatacagctcgcgaagagcattatctgaaagaattcaaggccatctgtgaaaagcaacagttggaagaatctttggtaaacaaacttcaattggcaattttctaccaacgtccgttaatgtcgcagaaacagaatgtgggtcgctgtccgttcgagccgaagaagagcagatgtccaatttctcatccgctcttcgaagaattccgtatgtatcagttgttgaacaatatacgcatgcgagatcctttggacagcgagatgagactcctttccgaagaagagaaagataagatcaggcccttgttctatcgcaagagcaagaagttgtttgatttttccgacatcgcaaaagcattggcaggaaccaaaacaaccaagaatgtagcatattataaaggtgatacagaaggcgcacaatacctgttcaattatcagatggatttcggtgttgccggctgtcctgtgactgcccaactaaaagagatttttggagaagattggttatcagaggcttcttccttatacgtccagtcggcaggaaagacacaatctcaaatcatggatgatatatggcatatacttttcaattttgaagatgcctgccatctgaaacagtttgctatggagaagttacaactgagtgaagagttagcagataaattcagtaagatttcggttccacaagattatgcatcactcagcctttgcgccatacgaaagattcttccttggatgaaagaatccggacttcgctatgaccaagctgtctttttagccaacttggaaaaagtattgccggcttatgtatgggataatgaagaaacccgacaatccgctctcaatattcttttagacatagtgaacaaatatgattacaagaacagcgagacaactctcgaggcatatttgaaatcatacataaaggaatattggccggaatctcatgttgagaagttctatcacccatctatgatagaactttatccgaaggcaaagcccaatgatgaaggcttatatcaattagggtcaccccgcctcaacagtgtgaaaaacccgatggcaatgcacagccttttccgtctgaggcatgtcatcaatacgttgttgagagagggtaagataacacccgatactaccatcaatattgaatttgcccgagaacttaatgatgccaatcgcagaaaagcgattgaacactatcagcgtgacctcaaaaaaatgagggaagattataaaaagataatcgaagaacatcatgaagcatccgaaacggatatcctaaaataccagctttggatagaacaggatcgacgctgcatatatacaggagaaactatcggattgaatgatttcataggcgacaatccgagttatgatattgagcatacgattccgagaagcaaaggcggagacagtacgcaggctaatcttactctatgcagtaacagattcaatcgtgaaattaagcgtacattcttaccgtcagaacttgtcaatcacgatgagattttacagaggattgcttcatggaaagaaaaatatgaggattttgatgccaaaatacgaatagctaaaagacgggcgaaagctgccacaaccaaagaacagaaagatcgtgctatcgaagacaaacattacctgactctccaacgtgattattggcgaggcaagtatcagcgttttcttatggctactgttccagaaggttttgcccggagacaaagtgtagatatcagcgtgatatcccggtatgccagactctatcttcagacagtatttaagcatgtctatatcgtaaagggtttggctacatcggatttccgtaaaatttggggtattcaggaagagtacaccaagaaggagcgagtaaaccatgttcatcattgtatcgatgcaataacaattgcctgtatcggcaggaatgaatatggtcatcttgcccaatattatcacgagatggaagattggaaatggtttcacaaggacaaaccacactttccacaaccttgggcaacatttgcttctgacattaaaaagattggggacgacctgatggttgcccacacatctcctgaccttatgcctaaacaaacaaagaaaaaatccaaaacgggagacggcactcatattcaaggtgatacagcaagaggtccgcttcatttggataaattttatggcgcgattgatagaggcgagggagtaaggtatgtagttaggaaacctctcgacggattgaaggaaaccgatttaaagaatatcgtggatgatgttgtacgcgaaaaagttcagcaagctgtaatccgttatagttcaatcaagacagcgttggccaatggaatttggatgaacgaagacaaacatattccaatcagaaaagtgagattatacactcctaatgtcacgagacccttgaagggattcaaaaagcagcgagacatctctcccaaagaatataagagggagtatcatgtcatgtcagacagaaattacatgatggcaatctatgctgaccctaagtctccccaaaaacgggagttcgaattggtcagcaatctccaggcagccactttcttcaagtcaagtaatgaaatgaagaaagaaggctatacgcttgttcctgtaaagagcccccaaaatggatatcccttactatatcagttaaagattggtcagatggttttactttatgaaacttctccggatgaaatttggggcggaacgacggagtcgatgtcgagacggttgtacaaaataatagggttttcgtctatgattagttcagagacccgaacttatgggaaaatttctttggtttatcatcaagaggcaaggccctcttcagaagtgtcattaaaaaatggatcatataggaaagaagaacaattaaggtctggaattttaatgcttcatactcaattcaatgcactcgtggaaggcgttgatttcagaattaacgacttgggagaaattatccgtttaatataaactgacaatgcttaagcagacattagtattccagaatcctgcctcactttcgctcaaagaccgccaattggttatcaatcgagagggagaggattgtgtgactcgtcctatagaagatataggattcgttgtgatagagaatcaaaaggttcatatttcgataccccttctcaatgctcttgccgagaataatgtttctgttatcctttgtaatggtaaaaagatgccctcatctatgattttgccattggtaggtaatacaacgcaaggcgaatcatatcgctatcagatagaagtatctcttccaacaaagaaaaatatttggaaacagattatcgaatcaaaaatccgcaatcaagccgctcttttggacttgttggggatggatagcgaggagcttaagccctattggaagaatgttaaatcaggcgatgcagataatcgagaaggcgctgcttcccgtatctattggaaaatgttgtttggtaacgatttctttagagaacggggagccgaagacgctccgaattgtttgctcaattatggatacactatcttgagagctgcaactgcccgagctttggtcgggtcaggactactgccagcatttgggatttttcaccgtaatcgctataatgcgtttccgttagctgacgatataatggaaccatatcgcccctttgtggatcaattggcatacagtctatatcgggagggagcaagaaaactgactccggaagttaagcggactttgatttcaattctgactgtagatgtcgttataggagaaatcattaagcctctgtctttagcattgtcttcaacgacagcttcattggttagggtattttcccaagaaggtaaacagattcaatgtcctgtgttagtatgagtgaaaatcgcataaatgcttatcgagtgatgtggctctttacaatgtttgacttaccggttaccactaaaaaggaaagaaaagccgcagccttttttagaaaagaattggtaaaagaaggattcacgatgttacagttttcagtttacataaggcattgtgcatctgtgcaaagtcaagaagttcacacaaaaagagtccggggattacttcccgaaacgggaaaagtgagtattttggcagttacagataaacaatttagcatgattcaaacttttgaaggtattcaagtaaaaaaaatcagaaaagaaccccttcaattagaaattttttaataaatttgcaccgaaaaatcttcacttcattccatttctatggcgaaaaactcttgttaattcgctgtaattaaggcaaaaaagaatccatagttgtggtttgatgtagaagatataagatatacaac

SEQ ID NO: 4251 - DNA, 4756 bp, synthetic construct
  misc_feature 1..4756: note = Synthetic
  source 1..4756: mol_type = other DNA
aatgaccacactggccagactggattcaaaatatgtccctttttaaagtggactcaaggctatttgtgaaaagcagaagttagataagaatcttggtccagagatagtacgtcaaatagaaaaagccatttttgatcagcgaccattaaagtcacaaaagggacaagtgggcaaatgtgtgtttgagaagaacaaaacgaaatgtccttcttcacatcctatgtatgaggagtttagaatgctctcttttatcaataatattaaaattcagacaccaaatgattcagctttacgccctttgtctgcagaagagcgagaacttattatgcctttgttcttccgcaaatcaaagaaacagtttgattttgaagatatagcaaagaaattggctccaaagaaacattatggcttttacaaaaaaagttctgatgcagaaatgccatatcttttcaattaccctatggatacatctgtttctggttgtcctgtaactgccgctttaaaagatatctttggagataattggattgattctctttgcgaaacctatacgctagccgagggtaaaagtcgtttgaatgtagtcaatgatatttggcatgcattgttcttctatacagatgaaacgaaacttgcagagtttggcaagaatcgtctgcaattggatgatgaagaagcaaagaagttttgtgagatatctttgccaagtgattatgcgtctttaagtttgaaggctatctgtaagattcttccttatcttagaaaaggcttgatttattctcacgccgtattcttgggtaacttatgtgaagtgatgccgcaatacgaatggaatatggaggaaatgcgtaatgcagccattgataatattatctatgaaatgaatcagattgattctaaagatgcacgtactttcgaggtgtgtatcaaggagtatctgaaggagcagtatcatgtatctgatgagaaactccagaaactataccatccttctatgatggaaatgtatcctagagtgcaacgcaccaataatcatggtgtttatcagcttggttcacctcgaattgatagtgtgcgtaatccaatggctatgcgttctatgttcagattgcgtaaattggtaaaccgcttgttggaggaaggtaagatagatcaagatacagaaattcatattgagtttgctcgtgaattgaatgatgctaataagcgtaatgctattgctgcatacacaaaagaaaatcaaaacaagaatgatgaggctcgcaagaaaataagaaatctctttaaggcagaaacgggaaatgatatagaaccaactgatgcagatgtcttgaaatatgttctctgggaagaacaggggcacatctgtttatatacgggtaagcaaatacggatatcagactttgttggagctaatccaaagtttgatatagagcatactattcctcgtagtgtaggtggcgacagtacaagaatgaatttgacactttgtgatagtcgtttcaatagagaagtcaagaaaactaagttgccaacagaattgcctaaccatgatgaaattatggcacgtattaatgactggagagaaaagtatgagtctcttgatggtcaaattcgtagacaaaagaagatgtcaaagggagcaactactaaagatcaaaaggatgcgatcattcgtaaacggcatcttttagaattgcaacgcgattactggcgaggtaagtatttacgtttcacgatggaaagtgtacctgatggatttagtcgtcgtcaaggtactgatatcagcgtgatttctaaatatgcacgtctttatttgaaatcccttttcaagcatgtctataccgttaaaggtattgcgacttctgattttagaaagatttggggtatccaaaaggtatatagtcagaaggaacgtgtaaatcatgttcatcattatattgatgccatcgttattgcatgtatcggcttagatgaatataataagttgggagcatactatcatgatgaagaaaatcatgaatggtatggtatgtccaaggcttattttaaaaagccttggtctacatttgttgaggatgttgagaaggtgcaagatgaaataatggtttatcattacacaccagacaatatgccaaagcaaggacgccgtagaattcttattgatgggaaaaaggttttagctaaaggtgatgctgcaagaggatcattgcataacgatacttactatggagctatagagagtgatggtgtcgtaaaatacgttaagcgtataaattttgcatcaatgaaggagaatgatgtcaaaaatatcgtggatgatacagtaagaggtataattgaagctgctattaatgagaagggcttcaaagaagcgatgtctggtacaatatggatgaatgaagagaaacaaataccaattaaaaaggtaagatgctatactccttctgttactaagcctttgaatattcgccaacagcgagatgtttcatcaaaagaatacaagcaacaatatcatgtcaccaatgatagcaactatttgcttgcattgtacattggtaaggataaaaagggtaaggaaaagcgtgaatttgagataataaatatgttgcaaactgcacaatattttaaaacaagtaatgacaaagtcgctgttggaaaaaatattgtgccgttgaagagtgaacatgattatccatttgcatattctttaaagataggaacaatggtacttctttacgaaaaatctccaaatgagatatgggatgcttctcttatggataataacaaacgtctctataaagttgtgggattatctgcaatgagaatgaaaggacgaaatgttgactatgcaacaataaagttgaaacatcatgaggaggctcgtctaagtacagaacttaaagtgaaaaatggcgcatttaagcaaggagaagaattgcgcccttcaataattatgcttcatactcagctcaatgccttagttcaaggctatgatttcgagattaatgaattaggtgaaattaaaagattaagataaaaatgatatgattaagcagacattgttcttttcaactccagtttgtctttcactcaagaattgccagattgtaatctcttggaaagatagcgacgacaaggtaacacgccctatagaagatattgggtgtgttgtcttggaaaatcaaatgataaacattactttgccgcttctcaacgagttggtaaagaataatgttgctgttatcttatgtgataacaagatgatgccaacatctatgttgcaaagcttagatgctaatacaacgcaagctgaaagtttaaaatttcagcttgctgttagtgagcccatgaaaaagcaggcctggaaacagattatagagtcaaaaatagcaaatcaatccgcagtcttgggacttgctggtaagaaaaaagatattctcaaaccttattataataatgttaagagtggagattcagacaatagggagggattagcggcaaaggtgtattggaatagccttttcggtaactcctttaaaagagaaagggatggatgtccgcctaatgctcttctaaattatggctatgctatattacgtgcagctgttgcacgtgctttgttaggttctggtttacttccgaatttgggtatcttccataaaagcagatataatgcttttcctttagctgatgatgttatggaaccatatcggccatttgtagatgaaatcgtttatcgactttatggcaaaggaatttccgaattgaataaagaatcaaagcctgagataatgcgtatgttgaattgtgatgtcaatatagggaaggttaaacgacctttgcagatagctttgaccataacaactgcctctcttgttaaatattattctggagaaataaaaaaactttccttacctattatgacatgactgaagatagactaaatgcttatcatataatgtggttatttgtgtttttcgatttacctgttactacgaaaaaagagatgaaggctgcttctctttttcgtaaaaacttggagaaagatggtttctctatgatgcaattttctgtctatatccgtcattgtgcatcaagggaaagtttggaagtgcatgtaaaacgggtaaaatctttgcttccggaggctggaaaagtaagtttgttaagtgtaacagataagcaatatggagatatctataacttctggggtaagcccaaaagtattaataagagtaaaatatcgaaaaaagttatcagcgaacctattcaattggagtttttttagtacttttgcattagaaattatatcctactcaccatttcttattagatagagtgtttgttatgcgctgaaaatcagtatgttcaaatctgtaggttgtggtttgatgtaggaatcaaaagatatacaacgattatcgtatgcgataatcacgcatatcggttgtggtttgatgtaggaatcaaaagatatacaactcgaggaacaacgcacagagatacaaaaggttgtggtttgatgtaggaatcaaaagatatacaactcgtgatatttattgtttcattccctggtgttgtggtttgatgtaggaatcaaaagatatacaactacagaaaaatataccgtatgccgtctatgttgtggtttgatgtaggaatcaaaagatatacaacataataaagataaggaagaacgtgcgaaagttgtggtttgatgtaggaatcaaaagatatacaactattatagtac

SEQ ID NO: 4252 - DNA, 23520 bp, synthetic construct
  misc_feature 1..23520: note = Synthetic
  source 1..23520: mol_type = other DNA
acgagccagccaggcgggtctgaaggaaatgatgacgagacgaagagtgagggatgtagtgacgagtaatccggggaagaaggagaccacctgtactactcgtacaaacctggactatacgtggagggaaattacggaccgcacccttttactcttaattgtcagacatacctaagggtcattatgctataattgccagcatggaaaatgaccccgatctagctagcccaacctcgccggcatccggtgacgaaaccgacaacacccccgagaccattgaaccctcaaccaataccagcgagccaagctttgacctcttcgcctgggcaaatcaactggctcgcctcaagaacgacctgaaggttgaactcttcctggtcaacaagcactataccgtttatcatctagccgtcgctaatactctccagccccaagtcgcccccgtcttcatcgttgacctgctcagcgaaatcgagaaaggcgccgggctagggctagaagtgcgagcttacgaacagtccgagagcgagcccggagtcttgctctattcgacttgcggacaggtgagtaatgccggacatatcttaaatgtcatcgagcatgagcgtactagcatcgagacttttaacgagtacgaccacgaactcaagaatatcaagctaatagcagctcgttttacccaccccgagatcgcgcctttctatgtctgtaaacagatcgccgggtcaggtagcctcaatgaacggaccgcctgggagatcggcgaggatggcaagctgcagcagtttagcgccgccagcgcctttaagatcccgctcgacaaccaagtcctgatcgccagcaatggcgacgatgactccgatcaacgaatcttcgccttcgccccgaagaaatttgaggccatgtttggctataattacaagaagcaggctatcgccgacaagaaggtcgagcagatcttatctcgctaccagcttaacttcccggaaggacaagacctcaataccatggtgtccggacaccccaagctgatcaataaactccagaatctggagcttggcaccaagacccaggaggagctggttgattacggcgaagagatggggctggatctgatgactaccgacgacggcgctatcatcatcatggatagccgggacatcgagaccttcgtcggcttacttaatgacgactacatgaccagcgacctaaccgggctaaagtacgaaatcaagggtaagaagctgctggaagatcgcccggcagacgaataagctctgaaatcatcaatcaaaaagcccgcccagaagcaagggtgggcatcgcttctgtagcgggctttttgacctctcgacgcaccattccggctactgacaaccagtaagcgcaacccacctcacacttggggctcgccggtcaagagggttagatacgtgccgactagctgtcgccgaagcgataactaaaagtggagggtagaatacttcgagtctgcacgtagcctaacactaattagtgttatgatagggggtataatgtgctagtcgggcattagcagtggctatcacccgataacgctgatatattagcacgctttgtcgtgattgtcaactactttagcaggataatggataacatcaagcaaatactacctcctgacaacgattttctccagcggacaaccgtcattgacaagccggccaagaagctgtggtacatcggtagcatcccgccgctcgcaccgaccgtcgccgtcgtcggtagtcgcaagccgaccggctacggcagagcagtcaatgcccggatcaccggcgagctggctcggcacggagtggtcatcgtcagcggactagccatcggtcatgacgggctggctcaccgagcttgcctcgacgccggcggtacgactgtagctgtcttgggtaatggactggctcatatctacccgcagaccaatcgcaccctggctcggcgcatcgttcaggcaggtggcgccctgatcagtgagtatccgcccgaggcaccggtcttacctcatcagttcttggagcgcaaccgtttgatcagtgccctcgccgatgtcgtggtggtgatcgaggcaggcgagcgctccggcacgctcaataccgcctcacacgccttgacccagggtaaagaagtgatggcggtgcccggtaacatcacctcgccattatcaaccggctgcaatagattgatcgcccagggcgccagcccggtgctcacggcgcaggacgtcttagatcgcctgccgctaactaaggcagaagaccgacccgaccatcaagccgagagagcggatcaggttcgcttcgactcgcccgacagtcagaccatctacgacctgatcgttcagggtgaaagcgatggtgaccgcccgctaagtaaaagcggtctcagcaccagccggtttagccttgccttaaccatgcttgaactgaacggctacatcgtagcgctgggcaacaacacctggggtaagcgctagccggaagtcgctcaagcttgacgaccgcccaaggtaatattacagtaaagttgttacctcagagcggggtaatctagcgccatgcgctagccaaatcgaggggaaggaggggatgatgaatccccgcaaacctcttaagcccggagatctcctagtagacatccgggttaacggccaactcattgggaagatggatcccactgagttggtggggatattcgcccggacggacgaatatcaattaatcgaagggttgcgttaccattgcgtacgctatgaggcgtacgacagacggcgctacctttcgagaaggaagcttgtccaccttgaaccgcctaaggtggacaggcaaagggcatttcgtatttcccccaatggggtagtactgctggggtggccggtcatggagaccggccaaacgataagactttccatccgaacggatggaatggccgtcgtcgagtaatccccaaaaaagcccttaaagccccggccggattcgttcggtcggggtgttttctgattgtgctatacttgaccaaatgaaaacaaccaagatcaagaacctgattatcgtcgagtctcccgccaaggctaagaagatcgagagcttcctcggcagcgactataccgtcatggccagcatcggtcatatccgctccatcgctaagaaagccgccagcggtgtcaagccgattgataccgagcatgacttcgccactatttatgagattgaccccgagaagcggaaagtggtcaaagagctgaaagacgctgtcaagcaagctgagaccgtttggctggcctcagatgaagaccgtgagggggaggctattgcttggcacctttgccaggtgctggggcttgacccggctaaaactaaccgcatcacttaccacgagatcaccaaggaggctatcaccgaggcgctggctcatccccatacagtagatatgaacctagtctatgctcagcaggctcgccagatcttagataggctggtcggctttgagctgagtccggtagtctggcgtaaagtcccgggcggtaaatcggccgggcgagtccagtcaccggcagtccgcttactggtcgagcgggagcgagagatcgagcactatcaaactacctctatctataagacaaccggtgtatttaatgccgacagtcagagcttcaaagcgactctcgacaccgactttaccgacaaagatcaggccaagcagttcctagccggtctgcccggcagcacgtacaccgtagccgacgtagtgaaaacgaccggcaccagacgccctttgccgcctttcaccaccagcaccttacagcaggatgccaacaaccgcctcggctacagtgctaaggcgaccatgagcatcgcccagggactgtaccagagcggctatatcacctatatgcgaacggactcggtcaacttaagcaaccaagccctggctcagatgaccgactatattagtaagacctatggcgacagatatcatcaattccgcacctttactactaagactgccggcgcccaggaggcacacgaggctatccgcccgaccgatatagccagggagtccgtaccgggtgacagccgagcccagaagctttacgatctgatccgtcggcgtactctggctactcagatggctgacgctaagattgaccgaacgaccatcaccatcgacattagccagcaccagcccaagtttaccgccaaaggggaagtactggtctttgacggtttcttaaaggtctacggtagtagtaaagatgagatcttacccgacttagccaccggtcaagctgtagcggcgagcgaaatcatcgcccgacagaccttcagccgaccgccggctcgctacagcgaaggctcgctggttaagaagctggaagagctggagattggtcgcccttccacctatgccaccatcctgagcaacattcagctgcgaggctacgctaagaagggcgacagcgacggggtagagcgaccggttagcgaactggttctccagggcgaccggctgagtgagcggactgtccacgaaaaaaccggctcaaccaagggtaagctggtgccaaccgatagcggtatcatcctgtctgattttctggttgactattttaacgacatagttgactacgacttcactgccggcattgagaacgagcttgaccaaatagctgaccatcagctggacaaagtcaagatgctccgccggttctacgaccccttccatgacaagatcaaagatagcgataaaattgagcgttccagcgtagccggtcaacgactggtcggcaccgaccccaaggacggtcagcccatctatgctcgcatgggggcatacggtgctatgctccagaaaggtgatagctctcaggaagacgccaaagtgacctttgccaatatgcccgagggggcgagcattgccaccgtcactctagagcaagccgtcaagatgttccagctaccccggaaagtcggcacgacggctgacggacaagaaatcatcgctaatatcggacgcttcggtccgtacatcaaggtaggtaaactctttgtcagtatcaaaccggaatcacctttcgagatcagccaggccaaggccagagaattgtatcaagcgaagctggaggccgaggcggccaagcatatcgccagctggggcgaggttgaagtcctgaatggtcgctacggaccacatgtcactgatggcaccaagaatgccaagataccgaaggataccgacccgaagtctctgacggaggagcaggctaggcagctcctcgccgacgctcccgcccgccccgccaggcgacgaggcagaaggaaagcagcgtaagcctaaaacattcaccagctaaatatgataagataactggtgatgatacagtggctgtttaccttctttacccagtggtacatctggatgcctctcgtcggcatcctcagcatcttgacctggcgcaactaccatagccttaacgaccccggcgatgcttacgactacgtcctcctggctctagaaatccctcgagataacgacaagaaagagctctctgccgagcaactcttcgcctccttgcacggtatcctccgcgataagcaggagctccaccgagccaccggcgttcaggagcacctctcatttgagatagccagtgtaggcggtcagatccgcttctacgtccgcacccctaagcatctgcagaatttcgtcgaagggcaaatctacgcccaatatccgaccgtccagattcagccggccgaggaagattacgctgacggtatcaatgcccaccgagccacggcggttgatgagctggtcctgaccgataacgaattcttacccatccggactttccaggcgttcgacgttgacccgttagccggtatcaccgccgccttgaccaagctgggcagcaacgatgaggagatctgggtgcagatcctcgtccgacccattccggatagctggcagaaagatagtgccaagtacgtcgctcgctatcgtagcggcttcggctcgtcgctccgctcgggcgctttctactacgtcctccaggcactggaggcactctggcaaccgcccgaaggaaacgataaaaacgccgaactgtctgaccgtgacaagctccggattagcgagatggagaagaaatcgcagaagctgggctacaaggtctgcatcaggctagcttacctcggacacgaccaagactcagcccgcatccagatgaatgccgtggcgagcgcctttaagcagtttaactcgaccagccttaatggcttcaagctggctactcagcctcgctacgatcgggcggcgctcgacctctgcgccaagcgatctttcccggatggcacaggctttatcttaaatatcgaggagctggccagtgtctttcatctaccgcacatgaatgtcgagacacctagcgtagtctgggctaattcaaagaccgccgagccgccgactaatctgccggtacttgatggcgacccggttcacgaccgagatatcagtgctttcggactgactaacttccgaggtatgcaaaagcaattcggcatcttgcgagctgatcgaagtcgccatatgtacatcatcgggcagaccggcacggggaaatcgggcttgctggagccgctggccttatcagacatttaccacaatcagggctacgccatcattgacccgcacggtgatttcgccaccgataacctcaagtttatcccgtcctcacgagtcaatgacgtagtctactttaaccccgccgacaccgaccacccgatcggctttaacccgatggaggtctacgacccgaaccagcgcaataatatcagctcagagattatcggcgtgatgaagcggatgttcggcgagagctggggtccacgactggagtacatcttgcgccataccctgctcgctctactggagtaccccgacaccaccatgctggacatcaatcgcatgctaaccgataaagacttccgtagtcgagtactgtctcaagtcaaggatactgtggtgctccaattctggcgagtcgaattcgccggctggaatgagcgctatgtctcggaggcgattgccccggtgctcaataaggtcggtgctttcgttgccaacccggtcatccgcaatatcatcggacagcccaagtccagctttaatatccgccagatcatggacgagggcaaaatcctcatcgttaatttgtctaagggattgattggtgaggacaacgccgccatcctgggctctttcttggtaaccaagatccagctagccgccatgagtcgctcggatatccctcgaatagaagatcggcgacctttttacctatacgtcgacgagtttcagaacttcgccaccgactctttcgccgtaatcttgtccgaggctcgtaagtacggactcaacctcaccgtcgccaaccaatacatttctcaaatggaagataccgtacgagacgctgtctttggcaatgtcggcactatggtctcgatgcgagtcagcccggaggatgcaccaatcttagcccagcaattcgcccccaatttcgaagcgcaggacatcttacagatgaataatcgccatctggtctgcggcatgatgatcaatggcgagaagatgcccgccttctcaggcactaccctcaagctaccggaagcggggaagggctacatcgaccaaatcattgagcactccagggctaattacacccgccccaaagcggaggtggaggcagagattgccgagctggtcactccaccgatggggctaatgtccagaaccgcccgagataaggcgaagaaagcactcaaagagcagcaacaagccgccgctcagtcaaccgctaatcagctgaagaatatcagcagcctgatgacacagatccgtcagaccgcccaagccggtgaccctgatagcatgaagattgagccggctcacgagactggcaagagcagtggcaatagcaacggtagcggcggtggcgacaagacccgctccggtggtagtcaggtagggcagggtagtcggggcggtcagaatcaaggcaacaagaatcagcccaagaaaaataagaataaaaccaacaagcataatcgtggggtagataaaggtggtcaacctcaccagccaactcctgcgtctcccgtcagccagccaaactcaccgaccagctatgtcagaccgaatcgccccttacctcaaccgcacccaagtcaacccgccaagccggataagccgaccccagtcgcaccgcccaccacccaagttcacgagatcaggtttcactagagccggtaataaaaacccgacctctcgccttgatggccggggtcgggtaaatgaactgccggtggtggataacgacagttcacgggtagctagtgagctagctatttcttcttgccatcgccgatagcgatcttgtgtggctcgggcagcttggccattgggatggtgaccactagcttgccatcaaccatatctgctttgatcgcctctcggtcagcccgctcaggtagagtgatggagcgatagaagctgtttgagctctctcgcacgaagtacttcttatcctcgtcctcttccttatcatgacgctcggcactgatcaccagattgtccttgtcgatgctgatatcgacatcttctttatcaaagttgggcatgtgggtctcgaccaccaggttgcccgccctctgatagacatcagtcaccggaatgttgctggtcatagtcggcaatagtaggtcgtcaccgaagaagcggcgctgcaagctatttagctcctcaaatgggtcatcatacttgattaagctgctcatatcatcctcctttttattacgatggtatcaccatctgctagtagtatagctagttggcactcccacgtcaagagtgccagcataagcgtcttagagaagaaatacggggcgatgcgaacatcgcccctagctagaagaagtggaaagagactacaattcgatgcgatagacatcacctccgatctgcacatgtgcgcaggactgattgagcctgcgcatcattttctcgacaaatgagaagaatggcttcctacaatacgggtcacctccccgcagatgggtctcaagccgcaatgcgacctgagagccacccagtttttcctggcacgtctgatgcaccaggaaaaaggtgacattatcaagcttatggtcaacggattccttgcgaatccattgaccaatctcgctcaggtcgacgtccccctcgtaacgagggaaaccgtcacccaaagcaacaacgatacttgccgctatcgcccgccgaaactttctcgtagacatgtcaaccacctctctgacggcaccgcagcaccatcaagtccttggtcacagcccgtctgtgacctcacagggagcaggagagacctgtacccggcgagaccacagacacatccatccacttcatcataaagtacaccgcacccacctacagtactactatcatgacacattcggcaggaaagtaaagccggctattgcaatccggccttgatactctataatgaaaatgtacactcatgggagcatgattgtataactatctgaattgcttaggtttctataataatttagtagaaatactaaagcaaagctctaatccgtctctttgtgaggcggattaactattttcgactcggcaacagcctccggcaaggcagaaatcttatctcatagatcttatctcaattcgacaccatacacacctcttcgttgtataatggtgtcatgaaatattcgcttggtttggacatcggcaccgcctcaatcggttgggcggttgtcaacttagacaaaaatcgcatagaagatttgggggttcgtatctttgagagacccgagcaccccaagagcggagaatcgctcgccaaaccacgtcgagtcgctcgttcggctcgtcgccgtttacgccgccgtcgccaaagactcaactatctgaaacagttttttatcagccaaaaattactgaccaaggagcagattgatcagctgaccgcaccggaccatgccaagggctggcatccgcaaaacccttatgcgttgcgagtaaaaggcacgaccgagagattgtcgcctgatgaactactgatagtcctttatcatattgccaaacgacgaggttataaatctaatcgtaaaacaattgaggaaaaagacaccactggcgatggtaaggcggtcaactctgctattgcccaaaacgccaaagtgctaagtcaatacactactgtcggagaggctttagtcaaagacgacaagttttatgatcgcaaacgcaacacaactggcgatttccggcattccttcgcccgagtcgatttcctaaatgagatacgccggatattactatgtcagcaacggtattaccctaatcaactagcaggcgatcaaattgaccacctgctgggaatcaagattagtagcctcccggcagatcgcccaatcaatgacaacgacatcaaccggctgaccaagctgcaatcggacaatatcaacggcttattctaccagcgtccctttatgacaagcgatctaataaacaagatgcgcggtaaatgccccttagagagtgaacaacctcgtgcgccgaaagctagctactcttttgagatcttccgcctagctcaagatctggcacatctacaatacatcattgatgccgacaaggctgagggtaacaccgagccaacaagccaaagggccatcactaagtttcttacatccgatcaaataaagacttgcattaataagtgtctaacaaccaaaaaagtaacctaccgagccatcagagaggtgcttggctacgccaaaaatgatccgcacttccagttcaaatacatccgaggtaagaatcctaaagatgaagagcagaagaaagatcccttggcaaaagaaaagaatacttttgccgaactaaagttctatcatagcgtcaagtcggggttaaagaacttgcccgatgattggcgaaaggtgggcagtaatccggaactatttgatcaaattggcgagattctgacctgcaataaagatgactacagcatcaaagaagggctacgcaaacttgaggtcctatcggatgacgcagtagacgctctgctccctattgatttctccggttttggccatctatctcttatagctttacgcaatatcacgccgtatctaaaagagggaaatggtatcacctatgataaagcaatggagaaagccggctaccattttgccgctagacatagtggcgacaagacatgcttaccgccattaaataaagacgatgcccagcagataactaaccctgtagttaaacgagccgttagtcaaactatcaaagtagttaacgccattatccgtaaatacggttcaccttatcgaataggcgtcgaatgtgccggcgagcttgccaaaagccacgatgagcgaaaaaagattaaggatgcacaagacgaaaacgccttcgagaatgaaaaattgaagaaaaagcttcgcgaagaatataacatccttacgcccaccgggacacaaattaccaagttcagactatataaacagcaggatggcaaatgtgcttatagcggaaaaccgctagacctggacaggctattcgatccggggagtaggaaggatgagagctacgctgagattgatcatataatcccattctcacgttgtggcaacgacaccagggcaaataaagttctagtcctaaattcctacaatcagatcaaaggcaaccgcactccatatgagacttggggtaacgacccggatttctggcaaagattagaggctaacaccaaagctaatcccaaacttggccaagctaaacagcgacgcctcttgactcacaccataccggctgaagattgggcatctcgagctattaacgacactcgctacatctccaagtttatctcccgttacctaaaaaatcatctggagtttagcccatatgacgagagtccggaccaagcctccgacagtcagcccagacaacgacagagagttatcatgcctgcaggcgctatcaccacccatctccgtcgtatgtggcaccagcccggtaagaatcgcgaagcagacttgctacaccacgccgtcgatgccaccatcatcgcactaaccacccaagcaaccatccaggattgcgccgtttacagtgcttatattgatgaccacaccaaacaacggtttacaggcaacactaagactaccggtagcgacaggttactccgacaacttgagcgcattaccaacactgaaacaggggagattagccaagcggactacgaagagctaatgcaaagcctcttgccgtggcccaattttgaccaagaactacgaaagcgcgcttccttacctggagaaaatgacactatcagcacctggagagatcaatttcgtgatatatatagcgatcaagacagcgacttttataaccacctacaccccatctttgtctctcgcatgcccaagcgaagagtgagcggtaaaaccaataaagatactgtctactctacgaagaccagagataatgacggtaagactaggagcagtagagtcgggctggcagatttaacattagacaaactaaagaactcagctattagaaatgttgacgagactctttacaagcagttagagcagtacgtcgctgatcgcaagaaatggttggatgaaaataaaaagtggaaggttgcgcgacgagaacagaagaaactcctgaagaagtcgcctgtcgatgaagcggtttcgacgccagctgagctaccacccgaaccaatcgagcccaagatctacaagaacggtaaacactttgacaagaatggcaaccccatctcgccaattaagtcgattaagatttacagccccaacccggataccagtggcctgctggtcaaccaaggtaaagcctatgtcagtaatgattcaatggtgcgactagatgtgtataaaagaccaaataagaaagggaagatcgagcacttctttgtaccggtttacgccaacatgatccgtcgaggacacccggaggtgaaaccgactagaatattacctccgccaaagaaaggtatcccgccagagattgacgatagcttcactttcgtctgtagcttatatccgaatgattatgtcaaagtagtgcttgacggcgaagtgaaagaaggctactatgcagcatatgacattgcaggctgcaagattaagctattaccgcatgcgggaaccagcaaggacttgccgacaaagaaaaaggataaatcatccaatggtgatcaaactgatcaatcaactgatgaagctggcgataacgataaaaagaagactaagattaagcaccccaatcgatatccagcatttcgtatcgctccacgctcagccacaaagatagagcgcctcgacatcaacgtcctgggcgataactataagtgggactaggttagagactatggggtggcgagttgtagctattgagatccaggctcatctaagcctggatcaggggagtttagtcatcaagggcgataaaagcgctaagctaccgatagaagacatcgatacactacttatcgatagttatgccgtaactatgaccgccaacctcctcggtgagctcgccacacataatgtcacgaccattatttgcgaccaccagcatacgccctgctcggtaatcgagccactgtcgcagcactctcgccaagccaaagtatcccgtatgcagctagagatgtctcagccgctacgtaagaatctatggcaagcaatcgtcaagcaaaagatcattaaccaagcccaagtcctgaccgcatttgcacataccgagcaagccgggcagctcattaagctagctaccgaggttcgcagtggtgacaccactaatcgagagtctatcgccgcccgtatatacttcgatactctactggcagacgccaccagacgccagccgacctggtataattcagcacttaactattcgtacgctatcgtccgcagcttagttgccagacatattgccagtcgagggctcatcccatcgctaggtctctttcaccacagcgagctaaatagctttaacttagccgatgacctgatcgaaccatatagagcaatagttgaccattttgtcctgtcaaaattagctgatcagcacttagacttgagtgacagtagactgaccaaagaagatcgacggctgtcccttgacattctcaatgattatgctattatcaaagataagcagtttacagtgcgagacgccatagacttaaccgtcagtagtctagtgcaggctattggcgacaagtcacccgactcgcttcaattgcccaagtttaatcgctaagttaatcttaatcatgagctaccgttatatgcgtgtgttggtactatttgatttgcccacaggaacgaaagctgagcgcaagcaggctagtcaattccgcaactttttagttggggatggctttgatatgctacagttcagcgtctacagcaggctgtgccctaatcgagacgtagccatgaagcatctcgccagagtcaccaagaatacgccagcggataccaaaggctccatccgagcacttctcgtcaccgagcgtcagttcgctactatgttcatcatcctaggtgaaaaaactgaccaagaagagctcgttaaagccaaccaactatcatttttctaaactaaaatcccctctgtaacagaggggattttgagtgagtattatacaactatctgaattgttagagaactataacgaaaagtcagcccaccactgggcgggcaacttttcgttacaaatcctaacggatttgcattcctctaggatctcctcgcatggtgaatttcccgtttttgcacgagcaccaactcttggattggaagatacaatatgtagcaaagagcgtaaggtgtaaccaagattttctccttatgcaacatactcgaggcatgaccatgtcagccacaccgattcacgcaacacaccacgcaaaaccgctgagaggttacctcactcagtcgttacgccgtcgaagtcttcctcgttagcctcggcttcttggcgtgttgccctgacaatgccgtctttgtgatgcgccgggctgtagatagtgtacagcttcagcggctcatcgccggtattgatgacattatgctcggcaccggccggcacgatgatggcgctgccgtcagacacggcatattcgttgccatcgattagcactttgccccgaccagcttcaaagcgaaagaattgatcgttctcgttatgaacttccgagccaatctcaccgccaaccggcaagctcatcagcaccagctgacaatgcttagcagtgtaaagcacttggcgaaagttatcattcgccagcgttaattgctcgatatttgcgctaaatcccttcatattacctcctactagttaccactattattataccagcctctccactaaaaagcggtgccattatctcataattaaagttacccatttgctagtcgttagcccataatttcggttacccccatcctacatcatgaaagaaataagtagagtgggtgtgaaagagataatcaggtttcatgctgtagccgggtcaattggctcataccccagcacacctgaacgcatgctataatctcggaaaggagaaatagtatgtactacggtaataaggctaaagttcatattccgaattggtgggagatccggaagatgtgcaaggggttggagcgacttaagccgcaagttagtatcatgcttgaatgtgtcggatcctttgacggcgtcccaaaaggaaagagatacttggatctctccgcaaatgaagacggaattgacatagagcctcattacttcggggatgactacaaaaaaatgcctccgcaggaagctgctcagcgtcgcacctggaataggattagagatagaggctacaagccggctgatcagccggacgagaccttggctcactttgactggaaggacatctacggcttcagttacgacaagtccactgatgccggcgtctccaatgtcaccactactcagcgaatcaccgctacccgggtagctgttcttggtttgtttgccctggcggcgcccaagaccaagaagcattatgagtattacgataatggcggcaagatagttgctgtgcttcataccacaagaggagatatcaaccttgaggcgaattacgactcttctgaggttattcaatatagagccaaagaatgtcgcaccttcggcaagtacgtcgccaagcacgccaaggccatcccgtcacaagatcagatcagtcataacgtccggctctagctagtaggctgtccaggcagtaaagtctccatgcgacataaggaaagtactatcgccacagcacagctagccacctaaacagccgaggaaacatatcctgacatcaacgcttgtcgccgactaagcttcaattcgattcttgcttctccagtagcagtcgaaaccgtttcttcaagtctacactaatgatagatttgggcggatattacattgcccatagaggcttcagatccttcatatcatgaatttcgtagccgcagtgcagcatcgctccaatatcgtctccggtttcgcaaatataaagcttgtgacatccatcccaggagacggccagcaccttgatctcacttagcggcaagtgcttgtagttcagataactccaggtaggcgtcaaggttttaggactgactctaggttgaaagtaggtttttgatctttttctctatattatagtacactgtcgtcaacttatccttagccttttgcgtaagtcttgatgtgtgcataactgcattgcgaataggcgtgaaagccttttcgtcgttagcaaggtaatctggatatccgtcaccgcttcttggtggatcagcaagagtagctaaatgcgccaggtcaaggtaaaataaatcgtcgttttcactgcgtatgtcaatcgctatgttgccgtttcttttatcttcgttttctcgctgcctccattttcgtatctcgcggagagcacttttcttgatttttgaactcccgtcaagcgcaatagatttatgctttattaatttacggacgagattctctgatataaagcactccgtatatgattgaagattaaatgtagcatcctcctctagctcattgatccatttctgaactctagcggtaggttctgaattatttggcagggccggtttatattcgcttgctgtttcgttatataatttctttgacgcccgcactttttgcgaaaaacgagggttgtcatcgtctccatcttgcttaatctcaatacgtcacttatcccactggtcaataatagatttgataacggacttaatgctttctagtagttcaagaaataaggtatcgtcagaaactataccttcacgactgctggtaaatctatctattccatctccatcaaggtcattataatggatctgtccatacagataactctccggaactctcgcactttgaatatgcttcaatatatctcgttcacgaagtcgaccattgacaaataaatccacaccgaccttctccccagtccctaatatatttagatctctcggtttttcgaccgaagctataaaaccattaatatttttgttaatagcacgattgtcatttttgatagatctttttaataatgtttggacaaatgaatcatgactgttgttgtttattgaccagacaaattgagttttgtcagttaaatctttgacatctcctaaatttatttcgttgccattaacataaatcttgaaactctcatcaacaagagaaaaacgaaaatataatgcgatggacttacgtatattatcaagcgtattgactataccatttttgagaccaataaatttaatgagagtcccacattccatcttatctagtaacttcatgtcttcgtcagaaagttttccaagcttataagactcatggtctttgtcatcctgaatagccttgtctagctcgctattgtctatcactccgccagtagctatttctccggattttttagtcacgataacaatgcaatcggcgcatgaaagtaaagctaattttccgataccttttctacctatgtaggggcgacctttttgtgaattagacttctttgtacgctttgaatagccaatccttaggaacttattcctaaaatcagacgaagacataccctcgccatcatcaacaacaatcatctccgacttttctttatctatagttattctgacattatttgcatccgcatcccaagaattagatatagcctcgccgagaatagttataaaatttctataaagatttcttcctagactattaagcaccgccagagatatgttaaaggtaaattgatcgtctcttatattgctcatgactttatattctccaagtgctcattaattgacataccgatgatcttacccaaactaaccggcacagcatttcctatgtgcctgctaattgtgccaattgatattttatcaatatcttcaaagaacttgtaatctttggggaaagtctgtaagagcgcaccttctctgagagatagggccctgtcttgctcaggatgaccgtagcgaccggttccaaaagagtaaaatgagtcgttatggtaggcgacggcttatcccattccatacgcccgtatacactaccaaatgatctgccggaaatcttcttataacactccggcagaagtgatctgtcccaatctcgccatgtcccaccaggttttgattgcctaattctcttgagatttatctctgtcaatccagcgcttctatggagaggatccttactgtccgtttgaccttgagacagcgcaggtaatgacgataatacgtctctaactgtaagcttcttgcctatagaactttccggtatcaactgaatattcccatgtcttgaagctaggagaacgagccgacgacgtttttgcggtagtccatatttactacagtcaactatcttgtaactcgtataataccccaactcatccaggttcttcaaaaaatcattaaatacatcgtacttgcgaagttccggaacgttttccatggatacgatatccggttttatgtcttcaatatattgtgcaaacgacctcaatagattccagcgaacatccgttttagtatctatactcttgcgatatttattagagtgctgcgaaaatctctgacatggtgcacaacctaccaggattttaatgtccgccttaccaaacatgctatctacatccacactaggcaatcttgatacatcagcttcaataaatctcgtatggttattttcttcataggcatatcgacatgacgcatcattatctataccggcaaccacatctagaccagccttccttagtccacaagtgagcccacctacgccacaaaataagtctacgacggcaaccttgctacccacgcttatagtatagcagccaacaatgcttatgcataggatacgttgcagtatgatttaccacaattttatcatgtagtattttgagccatggtcgtcacacaggaacactccgccattcttctatattgtttcatctgagttaatgttgctggctgaggcctgtgccggctcggtacttcttcaaagtctttagctttggccacggcagacatcactgctaacacatcatctacctcatcacttcctcgatacttcgtcgcttggagtagggctgcggtttgccatagccgattcgcagcaggatggtagggtactcgccatccagccccaggtccttcgccatggcctccgctacttccgcctcctcgttcggttgattgaagtacgagtgggcgacacccaggctggtagcagccagcaagaagcgctgtaatgtcctccccaagttgacccattcacgtagagtattgtctctggtagtaaagagaaccaggtgggaggccgagacaagcttgcgacggtcagacttattctgcgacttagcattgatggcacccgacataattagctccgccagccggcggggaacattcggcgcaccaaagacggcatagctcagcccatccagcgtctgatcctgatgctttttattaaatctcatccagctctttagctcaatcttaaagtcctcgttttgcatttggcggtcatcgccctctaggacacgtcgctcaatggcactaaactgcgtcgtcccacgagcatagtagtggagcagtacgccatcatcaatgtagacagactgtagcttagtcagtgtctcaggtgggatcatctctccgctgtagacactgcggttcgtctgcctcttatctatctgattaaagagcggatccggtgccaatgtcctcctagctagtgagatagtgatgatacccgcatcgctcgtcgcaacgtcaacttcataattattggcatgagctgccaggcaaatattctccgccgcacagcccagactgatgaataactctcggtgagatgcatctaccaccttcagtgcccggctaaaatccgggtgaatctctaccgccatgcccttccgccggaatatccagggctgggtattgtgccctgatggcgccttgacagcctgctccaccagatacttgaaatcagcgggggatagctgtgtttcgctcgtcatctctgccatagtgcttattataacactaccactttagccaggttaaaaggcgagtcgtcgcctcgtagctctacttgtcacctatgtaatatactttccatcgctgaaactgagcgccaagacggctctatttccactcccgatgactattaatctcgtgcttctcgaaataggcttccgtcagattaacgtcgaaccgattagccagttccatcaggtagttcaggacatcggcgaattcttgccgcaggttgtcatgattctccggcttggcttcacccttaaagcccgtctccttacgaatggctttggccagctcaccaatctcctccgagaaaagcaaaaacacctgagtcactgagtttttatcccagccattctctcggcacgttttatccagatgctcctgcaattcagtcaagctaatagtcgatggatccattgaaaacttcttccttttcattcacggttacatatcaggcaaatccttcaagattctaccttcgaaacaaaaataagccgccccttgatatgcgccactactgttaacttgccccttttcctcaaaaatctttctcgtcagaggcgacaaaaaccagatctgtccgttatatgcaactttacgctcacctgcgactctagccacgatagtctcgtccttaataaaagttatctcatcgccatcatgaagtccttttttataaaagctaaatctatggtcgctctgccttgccttagcaatctcactaaagtctactcctttgtttgtctgagtcggataaacaatctcgccctcaaacgaaagcagtaactgccgaactaggtcatagtcaagggcaaagagctcgctagtaccgacacgatgtttcgcaaatatctcgtgtagcaatgctcctttttcaaaataatcatccaccttaattgcaaattggcgcttcaagccggatacattgtaatacccgttcatctctagagagcgcatctcttcctgatactgccttacctgcgttttactgatcttgatcagacctgataccgcagttgtcataatgtagattacacctttgctcataattatcactcctatttatctaattctaccattattcacagagatggaggtcacgacgtccgtgtctacatcaataccttgacaataatagataacgtgttatcattatattaatttagctataggagattatcatgagtgaaattagccccaaattaaacgaacatctcaacggtctgaccaatgagatttctcgtcgccatttcgacgaggcgttggagcacggcagggaagcgatagcctccgacgagctacatagcgatgagaataggtcaatcttagcggctgtctaccgtaatatgggtgccgccaatgaccacctcgggcgagacgacatagcctgcgactacatggagcaagcctaccggattcatgacgaccaggtagccgagaaccgcactcccgagacgctacgggagcgttcggctacagcctcttacgtcggcatcttcgccaccaaagcgtacctggccggacgaaggcaagatcctgagctggccaagaaggcgataggtgccgttcatcaagcagaagcggatatggcagaggcgggtcgcatttccggcgacaaatatcatcagtacgagatcaacatgaccggccgctggagcatgattgagagcttggtcggcagtaaggggcgaggctttatcctggctggacgagccatccgcctggctccattatctgagaaaaatcagcagaagggcttgactaagaaagacgtcctgcgagccaggaagcgtgctctcatgcgaggggtagccgccatggcagttaatctagccagccacactaagcccaccgagaaagtcgctgaatccattgccaataaggcgatgtagactaagctagcattccatctcacgagccgggcactccgcttagcgcatccgactcatggtataatagccactagagtaaaggggtctacacactatatggacaaacaagatgggcaatctcagcaatcaagcttacatcagccgagcgacaccgcttatctgtctgaaccggacttagccgagccgcctcgagagaaacagctcactgatcagcagcgcccagctcagtctcaggctataccggcacaacctgcggcgacaagctcgtcacacctcaatggtatcgcaggctggttggccttctttatggttgtccttatcatcggtgcccttcttttccttggtgtcttttttaacacactgactaaggttaacaaaccgcgatttcttccttctgacttacttttccctttcgccgataacgtcttgccaataagcgacgacgaatcatcctacatggtttccgctgttatggcgcccgttgtggcaacactggccatcgccgccgtggtggcgattagccagcgaaagaggctgggcaagcagctagctatcgccacctatatctcttactttgttcatcaggtgctatacgtcgtcttcagtgtggtgagcaaaagctattatgtgaagcctatcgacattaccatcagtatcgttagcttcgtcatcatcatagcgaccatagccggactactctgcttatatttcttcacctccaggcgagtcaaggagacactggtcgagtaagctagcgcactttacccgatgtcacaagctcatagcataatcattaccgaagcaggagagactagcactatgaatgaacaaaatcagcaacacaaac

SEQ ID NO: 4253 - DNA, 22250 bp, synthetic construct
  source 1..22250: mol_type = other DNA
  misc_feature 1..22250: note = Synthetic
acgacaagggatatgtgcagtgaagaggatggggtgtcattatgctataattgccgacatgaatgatgactctgagcaaaccaaccaaaacctgccgacaccgaccgaagaaacccccgatactaccgagactaccaaggcttttgaccctaccgatattgcaacctctgccacccagccgagttttgacctcttcgcctgggcaaatcaactggctcgcctcaagaacgacctgaaggttgagctcttcctgatcaataagcactataccgtttatcatctagccgtcgctaatactctccagccccaagtcgcccccgtcttcatcgttgacctactcagcgaaatcgagaaaggcgccgggctggggctggaagtgcgagcttacgagcagtctgagagcgaacccggggtcttgctctattcgacttgcgggcaggtgagtaatgccggacatatcttaaatgtcatcgagcatgagcgtactagcatcgagacttttaacgagtacgaccacgagctcaagaatatcaagctaatagcggctcgttttacccaccccgagatcgcacctttctatgtctataaacagatcgccggttcaggtagcctcaatgaacggactgcctgggagatcggcgaggatggcaagctgcaacagtttagcgctgctagcgcctttaagatccctctcgacaaccaggttctgatcgccggcaatggcgacaatgacgccgaccgacgaatcttcgctttcgccccgaagaaatttgaggcgatgtttggctacaattacaagaagcaggctatcgccgacaagaaggttgagcagatcttgtctcgctaccagcttaacttcccggaggggcaagacctcaataccatggtgtcgggtcatcctaaactgatcaataaactccagaatctagaactcggcaccaagactcaggaagagttggttgactacggtgaagagatggggctggatctgatgaccaccgacgacggcgctattatcatcatggatagccgagacatcgagaccttcgtcggcttgcttaatgacgattacatgaccagcgacctaactgggctaaagtacgagatcaaaggcaagaaactactggaagatcgcccggcagacgaataagctcttaaatcatcaatcaaaaagcccgcccagaagcaagggtgggcatcgcttctgtagcgggctattcgacctctcgacgcaccattctggctactgacaaccagtaagcgtaacccacctcacacttggggctcgccggtcaagagggttagatacgtgccgactagctgtcaccgaagcgatagctaaaagtggagggtagaatacttcgagtctgcacgtagcctaacactaattagtgttatgatagggggtataatgtgctagtcgggcgttagcagtggctatcacccgataacgctgatatattagcacgctttgtcgtgattgtcaactactttagcaggataatggataacatcaagcaaatactccctcatgacaacgattttctccagcggacggccgtcattgacaagccggccaagaagctgtggtacatcggcagtgtcccaccgctcacaccgaccgtcgccgtcgtcggtagtcgcaagccgaccagctatggcagagctgtcaatgcccggatcaccggcgagttagctcggcacggagcagtcatcgtcagcgggctagccattggtcatgacgggctggctcaccgagcttgtctcgacgccggcggcacgaccgtagccgtcttgggtaatggactggctcatatctacccgcagaccaatcgcactctagctcagcgtatcgtccaggcagatggcgccttgatcagtgagtatccgcccgaggcaccggtcttacctcatcagttcttggagcgcaaccgtttgatcagtgccctcgccgatgtcgtggtggtgatcgaggcgggcgaacgctccggcacactcaataccgcctcgcacgccctaacccagggcaaggaggtgatggcggtgccaggcaacatcacctcgccgctatcgaccggctgcaatagattgatcgcccaaggtgccggcccggtgctcacggcgcaggacatcttagatcgcctgccactcgctaaggcagaggaccagcccgaccgtcaagccgagagggcggatcaggttcgcttcgactcgcccgacagtcaggttatctacgacctgatcgttcagggcgagagcgatggtgaccgcctactaagcaagagcggtctcagcaccagtcagtttagccttgccttaaccatgctagagctaaacggctacatcgtagccctgggcaacaacacctggggcaggcgctagccggaagtcgctcaagcttgacgaccacccagagtaatattacagtaaggttgttacctcagagtggggtaatctagcgccatgcgctagccaagccgaggggaaggaggggatgatgaatccccgcaaacctcttaaacccggagatcttctagtggatatccgggtcaacggtagactcatcgagggtctaacccacggtgagttggtcgcagtattcgctcaaacgagtgggtaccagctgatcgagggtctgcgctatcgctacgtgcgctttgattggcgcaacggagagcatagtcgcagacattctcgatctaagcttgttcatcttgagccgcccaaggtggacaggcaaagggctatgcgcatcaactccgacggagtgatgctattggggtggtcggtcatggagacctgccaaacgataaagctttccatccgttcggatggcacggctgtcgttgtcgaataacgccacccccaagaggccctttaaagccccggccggattcgtttggtcggggtgttttctgattgtgctatacttgaccaaatgaaaacaaccaagatcaagaacctgattatcgtcgagtctcccgccaaagctaagaagatcgagagcttcctcggcagcgattataccgttatggccagcatcggtcatatccgctccatcgctaagaaagccgctggcggtgtcaagccgattgataccgagcacgacttcgccactatttatgagatcgaccccgagaaacgaaaagtcgttaaagagctaaaagacgccgtcaaacaagctgaaaccgtttggctggcatctgatgaagaccgcgagggggaagcgatcgcttggcatctctgccaggtgctggggcttgacccagctaagactaaccgcatcacttaccacgagatcactaaggaggctatcaccgaggcactggctcatccccacacagtggatatgaacctggtctatgcccagcaggcccgccagatcttagataggctggtcggctttgagctgagtccggtagtctggcgtaaagtcccggggggcaaatcagccgggcgagtccagtcaccggcagttcgcttgctagtcgagcgggaacgagagattgaacgccaccaagctacctccacttataagacaaccggcgtattcagcgccgacagccagagcttcaaggcagctcttgataccgactttgccaacaaagagcaggctaagcaattcctggtcggtctacccggcagtacatacaccgtagctgacatagccaagacgaccggcactagacgccctttgccaccttttaccactagcaccttgcagcaggacgccaacaatcgcctcggctacagcgctaaggcgaccatgagcattgcccaaggactataccagagcggttacatcacctacatgcgaaccgactcggtcaacttgagcaaccaagccctggctcagatgaccgactatattagcaagacctatggcgatagataccatcaattccgcacctttaccactaagactgccggcgcccaggaagcacacgaggctatccgcccgaccgatatagccagagagtccgtaccgggtgataaccgagcccagaagctttatgacttgattcgtcggcgcactctggctactcagatggctgacgctaagattgaccgaacgacgatcaccatcgacattagccgacaccagcccaagtttaccgctaaaggggaggtgctggtctttgacggcttcttgaaagtctatggtagtagcaaggatgagatcttgcctgacttagctaccggtcaagctgtaacgacgaacgaaatcgttgcccggcagaccttcagccgaccgccggctcgctacagcgaaggctcgctggttaagaagctggaagagctggaaattggtcgcccctccacctacgccaccatcctgagcaacattcagctacgaggctacgctaagaagggtgacagcgacggggtagagcggccggttaatgagctagtcctccagggcgaccagttgagtgagcggactgtccatgaaaaaaccggctcgaccaagggcaagctagtgccaaccgatagcggtatcatcctgtctgacttcctggttgactatttcaacgacatagttgactacgacttcactgccggcatcgagaatgagcttgaccagatagccgaccatcagctagacaaagtcaaaatgctccgccaattctatggccccttccacgacaagatcaaagatagtgataagattgagcgttctagcgtagccggtcagcgactggtcggtatcgacccgaaggatagtcagcccatctatgctcggatgggggcatacggcgctatgctccagaaaggcgatagctctcaggaagacgccaaagtgacctttgccaatatgcccgagggggcaagcattgccactgtcactctagaacaggccgtcaagatgtttcagctgcctcgacaagtcggcacgacggctgacggacaagaaatcatcgctaatatcgggcgcttcggtccgtacatcaaggtgggcaagcttttcgttagtatcaagccggagtcgccctttgaaatcagcgaaaccaaggctagagagctataccaagccaagctggaggccgaggcggccaggcacatcgccagctggggcgagattgaagtcctgaatggtcgctacggaccatatgtcactgacggtactaagaatgccaagattccgaaagataccgacccgaaatctctgaccgaggagcaggctaggcagctactcgccgacgcccccgcccgcccggccaggcgacgaggcagaaggaaaacagcctgagctacgtttgcccgtatcacctttgagctgacactatttttattttgccatatggtccggaacagaccatatggtctcctcatacggcatagagctccctgtacgagtagtacaggtggtctcctcaggcttggcaccgtataaactaccacgtgcactggatagcttgctgatatatcaacagccttcgtcaaccacactgtactactcgtacttagaaacgccttacttgattgacggcagacaagagcaatgggataaggagaccatacagcctgctctgaatgccagatagtcacatccaagggtgtctttttgtccttcactctattagtcattttccgaagactgtgcacgcttgaagctcagcagtgcacgagccagccaggcgggtctgaggaaaatgataatagagtgaagaatgagaggtctaataagctagtacaagcctaaaacattcacccgctaaatatgataagataactggtgatgatacagtggctgtttaccttctttacccagtggtacatctggatgcctctcgtcggcatcctcagcatcttgacctggcgcaactatcatagccttaacgaccccggcgacgcttacgactacgtcctcctggctctagaaatccctcgagataacgacaagaaagagctctctgccgagcagctcttcgcttccttgcacggtatcctccgcgacaagcaggagctccaccgagccactggcgttcaggagcatctctcgtttgagatcgccagtgtgggcgggcagatccgtttctatgtccgtacccctaagcatctgcagaacttcgtcgaagggcaaatctacgcccaatatccgaccgtccagattcaaccggctgaggaagattacgccgacggcatcaatgctcaccgagccacagcagttgacgagctggtcttgactgataacgaattcttgcccattcggactttccaggcgttcgacgttgacccattggccggcatcactgccgccttgaccaagctgggcagcaacgacgaggagatctgggtgcagatcctcgtccgacccataccggatagctggcagaaagatagcgccaagtacgtcgctcgctatcgtagcggctttggctcgtcactccgctcgggcgctttctactacgtcctccaggcgctagaggcactctggcaaccgcccgaagggaacgacaaaaataccgagctatccgaccgtgacaagctccggattagcgagatggagaagaaatcgcagaagctgggctacaaggtctgcatcaggctggcttacctcggacacgaccaagactcagcccgcatccagatgaatgccgtggcgagcgcctttaagcagtttaactcgaccagccttaatggcttcaagctggctactcagcctcgctacgatcgggcggcgctcgacctctgtgccaagcgatctttcccggatggtacaggctttatcttaaatatcgaggagctggccagcgtttttcatctaccgcacatgaatgtcgagacacctagcgtagtctgggctaattcaaagaccgccgagccgccgaccaatctgccggtacttgatggcgacccggttcacgaccgagatatcagcgctttcgggctgactaacttccgaggtatgcagaagcagttcggcatcctgcgagctgaccgaagccgtcatatgtacatcattgggcagaccggtacaggtaaatctggtctacttgagctgctggccttatcagacatctaccacaatcagggctacgccatcattgacccgcacggcgatttcgccaccgacaacctcaagtttatcccatcctcacgagtcaacgacgtagtctactttaaccccgccgacaccgaccacccgatcggctttaacccgatggaggtctacgacccgaatcaacgcaataatatcagttcagagatcatcggggtgatgaagcggatgttcggcgagagctggggtccacgactagagtacatcctgcgtcacaccctgctcgctctactggagtaccccgacaccaccatgctggatatcaaccgcatgctaaccgataaggatttccgcagtcgggtgctatctcaggtcaaagataccgtggtgctccaattctggcgagtcgaattcgccggctggaacgagcgctatgtctcggaggcgattgccccggtactcaataaggtcggtgctttcgtggcgaacccggtcatccgcaatatcatcggacagcccaagtccagcttcaacatccgccagatcatggatgagggcaagatcctgatcgttaatttatccaagggattgattggcgaggataacgccgccatcttgggctctttcttagtaactaagattcagttagccgctatgagtcgctcggatatccctcggatagaagatcgacgacctttttacctctacgtcgacgaatttcagaacttcgccaccgactctttcgccgtgatcttgtccgaggctcgtaagtacgggctcaatctaaccgtcgccaaccaatacatttctcagatggaagataccgtgcgagacgctgtctttggcaatgtcggcactatggtctcgatgcgggtcagcccggaggatgcaccaatcttagcccagcaattcgcccctaatttcgaagcgcaggacatcttgcagatgaataaccgccatctcgtctgcggcatgatgatcaatggcgagaagatgcctgctttctcaggcaccactctcaagctgccggaagcggggaagggctacatcgaccaaatcatcgagcactctagggctaattacacccgccccaaagcggaggtggaggcagagattgccgagctggtcactccaccgatggggttaatgtccagaaccgcccgagacaaggcgaagaaagcactaaaagaacagcagcaagccgccactcagtcgaccgccaaccagctgaagaatatcagcagcctgatggcgcagatccgtcagactgcccaagcaggcgaccctaatagcatgaagattgagccgactcatgagactagcagtaagagtagtggcaatagcaacggtgacatcggtggcgacaagacccgctccggtggcagtcaggcagggcagggtaatcggggcagtcagaatcaaggcaacaagaatcagcccaagaaaaataagaataaaactaataaacataatcgtggggcagataaaggcggtcagcccagccagccaactcccgcagctcccgtcagtcagccaagctcaccgaccagctacgtcagaccgaatcgccccttacctcagccgcacccaagtcagctcgccaagccggacaagccggcctcagtcgcaccacccgccacccaagttcacgagatcaggtttcattagggccagtaataaaagaaaagcccgacccctcgccttgatggctggaggtcgggtagactaactgccagtggtggataacggcagctcacgggtagctagcgagctaactatttcttcttgccgtcgccgatagcaatcttgtgtggctcaggcagcttggccatcgggatagtgaccactagcttgccgtcaaccatatctgccttgatcgcctctcggtcagcccgctcgggtagagtgatggagcgatagaagctgttcgagctctctcgcacaaagtacttcttatcctcgtcttcttccttatcatgacgctcggcgctgatcaccagattgtctttgtcgatgctgatgtcgacatcttctttatcaaagttgggcatgtgggtctctaccaccaggttgcccgccttctgatagacatcggtcaccggaatgttgctggtcatagtcggtagcagcaggtcgtcaccgaagaagcggcgctgcaagctatttagctcctcaaacgggtcatcatacttgattaaactgctcatatcatcctccttttattatgatggtatcaccatctgctagtagtatagctagttggcactcctacgtcaagagtgccagcgtaagcgtcttggagaagaaatacggggcgatgcgaacatcgcccctccgagaagtgaatagacgctggctacaactcaatgcgatagacatcacttccgatctgcgcactagcgcaagactgattcaaacgccccatcatggcttccacgaagtcaaagaacttgcccctcaatcgtgggttacctccccacaggtaatactcaagtcgcaatgcgacctgagagccacccagtttcccctggcacgtctggcgcaccagagaaaaagtgacatttttgagcttaccaccatcggactcttctagaatccactgaccgatttcgtttaggtcgacgtccccctcatattgagggaaaccgctgcccagggcgataatggcacttgccttcagcgccccgtgactctttttgaccgacatgtcggcctcctctctgatgacatctatcgacgccatcggttttggtcacagcccgtctgtgacctcacagggagcaggagagacctacgcccggcgagaccacagacatatccatccacttcatcataaagtacaccgcacccacctacagcactactatcatgacacatctggcagaaaagtaaacccagcacgatacataacgttatgctcgcataggtaaggaagttgcgtaatcatgcttcattgtggttagttagtttcaccagtatctgctgaaaggcgacggcatgacatacgataaggcagtagaagaggctggctatcaatttaacgccaagctgtcgggacacaagaacctcttgcccccgctcagtgaggaagagtcgcaccagataactaacccggtggtcaagcgtgccgttagtcagaccatcaaagtagtcaacgccatcatccataaatacggtgcgccgtaccgcatcggaatagagtgtgccggtgaattagctaagagctttaaggagcgtgaagatattaagaagcgccaggataagaacgccgagaataaccaagaggcggtcaaggaattacggtcaggtaagctggtttctgatggagagcagtttgaggcacagattgcgccaacaggcaccagcataaccaagctaaacttctataaacaacaagattgtaaatgtccttattgtggtgagccgataaatcttagcaagatctttagtgacgataactacgctgaaattgatcatatcattccattctctatttgcggcaacgacaccaaggctaataaagtcttagttcataccacctgtaatcagatcaagggaaataagacgccataccagacttggggcaatgaccctgagaggtggaagatcattgaagctaccgcccgggctaaccataagttaggtgccgccaaacgaaggcgactgctgacgcagactctacccgatgaggattggtcgcttcatgccatcaatgatactcgttatatctctaagttcatctccaggtatatcaaatcaaatctaaagttccgaccaatggatgatacagatgatgatggccatacccaacgacaacgagtaattatgcccgccggggcaatcaccagttatctacgtcgcatgtggcatatcggacataaagaccgcgaggaggattgcctgcatcactcggtcgatgccgtaattgtcgctctaaccacccaagcgattatccaggattgttctgtatatagcgcctatattgacgaccacaccaagatgcagttcggcgataacgcatcacaagccgggagtgctaagctagtcagagcccttcagcggataacagatccggccaccggcgagataaaagaagctgattacaaggaattaatgcaagatatgctaccatggccaagatttgacgaggagctccgcaagcgggaagaacagccggatccggtcaacgacaacttggcaatctggcgcaataagtttagcgatttatacaaagaccaagacagtgacttcattaaccggattcaccccatattcgtatctcgtatgcccaagcgccagggagccggcgcagtgaacaaagaaacggtgcgctctaacaagacgaaagacgatgacggcaagaccagatcggctaaagtcaaattgcgtgacttaaccctaaagcaacttagcaactcggccatcagtagcaacgagggagtgtacgagcagatcaagcagtacatcgtagatcgtgataaatggaaagatgagataaaagcttggcgtaaggctaagaaggccagcaaacaaacatcgaatactgacgaagctaatgacggtagagacgagccatcggtgccggcagagccccgggagcctaaagtatacaagtctaatagacgattcgatcgcaacggcaatcctatctcaccgatcaaatcaatcaaagtctacgacccccacccaatgacgagtggctttctagtcaataacgacactgcttatgtcaacaacggtagtatggtcaggctggacgtatataagcgccctaataagagagggaagattgagcatttcttcgtgccggtttatgcccatatgatcaagaagggtcatcctgagattaagccaactaagatattacctgagcctaagaagggtactccaaaagagattgacagcagctttagttttgtatgtagcctatttccgaatgattatgtaaaggtaacattaggcagtgaagtaaaagaaggctattacgtagcatatgatattacgaactgcaagattaagttattaccgcacgcaggaaccagtaaggacttaccaacaaaaggaaaagataaatcaaatagtgatcaatccgatcagtcggccgacgagaccaatgataacgacaaaaagaagactggggttaagcaccccaatcggtatccagcatttcgtatcgctccacgctcagccacaaagatagagcgcctcgatatcaacgttctcggcgataactataggtgggactagatcagagacaatggggtggcgagttgtagctatagaaaaccaggctcatctgagcctggagcagggaagtttggtcatcaagggtgacaagagcgctaagctaccgatagaagatatcgatacgctgcttatcgatagctacgccgtgaccatgaccgccaatctcctcggcgaacttgccacacataatgtcacgaccatcatttgcgaccaccagcatacgccctgctcagtcatcgagccattgtcacagcactctcgccaagccaaagtatcccgtatgcagctagagatgtctcagccgctgcgcaagaatctatggcaagcaatcgtcaaacagaagatcattaaccaagcccaggtcctgactgcatttaggcataccgagcaagccggacagctcatcaagctagccaccgaggttcgcagtggtgacaccactaatcgagagtctatcgctgcccgtatatatttcgatactctactggcggatgccaccagacgtcagccgacctggtataattcagcgctcaactattcgtacgctatcgtccgcagcttagttgccagacatatcgctagtcgagggctcatcccatcgctagggctctttcaccatagtgagctaaatagctttaacttagccgatgatctaattgaaccctatagagcaatagtcgatcacttcgtcctgtcaaaattggccgaccagcgcttagacttgagtgacagtagactgactaaagaagatcggcggttgtcccttgacattctcaattattatgctattatcaaagataagcagtttacagtgcgagacgccatagacttaaccgtcagcagcctagtgcaggctattggcgacaagtcacccgactcacttcaattgcccaagtttaatcactaagttaatcttaatcatgagctaccgctatatgcgtgtgttggtactatttgatttgcccacaggaacgaaagctgagcgcaagcaggctagtcaattccgcaactttttagttggggatggctttgatatgctacagttcagcgtctacagcaggctgtgtcctaatcgagacgtagccatgaagcatctcaccagagtcaccaagaatacgccggcagacaccaaaggctctatccgggcacttctcgtcaccgagcgtcagttcgctactatgttcatcatcctaggcgagaaaactgaccaagaagagctagtcaaggccgaccaattatcatttttctaaactaaaatcccctctgtaacagaggggattttgagtgagtattatacaactatctgaattgttagagaactataacaaacggcatcgtcgttatcatcctgagtgaattatacaactatctgaattgttagagaactataactccgtgatagagcctatgacactaaagaagattatacaactatctgaattgttagagaactataacggtcacgattgttctgcttgtaggtattgcattatacaactatctgaattgttagagaactataacccaagtgagacgtcatgccctatacaaagaattatacaactatctgaattgttagagaactataacttcttagctgtcgctcagcactactgtcccattatacaactatctgaattgttagagaactataactctactactgtaagcactagtttcattcttattatacaactatctgaattgttagagaactataacccaatccttatatcgatgtatttaggaattattatacaactatctgaattgttagagaactataactgatatccgcaagaccttcccgtcctgcgcattatacaactatctgaattgttagagaactataactaatccaactgatacttctcaggaatttttattatacaactatctgaattgttagagaactataacgaaaaatgctcataataatatcaaaaatcaattatacaactatctgaattgttagagaactataaccctggggttgagaggctgaaaatgccggcaattatacaactatctgaattgttagagaactataacatcgaccttgaccttttttctcgaggtgaaattatacaactatctgaattgttagagaactataacctagttgatcctaatattcccattactcccattatacaactatctgaattgttagagaactataaccacttggtaattgctttaggtctagaggagattatacaactatctgaattgtcagagaactataacctatgagatgataactgcttaaccacgccaattatacaactatctgaattgtcagagaactataacgctccctggtcagatacgaccgttgtcggaattatacaactatctgaattgtcagagaactctgcatcatacgacggttcataccagtagccgccacaatgccgtctattatggctgtcttcctgctgatactagccttgctgtaggctacagcatgaaacctaatgatctctttcatacccattctacttattcctttcatgatgcagaacagggtaacccaacttatgggctaacgactagcaaatgggtaaccttatttatgagataatgctggtatatagcacaaaaatcaaaatgcgctactatagtagtatatatggtaaacaaatccgctatgacgaaaagacgtacggctatagatttattctctggcgcaggggggctcacacagggccttaaacaagctggcttcgatgttattggagcaatagagtttcatcctgtttatgccgaaagctatcacatgaatcatccagaggtcaacctaaagatcagcgacatcagcaaggtcgacccggttatatatatggaagaactgggcctagacaccggagaactagacctcttagcaggttgcccaccttgtcaaggttattctactataggtacgcgtaaccggggcaataagaacgatcctcgcaatagactagtgtatcaggttttgcgatttgctttggctttcaaacccaagactatcatgatggaaaatgtaccagccttggtcaacgacataaagcttactaggctcattgctgaactgaaaaaagctggctacaagatagacgtaaaagttcttaacatgtcaaactacaatgtaccacaagcacgtcgccgtatgattatgctagcctctcgtctcggcgaaatagaggttgtagaacaaaagcttagtactgacaaaatagtaaccgtacgtaaagccatatcgtttttaccccccgtaggtcaaagcggtgataagcttcatgatattgtcgaaaagcacaagcccaacacaaaaaaaataatttcattgataccgaaaaatggcggtagcagaacagacttaccagataaatatatcctggaatgccacaagagaactacaggatttagagacgtttacggacgtatgcaatgggataaaccttcacctacaattactggcggttgctcacaaccatccaaaggtcgcttcttacacccagaagagaataggtgtattaccttgcgtgaggcagctttactgcaaacttttccgagagactacaagttctcttttagagcgggcaaacaaggcgttgctacaatgattgggaatgctttgcctcctacttttatccagtttcatgcaactaagcttttacatcatcttaacacagacgcctaatcttctggtataatgcgacaaatggataacgaaagactaaagatgacttttatgcccaatacaatcgagcacctgggcgtacgcctttattctactatcccacctgtcatcgccgaattgattgcgaactcatacgacgccgatgcaaaaagggtcacaattaaattaatcgataccgacccaagcaacaaggagattattgtcgaagacgacggacatggtatgtcctttgatgatattaattcaaaatttctgagaattggacgtaataggcgggtcagcgacgccgataaatcgccaggtggtagattagtgataggtaaaaaaggattaggcaagctgtcattctttggtatagctaacaagatagtagtttcaacatccaaagatggcaaacgtaacgtattcgaattgaactggaaggatattatcaatcaaaatagctctgagcggccaattgaatatgagccaagaatcatagaaaaagatgtcgacgacacgaagactggtacaacaattacactaaaggatattaagcgtattacagactttgctcctaggcaaatagcaacaagtatatcaagattcttcatcatcgatgatgaactagatatcatcgtccaacacaacaatagcaatcccgtccaagttactaatgaaatgaagtacaagacgctagacgttgagtttgaatggaaagctccaacagatttatcgggctttaaagacgattacgtccatagaaatactatctctggcaaaatctttacaacaaaaaagcccatccaacccgccacaaacatgcgtggtatcaccttgttttcccgtaagaaattagttaacttgccagaatacttttccgatagtacatcaagtcatttttactcatacctgactggttggctagaggttgattttattgacaagcttggcgaagaagttattgggactaatcgtcaatcgttggactgggataatcccgacatctctaagttaaggaaatatttgcaacggatgattaggttcttagagaaacaatggcgcaaagagcgtgaagcgaagcaaaccaggaagatctcagatcaggcaaatattgatataaatgagtggctaaaaactataccagatgaaatcaaaaaagactttggacctattttggattctttccgtagaaatgttgattttccagagaaacagaacgaaattataagcaccgtcaagaatctacacggtttaattccagaatatccgttgctacactggcgctatctgcacccaacactaaagaccgctatcgaggattgctataaaaaaggcgaatattacaccgcagtctttgagggggtaaaaaagtatatcactgagcttcaaactaaaacagcgtctaagctgaaagatcggaatttgttggagaatatttacgcactagaaaagaagaaagtgggtggagataatgagtattttctcccgaaacgctggtctgtaatagagaaatacaaaaagctagacaataccgactttgataacgaaacgaagtcaaatattattcagggtcacagaaatctagtcttggctatgtggcaagcattcagagatcccatatcacacgaattagtcgatgaattaagatcgtctggtttatacacagaaaaggactgtctcgatgctttaagtcttttatcgcatttatttcgaagacttgatgacattcagaaaactaccacaatacaacaagctactaaatatcaataaaagaggtaggtggtgtaaatacagtttattatacaatttattatcctccaacccaaaaggttgacgctcatgattaaaaatagacactatctttgagcaattctgtaaaattagcgctatggacaactaatcccagaaaggagaaatagtatgtactacggcaatagggctaaggtttatatcccgggttggtgggagatccggaagatgtgcaaggggttggaaccgttggagccgcgagttgaccttgagcttgagtacgacggctctttcaagggtattcccagcgtaaatggacgtttgcatttggttgccaatgagtccggagtacatattcgccacagcgacatagagatggatgccagcaagcttacaccgcaacagtacgctaagcgtgtcgaatgggtaagaatacgaagtagaggttataagccggctgaccagccggaggaaaagtttattacgcactttaagtgggaggatgtttgcggttttagctacgacaagtctgttgatgccggctccaatgtcaccactactcagcgcatcaccgccactcgagtggctgtccttggcttgtttgccctggcagcgcccaagaccaagaagcattacgagcattacgacaatggtggcgaagtaacagctacgcttcatactacatccggagacctcgggttgagatggggatgtaggtctgccgagattgccagatcggtcgccaaagaatgccgcaccttcggcaagtacgtcgccaagcacgccaaggctatcccgtcacaagatcagatcagccatagcgtccggctctagctagcaggctgtccaggtagtaaagtccccatgcgccagaaggaaagtactattgccacggcgtagcaaacagcgagctatccgaatcaccagggataatatgcgcctacaatcatctacctcatcgcctcctcgatacttcgtcgcttggagtagggctgcggtttgccatagccgattcgcagcaggatggtagggtactcgccatccagccccaggtccttcgccatggcctccgctacttccgcctcctcgttcggttgattgaagtacgagtggacgacacccaggctagtagcagccagcaagaagcgctgtaatgtccgccccaagttgacccattcacgtagagtattgtctctggtagtaaagagaaccaggtgagaggctgagacaagcttgcgacggtcagacttattctgcaacttagcattgatagcacccgacataattagctccgccagctggcggggaacattcggcgcaccaaagacggcgtagctcagcccatccagcgtctgatcctgatgcttcttattaaatctcatccagcccttcagctcaatcttaaagtcctcgttttgcatctggcggtcatcgccctctaggacacgtcgctcaacggcactaaactgcgtcgtcccacgagcatagcagtggagcagtacgccatcatcgatgtagacagactgcaacttagtcagtgtttcgggcgggatcatctctccgctgtagacactgcggttcgtctgcctcttatctatctgattaaagagcggatccggtaccaatgtcctcctagctagtgagatagtgatgatacccgcatcgctcgtcgcaacgtcaacttcataattattagcatgagctgccaggcaaatattctccgtcgcacagcccagactgatgaataactctcggtgagatgcatctaccaccttcagtgcccggttaaaatccgggtggatctctaccgccatgcccttccgccggaatagccagggctgggtattgtgccctgatggcgccttgacagcctgctccaccagatacttgaaatcagcgggggatagctgcgctttgctcgtcatctctaccatagtgctcattataacactaccactttagccaggttaaaaggcgagtcgccgcctcatagctctgcttgtcacctatgtaatatgcttttacgcatatcatcgctgaaactgagtgccaagacggccctatttccactcccgatgactattaatctcgtgcttctcgaaataggcttccgccagattaacgccgaaccgattagccagttccatcaggtagttcaggacatcggcgaattcttgccgcagattgtcgtgattctccggcttggcttcgcccttaaagcccgtctccttacgaatggctttggccagctcaccaatctcctctgagaaaagcaaaaacacctgcgtcactgagtttttatcccagccattctctcggcacgttttatccagatgctcctgcaattcagtcaagctaatagtcgatggatccatgggtaattcttctcctctctgctgatcttgatcaggcctgacaccgcagttgtcataatgtagattatacctttactcataattgtcactcctatttatctaattctatcattgttcacggagatggcgactatgacatccgcaccccttgacaataagagataacgtgttatcattatattgatttagctataggagattatcatgagcgaaattagccccaaattaaacgaacatctcaacggtctgaccaatgagatttctcgtcgccatttcgacgaggcgttggagcacggcagggaagcgatagcctccgacgagctacatagcaacgagaataggtcaatcttagcggctgtctaccgtaatatgggtgccgccaatgaccacctcgggcgagacgacatagcctgcgactatatggagcaagcctaccggattcatgacgaccgggtagccgagaatcgcactcccgagacgctacgggagcgttcggctacagcttcttatgtcggtatcttcgccaccaaggcgtacttggccgggcagaggcaagatcctgagctggccaaggaggcgataggcgccgttcatcaagcagaagcggatatggcagaggcaggtcgcatctccggcgacaaatatcatcagtacgagatcaacatgaccggccgctggagcatgattgagagcttggtcggcagcaaagggcgaggcttcgtcctggctggacgagccatccgcctagctccattatctgagaaaaatcagcagaaaggcttgactaagaaagacgtcctgcgagccaggaagcgggctctcatgcgaggggtagccgccatggcagttaatctagccagccgcactaagcccaccgagaaagtcgctgaatccattgccaataaggcgatgtaggctaagtagtcgccacctagctagattaatcaaacgtcccctatccgtccatctattgcattgatacatcgctcttcgtggtataatagccaccaggataaaggagaacatcatggataaacaaaatgaacaacctaaacaaccaaaagtatctaagccaaacgccgcccagcagctatttggtccggctccagcatcggctgagacaccttacgagaagcagcccatcaatcagcaatatttcgctcagccgcaggctgcaccggtgcagtatgtagtgatggcgccgtcgctcaaaggagtcaaggggtggctagctttcttcatggtcattctagccatcgacgccctgatctatgtcggcatcttcttcaattcactattaaatctctctgctactacctctgtcatctcagctattatggcacccatcatcgtcgcactgtccatctcagctgtggtgacgatcaatatgcaaaagaagttgggtaaacggctggccatcgccacctacctcgtcacactattgcactcggtaataaatattatagttactactgttggcgcacccggtaatgggtttgatacgaccactgacatagtgaatgctatcagtggtctcaccagccaagtaatcgtttccggcttgctctgcctctacttctgcgtctccaagcgagtcaaagaaacattgactgagtaatcaggatagattagctagcgattaatgtctgcgccccggtagggcgcaggtttggtttgtctgtctttatctcttgggccaagaaaactggccgtaaataccgagaaatagtagggggcggtatcacctacctgtctttacgcagggtcagagcatactgcatgaagtagtcctcgatcgactcgtcctctagaccggcgaaaatctcccgagctcgcaagagttcacgtagccgaggcgacttttgctcggctaatatctcagcagtagcgtcgatcagatccagaccacggtacagcgccccggtcatcgcttcctcgtcgccacgacgcttagccgagaaagttcgccccacctccgccgcaatgttagccatttgttctaagaagctccgcctccgccatctctcacgatcaaaatgacatccacctaccggtctagcagctttcatgactttgattgtagcatacatcgaagtggggtagagcaggcaggggagtgtcaaatttcgctgattccatgcccggattacagcaagataacgcactctagaactaatgtcacaaacccatcgcttcttttattggc

SEQ ID NO: 4254 - DNA, 17137 bp, synthetic construct
  source 1..17137: mol_type = other DNA
  misc_feature 1..17137: note = Synthetic
gcttataacacttaatatttttttagattctttaattatttaatttttttagtttttaattcttctttcttttttaatactttttagtattttagttattaacaagctttgggctttttggttgtactaagttttagattcttctctaaagttttatgttttttagtttttccttgaatctttttaatactttttaatcttaaaacttattttttatcgtttacctctcttttttaatttttctaattctttttagacttattgattttttgatttttagtatgattaatacaccttttattttcatcccctcttaatattttcatgctcaatcctgtcaactttgtgacaaaaatattcaatgtaacttatgagtagctgatgcttatattagtttatttaaagatatttttaaagcctaatgacctttgtgcgtgtctgcgcttttgatttatttttttttttttggacaaactctgccatttgccactaagggcagaagtctaaggtatggatttttggtattttatataagttcttttcgaagatataggcaaaagaaatgcagtagaaaaaacaaaggagagggcagaagagtattatagatatgcactagagtttgcaaagaagaatgatttaagatagcgttttaagtgtgatatccatgataataatgggctagatgcctatgctggccatgttgcaatagttagtaaataaactagaaaagtaaaataataaatagtctccttagtttttatagagataaagttttaaaaccacatattgcgttttagtttatttgtagaatttatagccgactttcaacaaatatataaaatgcatctagtgggcaagtgtgatggctctataagaaatgaaaaactaagagagtgcacgcgtaataagggctacaaatatacagtttcttttgtaaaaaaccactataaatttatggaagtaaaaagtttaggtgagtatattttttaccttgccattttttgagcagaggtaggcacgaaaggcatttttgtttagtttagatgagtgtatcccgcatgatattataaccaagcactatgaagaggcatatacacttaggaatgacatctttatatctatgtgttttatgagcatgatggttttagaggctggggaaatatatctagagggatgtttgaggctagatggtagtaagttttttaaatgtagtgaagaagaagcgttagagcatctaacaaaaatcgtaatggagtattataaggattgtgatggtgctttggatttttatgggaagattctaaagtattttatttttatcagctatcatgagtatgagataagcacaaatactaaagcgctagagtgtaaagaaaatgtctataagtgtatacttcatacaacgcaaacaactagactggaacttttagaatcttattaatagaatcaaaagtgaaacgatgccgtaagacaaaagtagccataagctattatggcatttttagattatacatctatatccccacacctgggaaagctatgcaaactaaaggaaacaagagcatgaaaaatgggaggatcaggacgatagggctttcagcgagcataacccttatctaaaacagtagcgtaacaatatatctaggaccaaataagagtcccctaaattcttatgtgttatactaccatcataaatatatgtacttcctaaggcgttataagagtcccctaaattcttatgtgttatactctagtaggatttaagttacttaagttttcagttataagagtcccctaaattcttatgtgttatactcttctaactatgtgttcaccactttgaaaagttataagagtcccctaaattcttatgtgttatactcttaaaaagacatcgccatacttggtaattgttataagagtcccctaaattcttatgtgttatactctagtagcactgaagtagatgctaaattaggttataagagtcccctaaattcttatgtgttatactgaaaaaaatatcaaagaaaatgttcccgtagttataagagtcccctaaattcttatgtgttatactctggttaaatttaggcatatattgaacatagttataagagtcccctaaattcttatgtgttatactattagataggtttagagctctattttagggccttaaaagtaagttttgaaaacttaagacaatattaatcatttatattgtagtatttcagctgatagggattcagaggactcttataataagactaggatgcacgtcctagttgtacacaccggttaactctgttaactgtggcttccaaaagccgagattttacaaaagtcttgtcttgcggatatttaatattttttttgtgcaggcgcgcaccgtttacatttgtccaaattaacgattaggtctcatagaagcacatctaaaaatttctttcaacagtaaaaaattcatagcaatctcaatattaaaaaatcactacaataccaatatgtttaatgcatcataaaaactatgatatatggttgagaaaggggactcttataacataaataaatttaaatctattgggagtgggattatactccataaatagtcaaaaatcatttatataataaagttttacctacacttttaatttatctttaaaacttagaagtcaaataaacttctacctaaatctatcttttcgctgcgttttttaggagctcctataagtatgtgcatattttcatactgtctatcagttatctctagcatcttaacgtttccattctttggtagggcagtttttatcttagcgcatagtctttttgaagattccacaccttttataatcctactataaacagaaaactgaatcattaaaaatccaagtctaagcaagtgtgccctaaacttagatgcctcgctcctttcttcgctagttgtaactggcaaatcaaacataaccaaaaccctcattaatatttctccattcacaaagttctccaatagtctttttataagaataagaattaaatcttataactatatttttagagtataataaataaatttatatataatacttaattaataaaaacaaaattaatacataaggttcaagcatgggtaaggataacgtaaagaccaaaaaagtactaggacttgatatagggacagaatctattggttatgccatagttgagattcatgaaagcacaaagaaagataaagaaagagaaagagagtgtaaagaaaaaagccacatagtgttgtctggcgttaggctttttgataaactaagtgaagataggtttagcgtacctttaagtgctgtgcgcagagccaataaaagtaatcgcaatcgctttgttcgccgccataaacgtatgcaagagatggaatctatctttagagatataggttttttaaactcagactatgaccatgatagtttctttataaacttccttggaaagataagaaagacaagggataacaaaacgctagttccatataacctacgcgaacttggaatcaaagaaaggctggaaaaagatgaaatctttgccattatgtatcatatatgcaggcacagaggctatcgttcaggtccagtgttagaggaatctaaaaaaaagaaagacacagataaagaaggcagtaaaactaagatcataaatgctaagaaacatatgggggattctacatttggagcgtacttagtaaaaaaggctgcagaagtagaaacgcaacctgcttataaaaaatatagaaatgtatcaatggcagataaggatatgatagaagatgaagtgaggaagattctgcaaaaacaagcagagttttacaaagagctagattctaactttatagacaaggtagtagatattataaactataaagccccagccctaagtacagaacagcttataaagatgctaggcaagtgtacttttgagaaagatgaactccgtgcacctaaacatgccttaactactatacttagcgtcctcttgcaaaagttaaataatcttaagtttgatgataaaagtcttagcacagaacacttaagtatcctaacaagtctcttttttgaaaaaggatgtcagctaacctataaagacttaagggatgtcttaatattgcaagctaagtttaaggatataaactatgcacaaaaatgccaagagtttataaaaaaaggcttagaagggtgcaagcttagtgatgaaagcactattaaaacattccctgccttacgctatcaactagctagtagtataaatgatgaaacaaactttatatccttgcttgaaagcagccttgataaaaatggaaatattccagattataaaaagttttatagcaagattaaaaaagattatgaagctatagaaaaaaatgaaattttttataagcaagataagataaaaaagattttagaacattactctgtaaatgatttagcttcagctttaggtaatagagaatatgtagattctatagttgaaatctttagcatacaaaaagactatgtgacttttcaagaaaagttacaaaaagagttagatagccaaggtagactagagctagaagaaagccttataggtctttttgaaagtggcatattaggcacctctaacctaagtctaaaagccctaaaaaatatagagccctttttattgcaagggcaaaagtatatagaagcttgccagagtgcaggctataaactccaagataacactaaaaaatataaacacttaccaactataacaaaggctcaaaaagaaaaccttatctttgcaactaatccaaaacttagaaagatagccaatcaagtagtgatactaataaatactatccttaaaaagcgccataaatttgactatgtgcatatagagctagcacgcgacttgccaaaaactgaagaggaaaaaagaagagagatagagcaaaataagttttttaaaaatgaaaatgaaaatgcaaaacagcttgtagataaaaacgcaagtaaaaaaacttggctaaaagcaagactgcttttaaatcaagactatcagtgtccatactgtaaagatgaaaacggaaatccaaaaaagctaaataagcacgaacttgatagctatgagatagatcatattatcccttactccataagttttgataatagcttttcaaataagattctagtccatagagattgtaatcaaaaaaagggcaacaggatacctatgcttatgtttactaatgatgaagacaaagaagcatatataagcggggttaaaatattgcacctacaaaagacaaaagaggcaaacttgcttatcacaaaagaagagcttgagactaaacttgaagatagcttaaaaagtgggcgtgtgttaagtgatacaagatatgcaggcaagtttataaaaaactatatagagcgccatcttcagtttgaaggcaactgtagtgatcttacagataaaaatgaagatggcacaacacgccaaagggtgtatgttcgtaatggcaacacaaccactatcatgcgtaatctttggcatataggaacgcaagaaaaaaatgaagattctgttagcatagagcgttataaaaaagatagaaaacttcatactcaccacgcagaagatgccataatcatagcttgtaccactcaaagcatcatacaaaaggtatcaaacgaagcaatcaagcatgaaagtgactttactaacggagaagaagctaagtctaaaaacgccaagatagaaaaagcacttttaaaagcactgcataatagcgaacctatcttaaacatgaaagaaaaagtgcgtcaaaacttacaagaaatcttcccaagccgcaaggtagatagactaaaagagcacggcgatactcacgaagagactataaactcaatacgttataaaaaagatggaaggtatcttaaagtaactaaagatatgtttcaacaacttaagataaatcctataccaacattatctatacctcttgaaagcctaaatatagaatctttagaacttttatatggtaaagatgataataataagaagctatatagtttactaaaagagtttttacaaaatgaaaagaaaaaagattgtccagcatataaaaaactactaaagatttttcaaaaaaaagaggaagttgagcttttaaagtgtgagatagtcataaaagatctaagtaagtacagtgcagaaaatctagtggtgataaaaagagttttacttagagatctactatcaaagctagatataaaaggcgaaaaagataaaagtaaaatcaaacaaaacataaatgaaactttggaatctctagtccaaaaagatagtggagctaagtatctatataacttgctagtaacttatattataagagatgaaggagatgaaaactctactagttttaaacctttactagattacttccataaaaaaaataaggtagagcttttagagtgcaagataagtatagaagataaaggaactgataataatatagttaataaactatttgtgcgtgatggcgtggccaataagggatcacaacaaaaatttcttctttataaaaccaaaaaagatacttttcatataggtgtagtgtatttctcagacaagattaaagatgataaaactgctaaagttcaaatagtcgcaaaaataccttacgataaaagagatatgagcaataagatagatgagagtggaaacctagtttataaatacgtagatacactttataaaaatgatcttatatattatgaaattaaagaggataataaaacaaaagagtatgtatattacctaagtggcatcgacataacaaatgcacaagtcaatcttatacatccaataatacatcaaaaattagcattagtaaaaggtggtaaattaacagagcagatagaacaaaaaacaccaactataggcggcttacaagctaagatagttagacttgaaaaattgcaagttgatgttttgggaaaggtttatagaagaaataaagaaggcagatacgtctatttccctaaagctaagaaaatcatgctaagagacttaagagagtatggagaggagcaagcaaagcttataagatcttacaaagcaaaggagtgataagtggcaactttaaacgtctatgtaagtacagatactatactaagcataaaacatgggaatcttttactctgtgataaagataagctaaaagaagaagttagtctgcctttagacttgttgtcatctgtagttatagattcttataatagtgtgcttactaagcacgttttagtctccttagcgcaaaataacgtgcttttagtgctttgtgatagcacgcacatgccaacttctatcttacttccctttcaaacacatagcacagcttctttgcacatacgcaagcaggtaaagatgcgtcaaaaacagttaggacttttgtggcaagagataatcaaagcaaagattacaaactctgcaaactttctgcatttaaaacaaaaagaaagctataagatcttaaagaccattgcttcaaaagtcttgccagatgataaaggtaacaaggaagcagttgccgcaaaggaatacttcaaagcactttttggggctaggtttaacagacgagatgaaaacccagccaacattatgcttaactatacctatgcactgcttcgtgcaaagtgtgcgagagtttgtgctgctaagggtttgcttcctagtcttggcatacaccataactcttttttaaatagctttaatcttgctgatgattttttagaagtttttagggcttttgtggatgcctatgttactaactatcttgaagtttgtggagttgctaatagcatagaaagtcaagagtttatactaagcccaagtgataaaaagcatctacttagaatctttgatcacaaaatctgtgtggatgataaatattatttgatagatactgcaatagagcaaagtatagggtcttacttacaagttatcttaggagagagggaacatctgcaactacctgtgttagatgaaagatatataaaaaatatagctagttagtgataggttgatgaacaaaaagcgtgtctatatgaaaaatgttttatatatttcttaagacaagacccagaagatcttggctttaagaaaaccgtggtaaatccacgtgtgtacgacttaagactttaaaatcttaagtcttattataagagtcccctgaaatcctaccttcagagatttgaagtatagcattttaaagtttaaaacttttttaagctctaaaaatatgcttttaaatccctatattacgggcccaatcccatcacgtattataacatgtaggattttaggggactcttataacatttaagtactctaaaaactactagtataaattataacatgtaggattttaggggactcttataacgcgtttgagtggtgcggcaaatcctttggaattataacatgtaggattttaggggactcttataaccttactagctatatcaaatccaaaaattgaattataacatgtaggattttaggggactcttataacaaaacaatctaataacggaattattgcaatattataacatgtaggattttaggggactcttataacaaaaaatatagctgagtttgcaaaaattgaattataacatgtaggattttaggggactcttataactagctgatatttcagttaacggcaatgattattataacatgtaggattttaggggactcttataactgtttttatttgcgtctttgctgaaacgcgattataacatgtaggattttaggggactcttataacctctaataagcttagccctactttaatagaattataacatgtaggattttaggggactcttataactggatttacgagtggcttttatatcaagtggattataacatgtaggattttaggggactcttataactaaatcactagccataaatacacgtttgtattataacatgtaggattttaggggactcttataacacgagatagctaaaaagctttatgatgctaattataacatgtaggattttaggggactcttataacttttattcttatgcagcaaagaaaagcataattataacatgtaggattttaggggactcttataacataaaagtgaagcacccaaagtagagactgattataacatgtaggattttaggggactcttataacttttttgttttttaaattcataaactattaattataacatgtaggattttaggggactcttataacacaagaacaaactgaagaagagacaataagattataacatgtaggattttaggggactcttataactgttgctagtactccaacgattgcagggcgattataacatgtaggattttaggggactcttataactaaagataatgaaacagctttaaagtacttattataacatgtaggattttaggggactcttataacaaataatttctaagagtttcatctgttatgattataacatgtaggattttaggggactcttataacttggtgttccaatagccataatatttttgtattataacatgtaggattttaggggactcttataaccctatattccttgcctgatgatgaggtaggattataacatgtaggattttaggggactcttataaccagaaaaaatcataaaagattatcaagatagaattataacatgtaggattttaggggactcttataacccataaagtgtatgttttatagcttgcctcattataacatgtaggattttaggggactcttataacttgtttccttctaaagttagtatctttacaattataacatgtaggattttaggggactcttataactagttgatagggctaggatagttaaagactattataacatgtaggattttaggggactcttataactctataacttctagactaaagttttctactattataacatgtaggattttaggggactcttataaccattcaaaaagcacagttgacttatagactattataacatgtaggattttaggggactcttataactctataggcctaagagagtatgactacgagattataacatgtaggattttaggggactcttataactttaaagcgaaagattaaaggctaggcacaattataacatgtaggattttaggggactcttataaccaaaaaccactacttcatttgggtagcaagattataacatgtaggattttaggggactcttataactattgaaagtataggtttagacatattttaattataacatgtaggattttaggggactcttataacgtaagacattattagcaactaagcgcctatattataacatgtaggattttaggggactcttataacccaaaagctccccaaaacaacaaaccactaaattataacatgtaggattttaggggactcttataacagaaattaccaagtacggcgatgtctttttattataacatgtaggattttaggggactcttataactaaatcgctagccataaaaacactttttttattataacatgtaggattttaggggactcttataacctccttcaatgagcctttataatgcccttgattataacatgtaggattttaggggactcttataaccgcaagtatctaaagtatctaatatcatctattataacatgtaggattttaggggactcttataacaaataaccactaaacccattttgcaatctaattataacatgtaggattttaggggactcttataacacctttgttcatatcgaacaacctaatctaattataacatgtaggattttaggggactcttataactaacataaatccatttgtaaaatttttagaattataacatgtaggattttaggggactcttataactaagttttgaatttgggctcttgcttgctttattataacatgtaggattttaggggactcttataaccatagcataagctatatctcgctcgcctatattataacatgtaggattttaggggactcttataactaaaaaaactgggataagtgtaggtgaggcattataacatgtaggattttaggggactcttataactcccttaagcggtcgtttatataaatagttattataacatgtaggattttaggggactcttataacaaaagaggatagattataactactttagaattataacatgtaggattttaggggactcttataactcttttaaaagatgtcttatcctactatcaattataccatgtaggattttgggagaatcttataagctttgctacactcactagcttatcttccctataccagttccaagaccttgaggagtagtaacgcttgtatttacaacgcctgcagttgtgatgtgttctataaaagcttcggctaaactttttataaaaacttcattttcttttgttcttttaaagccttgggcctctatctttagtaaaaccaattcttttaatgcgctcgcacttaacatctttacccttatgttgtttttttagttataaagatttaagggataaaaagattctgaagtataaatatatcgttacaagggtgtcctagacccttggtaacaaaactaactataaggcttgaagatgaaaatcttaaaacttatgtgaatacgtttttaagtatagtagcatctatagttactattatagcattttttctaaacgttctctaagataaccccctagcttttgctagggcggcttagagaaaagtttatttaaaaggatagatatgcaagatgtgggatacataaaagaagtttgtatgagattagacataactcaaaaagagctagcgcttaaaataggtgtttcacaaagcattatagggcagtggagcagaggtgctacgcctttgcctaggatgggctataaaaatgtttgatttgcttttaaaagagcaagagctagaaaggctaaaagacactaactttaaaggctaatttaatatgaattaggctttttacctacttcatatcccctaaactaaggcttttaatcctaacttaaagcttttttgcacataaaccaagtgataagcagtatatttataatgtaaacctctcttataaaggcagcataaatggatattagtttgtcttgtgggggacttattgatactagtagggatacaaacataatggggtttttaagaattacaggtatgcatacaaccttaaaaaaagctatcacttttaaaatgaacttcttaccttaagccctcttaaaaacatcaatttagcatctaaatgcttcttacttttttacatacttatcaaccatatttaatacttcatcaagctttttagacttctcatagtaaagcaaaaagggctctacccagctagctacacccctagtactccagtttgctacagagtgatagtgcatatttaccagttttgcaaagtcctctttacttaaatttaattcttttaatttatttgaaaacatttcataagtcataacatagccttttttaatattttaagtatattaacatagttatttttaatattttattaatagaagtcttgacttatgtacgtaatttatgtataatatttttatgtttttaattaatagttaaaaacaaattcaacatggagcagaagcgatggaactaattacctcaataattaacctagtttcagcgattatcacattactcagtgcgataatcctgataaaaaagaaatagcaaaaaagctagcgtagattaccacgctagcccacagcttttcttttttaccaaagcttctattaatattttactacaaggagttaaaaaatgttagaactagcgcaaagtattttgatattagccttatgtgtacaagtgctttatcttagtataaagataaaaaaactagataagcactagctccatagtccttcaacccactctttaccgctagtaggtaaaagatgggcgtaacgcatagtcttttttatgtctttatgatttagtagcttttggattatctgtataggtgtgccttttatggctaagtgactagcaaaggtgtggcgcaagcctctttgtttggaatctaaaatattttttttaattaagttttagttttatgttgttacaattttaatataacgcataggcatttataggggattcttattgcacaaagattaaaggcgtataggtcttaactttaagcataaggattaatcttgccagaagaacataaaagcaataaaaaagatgaaacatctactactaatctagtcgataaagaaaagacatcacaagctttaaaaaaacaaagtcctatctttgtctctattatcatcccagtttttaatgtagaaaactatatagcgcgctgcttagaatcttgtataaatcaaaccttaaaagatatagagatagtagtagtagatgactgctcatctgataactctatggacatagccacaagctactccactaaagacgcacgtataaagttagtgcgtaatgtaaaaaatcttggtacttttcacgcacgtttagaaggtataaagcaagcaagtggaaggtatatgacatttgtagatgctgatgactatatagatctaaaaacttgtgaagttttaaaagcaaagattttagattccataagtaaagatggcgtagtagttgatgttgcattttttgggatggagtatgaccctaagacttggaagaaggtctctccaaaaataccagcacacactagatataaagatgatgtattaaaagcagtatttttagactatagcactcctccttggcagatatgtgctaagttttttagaagtagttttttaaaagatgctttggtttacatggaagatgtgcctagattaaagatggcagaagatgtgctagcaacttttatgcttttatctttggctaaaaaaagtatagggataaaagaaagattttatatttattgtgaaagctctagttctataactaggaaaaaggacgcagtaagtacgctaactaggatagaagacttgaaggcagttataaaagagtttaataaactagattctatacttccactaagtgctaataagtactttttggaatctagtgcaagatcacaaaatatacttaaagcagtcatagagttagagtatagatatgatataaggaaaagcaaatctttttctccttacttaaaagcttgctttaagtctttaaagtactatgtgaagtggcaaactttcatgcgtatggccttatatatcataagccttggcaaggttgctttataagccagtaattactcacacatcaaatacttctaagtttttagaatctctgcttttagaatctttacccttagagtctttccccctagaatccttacttttagaatcttgccctggtaaggcgcaaaaagattccactatacaatcttttataatgaagtagtttgtgccatctttatagctatagtctatctttaggtcttgtgcatcaagtgtgtttttaatgatatacattcctagtccaaagccttttgagtttggatttttcttttctttaaagtagggcttaaagtactcatttaagctcatcttcaaaggctcgcctaggttggagatgattagatcacactttgagctttgaacttttactttgccatttgtgctgtatttgatagcattatcaagtaagttttttacgcttagtgcaaaaagctcaaagtctgcttttacaaggtcactactttctactagctctataggatcattaagagcatctattaaaagcatcttttttacaaagtttattagatcaactaataaaaactcgcttttatttaggttatagcttttgctagctagctcttctactcgtgcaaactcatctataagctgattaagcctctcaaagactttacaaagcctttctttttgcttttggtcttctagcatctcagcagttatcctacctactgtgatgggagttttaagctcatgcattatgctacgtaagaaaagttcgcgagattgattaagtgcttttatcctacctactgccatgttaaagcttagggcaagttggcctatctcatctttttgataaaggctcatatctacttcttttaaagttccaccttttgaggcccgcactatatcgtgtcttaagattcttaaaggaagtagtctttttactagtaaaaagtaggttaaaagaagggctaagacgcctataagcgttatgatttgatatctagaccaggaaaaatgcgtggaatctttatacacaaagatatccctatgagtttgtatcaagatgtagatgtcattataaacttgtaagatttttacacttgcgcgcctatcaagagagtagggcataactgaaggaagttcaagtttcatcttatctcttatatcttttatctctacaaagttaatatttttaagataagcccttatctcatctatgctggcgtcatactttaaaagacggtttattgaggctgctatgttgttatactgccttaggctttcaacttctggttggacgtgggcataaaagtaagaaaaggttaaaaaaagcactaaggccactaggaataaaacattaatggtgaaaaatatagagtgtctcaaaactagccttttttagttacttttgctttagtgtttggcttgctatcttgtttagtatgttgtatgttaacttctatgttgtcttgtagtctatcttgaccacttacaactactaagtcgccactttttacattgccttgtactacagctatcttttcttgcaaagaaagcaagtttacattaactgcccttgatctgccattttgcactataaagattacagttcttccttgatactctactacactatctcttggcacaagatagcctttaactagcccttcagtattaagcctaacctctactgccatgccatctaaaaagtttggcctataaggcaaggagatgtgtataggaaaggtgcgagaaagctcatcagcctttggtataagggctgttattctacctacatagtgtttattatctatatccatattaactttagagcccatcctttgaaacttggctatatcgctaggcacataaactataacttctatatgagaagtatttagtatcaaagctacagggtctcctacttttagccactggcctatgttagttagcctatttatcactatgccatcaaatggggcttttatatccatctgggttaactcttctttagaaaggtcatagtcagcttgaagactagctatatttgccatcttagcttttaactcaaactctaagttttcatactgctgaagtgctatagcatcttcatctagtaagtttttataacgtgctacttcatttataatcttttgggcttgaaactttgcttcttcaatctttgcttctttgacttctagttctttttgaagcacatcagtattaagacttactaaaatttgccccttcttaactctttggccaacattaaaccttaaagcttgtactactccttgcctttgagaggcaacttgtgagctttctttatagtttatagtccctataaaaacgctttgcttttctagggagccttcttttatgggagtagtttttactagaactggccttgcaagaccaaagctaaataataatagtgctaagaaaaatactttcatgacgccttatgttctttaagttaatttcaattttttgcttgcaagaagtttagcttttttttgctaaacttaacgcccctaggagtagcaagcaatcgctatttatatagaggaaagtccgagctacaaagacttaggattccatttaacaaatggctagtgtaaactaagggaaagtgcaacagaaatataccgcttttatagaatctagattctataaaagtaagggtgaaaaggcagggtaagagcctaccgatttataagcaattataaatgccatgtaaacccaatccgtagcaagaatagcaggttaaataagtcttaatattaaagctattcgcta

SEQ ID NO: 4255 - DNA, 6921 bp, synthetic construct
  source 1..6921: mol_type = other DNA
  misc_feature 1..6921: note = Synthetic
gttttataacttacttgttttttatttttttaatatttcatttttgcttattagacttaatgaatctttttaatatttgtaatgtttataacatgtttgattctttagttttaatgtttgcttgttttagcttaacactttaattgttttaatctattattttaagctttattttttagttttttatttctttaatacccaatctttctttattgcctatcttatttcttttttattatccttatggcttatttttacttaatatttctaattttattatttggcttttaatgttttagagttaaagtgggtttgggtataagaagttctaaaaagccttaatgctataacattcttgcatttaaagctcatagtttaaggttttttaagcttgtagtgattttaaactttatctttataatcatacatacctattacatattttttagtattaacaaaatggatggacttaatacgttatagcagtaggtagtagactagttagttggggactcttataacgttaataagtttaaatctttaaggaggtgaattataccatgcaaataaataatgcttttacttttataaaagtgcttttatgcaaaagctaagccctataatttatggcagtaggttttccaagcttaccaaagctaaaagtcaaacaaacttctccctaagtctaaagtctcactacgctttttaggaggtcctataagtatatgcatgttttcatactgcctatcagttatctcaagcaccctaacgctaccatgttttggcaaagcagtctttatcttagcacatagccccttagaagattccacacctttaataatcctgctataaatagaaaattggatcatcaaaaagccaagcttaagcaagtgtgttctgaacttagaagcctcacttctttcttcactagtgctaactggcaggtcaaacataactaatactctcattaatatatctccattcatgaaaactcctatagtctcacataagctagataaaaatttaaactaaagttaataagttaaaatttatgttgttatagccaataaagaatttatacaaaaaggtataacatgatagaggttaaaagggtactagggcttgacataggaacagaatctataggctatgccatagttgagattcatgagattaaagataataaaaaagataaagataagattgaagaaagaaaatgcaaagaggctagccatatcatcacatctggcgttaggctttttgataagttaagtgaagatagatttagcaagcctataagtgctgtacgcagggctaataaaagtaaccgcaaccgctttgcacgtcgtcataaacgtatgcaagagatggaatctatctttaaagacataggctttttaaactcagactatgaccacgatagcttttttacaaactttctaggaaagataagaaaagcaagggataacaaaacgctagtcccttacaacctacgcgaacttggtcttaaagaaagactagaaaaagatgagatttttgccatcatgtatcacatatgtaggcatagaggttatcgctcaggtccagtgctagaggcgtctaagggtaaaaaaggcaaagataaagaaggcactaaggataagattctaaaagctagaagcagcatgggggacttaacctttagcacacacttgatacaagaggccataaaaaagcatgtgcctcctgcccatatgaagtatcgcaatgaagtgatggcagataaggacatgatagaagatgaagcaagaagaattctaactaagcaagcagagttttataaagagttagattccacttttataaataaagtcatagatactataaatgctaaagctccagccttaagtgcagagcaacttgaaaagatgctaggcaagtgtacttttgaaaaaggtgagcttcgtgcaccaaaacattccctaactaccatccttagcatcctccttcaaaagttaaacaaccttaagtttgatgatagtagccttaatacacagcacttaagtgctctagcaagcctattttttgaaaaaggctgccagttaagctataaagacttaagggatgttttaaaatcagaatctaagtttaaagatatagactatgtaaaaagatgccaagaaactatacaaaaaggcttagaaggatgcaggctaaaagaagatagtgatataaaaagctttgttactttatcttataggctagctttaaatgtggataacgaagcagattttatagcgttattagaaagcagtcttgatgtaaatagccatacaccagattctaaaaagttttacagcaaagtaaaaaaagactatgaggctatagaaaaaaaagagatattttataagcaagatagcataaaagagatcttagagctttactctgtgaaagacttagcttcagctttagggcgggatgatgtagattctatagttgaaatttttagtagggaaaaagactatgtggcttttcaagaaaagctgcatgatgagctagctagacaaggcaagctagagctaaaagaaaggcttttaggtctttttgaaaatagcatcttaggtacttctaacctaagcttaaaagcccttaagaagatagagccttttttactgcaaggacaaaagtatatagaagcttgccaaagtgcgggctatgaactacaagataatactaaaaaatataaatacttaccaaccataacaagggcacaaaaagaaaaccttatctttgcaactaatccaaaacttagaaagattgccaatcaagtagtgatattaataaatactcttattaaaaagacctatatatctaatggtgagcacaagcactataagtttgatcatgtgcacatagagctagcacgcgacttgccaaaaactaaagaagagataagaagagagatagagcaaaataagttttttagaaacgaaaatgcaaacgcagaaacatttgtgggcaaaaatgcaagcaaaaagacattgcttaaagcaagactgcttttaaatcaaaatgagcgatgtccatattgtggtaaaacactatataaaaacgatcttgctagctatgagatagaccatatcatcccttattctataagttttgataatagcttttcaaacaaagtcctagcacacagagattgcaatcaaaaaaaagctaacaggatacctatgcttatgtttgctaatgatgagaacaaagaagactatgtaacaagagttaaatcactgcacttgcaaaagacaaaagaggcaaacttacttatcacaaaagaagagctagagactaagcttgaagaaagcctaaaaaatggacgtgtgctaagtgatacaagatatgctgggaagtttataaaaaactacatagaacgtcatcttcagtttgaaggaaactgtagtgatctaacagataaaaatgaagatggcacaacacgccaaagagtatatgtgcgtaatggcaacacaactactatcatgcgtaatctttggcacatagggacgcaagaaaaaaatgaagattctataagtgtagagcgctacaaaaaagatagaaagcttcacacccatcacgcagaagacgccataatcatagcttgtactactcagggcatgatacaaaaaatatcaacgttagcaaaggattctgaaggggaatttgttaatggagatgatgctagttctaaaaacgccaagatagaacaaaagcttttaaaaactttgcatcaaagtgagcctatcttaaatatgaaagaaaaggttagacaaaacttgcaagaaatctttccaagtcgtaaagtagataggctaaaagaacatggagatacccacgaagaaactataagctcacttcgtaatgcaaaagctggctatgccaaagtagacaaagaaggctttttagagttgaaacaaaaagatccatgtgcactaactatggtaaaaagaatctcactaagtgagcttaagcttataaacttagaatctttggttaataaagacactagtaacaaaaagccttataatcttttaaagactttcttaaaagatagtaagagtgaagattctagtgcttttaagcctttactaaactacttccataaaactagcttagaagatcttttaagttgcaaagtaagtatagaagataaaggtagcaatattaatgttataaataaagtctttatccgagatggcgtggctaacaaaggctcacagcaaaaatatctactttataaaactaaaaaaggcaccttccatataggcgtggtctactttgcagactgtataaaagatgataaaaatgcagttgtgcagatagtctctagggagacttatgataaaagggatatgagtgataaaaaggataaagatgggaatctggtatatgagtatgttgatacgctttacaaaaatgatcttatctacatcaagataaaagagaaaggcagcatcaatgaatacattcactatctaagtgaagttgatatttcaaatacacaagcaactatgcttcatccagttatccatgaagagttatctataaataaaaaaggtgatatagaagcaaaaacttatgcgtggaaaccagctataggtggcaccaagatactagagatagaaaagctacaagttgatatcttgggtaatgtatataaaaaagatgaaacaggcaaatataaaaaatacaactatcaccaagtaaaaaaacttatgctaagagatctaaatctttacaaagaagagcaagaaaagtttttaaaagagcataaaaagctataaagtggctaatctaaatgtctatatagacacaaacactacgctaagcatcaagcatggcaatcttatactagatgatataagcaaacttaaagaaagcgttagtcttcctttagagcttttatcatctgtagttatagattcttatagtagtgttgtaactaaacaagttttagtttctttggcagaaaataatgtactcttagtgctttgtgataacgcccatctgccaacttctatcttgcttccttttcaaacacatagcacagcttctttgcatatacgcaagcagataaaggtgcgtcaaaaaaagctagggcttttgtggcaagagataataaaagcaaagattataaactctgcaaaccacttacgttttaaagataaagcaagatataaaatcttagaaacgcttgcttcaaaagtcttaccagatgacaagggcaacaaagaagctatcgctgcaaaagagtattttaaggcgctatttggggctaagtttaataggcaagatgacaatgcaactaacatcatgcttaattatacgtatgccttgcttcgtgcaaaatgtgcaagggtgtgtgctgctaaaggtttgcttcctagccttggtatacaccacacctcttttttaaacagctttaatcttgcagatgactttttagagccttttcgtgcttttgtggatgtttatgttactagttatcttgaagcttgcaaagggcttgatagcaagggaagccaagagtttatattaagcccaagtgataaaaaacatctacttagaatctttgatcataaagtttacatggatgggaaatactatcttatagatgctgctatagaacaaagtatagggtcttacttacaagttatcttagagaaaagggagcatctaagcttgccagttttggatgaaaggtatgtaaaaagtgtagttagcaataatgggtaaatacaaaaatgcacttatataaaatcgctttatatatttcttaaagacaagaccctaaggccttggctttaagaaaaccatggtcttaaaccatgtgtgtacaacttaagattttaaaatcttaagtcttattataagagtcccctaaagttctacatttagaggttttaactatagcattttaaagtttaaagctactttaagctttaaaaatatgcttttaaagccctaaattacgggcttaagtccgacatgtgttgtagcatatagaactttaggggactcttataacccagatcggtaggtccagtaagtgtattgggttgtagcatatagaactttaggggactcttataaccaaaaggtttgaatactttgttgtggatctgttgtagcatatagaactttaggggactcttataaccagatggagttataccagtaggctttgcaggttgtagcatatagaactttaggggactcttataacaaatttttcgagattataaacagcactcccgttgtagcatatagaactttaggggactcttataactaatctttagggggcgttttggagccgtgcgttgtagcatatagaactttaggggactcttataacttgaaaaagtgaaagaagcaatttcaatttgttgtagcatatagaactttaggggactcttataacatttaatgtcaattcccgagtatataagtagttgtagcatatagaactttaggggactcttataaccatcttctagacttaaagcatttaggtcttattgtagcatatagaactttaggggactcttataacaaaataatgaatgaggatgtgattgaggggattgtagcatatagaactttaggggactcttataacacatagtgcttgataaagatataaattcacattgtagcatatagaactttaggggactcttataacaactcaacttggcggggattatataatcaaattatagcacataggaatttaggggattcttataacagcattagctttttcttacgtagaaaaactaggtaaaggaagcagggaaaagctagaaggaagcgtactaaaaaagcttatagccttaaacacacatggtaataaagaatttagctacactgactttgtaagat

SEQ ID NO: 4256 - DNA, 23549 bp, synthetic construct
  source 1..23549: mol_type = other DNA
  misc_feature 1..23549: note = Synthetic
tttcttttgtaatttatgaactttttgattaattttaccttttcctttaaaaaaaggattaatccatattaattcattattgtaatttctccaatgtcctctaacaataaaagtacaatttgtttttcttattccttttttaattttaagtaaatctatctgtttaatttcttctattttatcgttatcgttacgaaaattgattatatattggaaaattgaaaaacaatttaatatagtttcataagatatagtatcaatattttgtcttaataatatatttccaattttttctttagaggatatattaagtaaaatatcttttaaaaaacttttgcttgaaaattttaatgtgttatttatttcgtgaaaataaatttctaaaaagctatcatcatcgtttattattttaaacattccctttttaaatggtaatttaatatcatatattaaaaaattagaaaatataactcttgatttttctgaattaaaatcttcattataagcttcaataattattgggatttctttatggtttttattacaatcatcaagagttacatcaattgtttttctatcaccatttatccaattttttaatgtaatttgtaagtcgttactcagttcatccttataaaattcatttaaagatactttttttatattatctatattgaaataatcagaacttaaattaaaccaattattttcttctaagcctttaataaattttatatatcctaaatctataaatgtaatataatagtatttgtctatttttatcatttccaagttttctgcgaaattatcaagaatattggatatatcttctaatttacgatttttgatttgttcttcgtttaataaaatttttattccatattttatttttgataattgcattccagtcttcctattgtatattcatttttataatttaaaaaacttttttctatatttcctaaagagttatatatttttttatttaaaatacttttaatccttatttaaagttgaagataagttcatctaaaaacttatctatatttatatattttatttcttgttcatatttattctttagctctttttgtttagaagcttcatcaactagctttctcattaaatttgtttttggaagatataaaagaggaaacctattaaatccatttacttcaatatgttcattaaactcttttatcttttcttctcttatatatttatctgtaataaatgcaccatttaaaacaaatattatttttgcttttatattgctctttaatattaaatgagctgttctcatactctcactaatactctcataatcatcaaaagatggaattatatagaaatcactttttagatcaatcaatctctcatcaaaatatccacctaaatcacaaatcaaataatctgattttgtttttattgattgttctgcgattttatcttttaaaatcaaacaatcttctcttctctcaagtgttttgtcttctggaatattgatagttgagataacattatatacttcgctatctctctttttatcaaaatttaaaattgcagaatttaacttttctgctaaaagtcttgcaatagaacttttaccaccacttcttaaatttgctagtgtaattagtttcattttttactccttaatctatttttagaacttcaattttatttattgttctatttgagaattttttatagcattttgcaattgcttcatcaattccatttgcttcaattgtagtcattgaaataatatttgaatatggtaatttaaagctaaccctaaatgtaaattgtttcattttatttctcttttatgtagatagttttagctttttcaattaaaaaatcaaaagctttttctaatgtttcaaaatctaattcataactaagattatgaagagttgctgcaactatatatttctttttgtttttaataatagaaccacaataaaactcactatctgaaagcataaagcaatttttagtatctctttttatgtgatatttatcacttttatctatttttagccacacatcactaataggtagattttttaaatcttcagctgtttttatagtatttaaattttgcatttcaattttctcttttaatttttaaccataaattggctacaatttaatcttaagaattcaccaaattctttcattgttccaattccattctctaacgccaattttagaatgttttggaactcttcataactttcaaacatatatttcccaaatttcatttttactccttttattttaatagtatttataatagtttaaaatactattaaatactttataatgttacaatttagaatattaaaggatacttaataaatatattaaatacttttaaatactaatataaataaaatcatttccacatatattgcaagtaatatctaaattttttttactccaaacattacaaccacattcacaacaatatttacttttatttttactctcttccaggacaacttcttcaatatgtaaagtatcttttactatagatccaatagttgtatataaagatgttaatatctcttcttcattgtttgtatcaatcatctcttttatatcttcttcattaagctcttcatcatttatgataaatgttgatttatttgaatatctatcaaaacattttaaaaataaaccttgtttaaatatctcaatacatactttttcaaatattccgttttttagaggataatcattcatcttttgaccagtttttttaccaccaggtttaccagttgaagatggaattaatcctaagctttccattttgtcagcccattctttattgtgataacttctttgtgaaggagtactaaattcatattgccaaagatgtaccatctcatgtactattgtttgaaatatctctataaagttagaacttgagaaataagaaggatttaatgctagttcatggttttgtttacctttactactaatccatctatttggactaaaatatcccataactcttttttgtctagttatagtaataatacaattaggaagttcatttgaaaaaagttctttattaaaaatattaaatatctcttggaaatattcataatattctaaagttgtagatttattctttttcattcatttccttttatatcgtactatataaacgaaatcttagaggaatttagaaataaaaaaaagaagtataaaaattttatattgggtggtataaaaaatttatactacttagcagttgaaagcattatatgaagatagatagaaaaatacttttgctacaaatacagagtaacaaatacaaagtttcatataaaagtaacagttacaatattaaagatagaatttaattttaaatataaatattttatgaatgtctgttttcgttacaattcacaaaactatattataaaaaagttttaaaattatctaaatagttgactagaagtagttattaattatgattataatttattagcaaaatattttagacatatatatctgtaattagactaaatattatgctataattacaaactagtatgaattaggattaaaaaatgcagaaaatttcaatatatatattcgataaacatatagcagatatgtatcaagatggagatagagtatatctcaaacaaattgatgatttatgtcataaagtaagtcctttaatgctaagttctaatcaaaaagagatagatacaacacatttagtacatcttgaaagagttgctggattcattagtgattctttaccaggacattttggtaatgaaatattaaacaatttctttttacaaaataagaatatttatccaacagtaagtgataaattactgtttattgggaataggggactgggagcaattacatacgaacctgtaatggaaaaatcaaatggctttatagaaactttagaattaaaaagcatgtttgagaaagctaaggaattaaaaaaaggaagagattatcactctttacaagatgcttttttgataagtgcacattcatttgtaggtggtgcaagaagtaaagcagttggagcaataaatcttgatacaaaagaggtttttttaggagatcgtacaaaacaattaagtgaaggttttatgcacgcaattataaagtatgatgatacatcaaatgatgatgagaataaatcaacatactcaaaagtagaatatatttatcatttaattgctaaaaaaagtggtatagatatgtcagattgttatttagttcaaactgatgataaacatcattttgtaacaaaaagatttgatatagaaccaaatggaaaaagatatcatgttcattcatttgctggattacttcacttagattataatatcccaagaacagtaggatatgaagatttacttagaacagcagtaaaattaggagcgataggaagtctaaaacagttgtttttacaaatgctttttaattatatgtttgtaaatcaagatgaccatagtagaaacttctcttttatgtgtgatagtgattttaaatataaagctacaccagcttatgatttaacatttgccaaaggagaaaaacaaactgtagagcatcaattatctttatatggtaaagctttatcaaaaattaatatcgaagatattactacattagctacagaattttcaattgatttagagtttgttgcaagttctttagaaaaaatgaaaaacctaagagataatgaacttccacaactacttaaagattatgaagttgcatctttaaaacaaaaacaaattttagaaaacacaaataaaagaacattacaaggagtactataatgagtagtgatttattaaaaaaacttcaagatttacaaacaaaggttaagaaaaaacttaaaaacaatcttaatataaatagtgcttttggaactcttacagatgaagaaatagcaatggtattagctcttagagcaaagcaattgagactttctcaaaataaaaaacagagtgattttgcaaaagaagcagaattaagttctgcttcaacatattctaactatgaacaaaaaggaagtatctcaatgataaatttcattaaagtaatgagaacatttggaagacttgaagagctagaaaaacttttacttttaactacaaaagagaagattgaaaaaatagagaagcaaagaattaaatgatataaataaacatttatttaatttataatattgtgtcaaagtatcaaaaacctttttcaatctttaagttattatatcaattaatataatagtgaatttgcaattatttattttttcagatatagtgtatgtgttaaagatgattttgagtttaatcacatctttcgtttgcttttattgatatctacaaaaattaatactaactaacttaaatagtaacatataactccacattacactttattcatagctttaatttagagcaaataaataaataaggattgcacatggcaaatcaaaatattggaatcgtaaaatggttcaataatgaaaaaggttttggatttatccaattagaaaatgaaagcaatgagttttttgttcatcatagtgaaattaattcatcaagttatggaagatcatctttagatgaaagacaaagagtatcttttgaaattggtaaaaatgaaaaaggtcctcaagcaaagaatgttagagtaatctaataataaaatgagcatagattataaatattaaactatgctctaaaataaaattataaaggagaagattaatgtcaataacaaatattagtataagaattaagaaattagttttattaagacttattaatgatggtgaaaatataatagatgcaagttcaaaatctggattatgtatcaaagttgcaaaaaaatatatagaaaataaataactttactcttattatataaaacagataatattaaaatataaaaaattacttcaaagtatcaaaaaccttttttaatccttgagctgctactttttgttgaacttttgcatatctacgagtagggcgagtagaactatgtcctaaaatagcagcaactacttccatactattatctgtttcatttaaagatatttcaccaattaaatgtcttaaatcatgtattcttataggttttgtaatttcagcagcttccaatattcttttccaagcccatcttagatttttaactttatctccagtaactaaagatttaaaaacataaccagctttatcttctttatttgctaaaatttcataaagttcatctgtaatctcataactcatattttttttagctttatttatttcaaaccctatgtaataaactcttttttctaaatcaatcatatcccaagttaaactaagaacttcatcttttcttctaccatgaagtaaaaatgtaaatatctctttgtataatggttctttaaaatctataatagctctaaataacctttttgattcatctatgtttaatggataatctcttaaattgtcatattttggtttatcaactaataaaactggattattagttatatatttattcttcattgcatatttaaaaattgcagataagtcagctaataaattatcaacagttttaggagcttttgattttaataaagtattaactagattttgaatttgaaaagattgaatattattaataaataaattatcaaatatagatttgaaatgagcattataattacttttctttgctaaaattgttctactaactactgatctagaattttctaaatgttctatatatattttaaatagttctttaaaagttaaatctttttttatatagttgttatttataatatcactttttaactcttcttttttcaaaaatgcaatttttgcatttgttttgaattgatcattttcataaccaataatttttctatattttttagaatttatcgtaaaggttgcaacaaatactttacctttaaagttatcttgataatatcctattccaggataaatagttttcgtagtttttggtattgccaaaggtatcctttaaggtgtcaaatattcgtgtaaatatctgtaaatatataaaatgaatattaatataaaaccttaaaacccttataagatggtttaattaatcagaattgtaaataaatggatatataagacttcaaaatttcctcttgatgacgaaagttcgaatctttctggggtcgccaaaatatcataatacctaataatttaatcttcagaatgatattcaagcatatgtatgattttttcataaatatctgctgcttcttcatctgttatatcatctttatttatagcacttagtatagtttcaagttcagataaaaatactagcatctctttttttgcttctacatcatcttttgtagctttgttgttatttattaaatcatttaattcttctataaaatcttttgattctggaatcatagtcttttcaattaaattttttaattctagttttatattaatcactttttgcctttttttataattttgtattgtacataaaagcgcataaatgtatctgttaaaatattaatagcttataatgattttaaatagatatttaaaatcttgcactatataaagtaatattggataacttttaaaagtagtttcttttcttctaccattaaatttataataaaattctcaaattttatttccattagaagcaatttttatcctaagacctccaccatcatttaaagaatagttttttgctttaggttttgcttgttttgtttgaatatctttaagtacaataataacagccatatagtagtccttgtaaagaaaatcttgggggtatctttttgtaaaaatagggttttttattttacccctacattatagttgtatttatatgaattattatagatagtgttagattaaagtaatctttagaagttcgattttatagtggtttttagtcttttttggattgtattgaattgaaaagtggtgggtcgtgaaggactcgaaccttcgaccactcggttatgagccgagtgctctaaccagctgagctaacgacccacaagtggcggacagtgagggatttgaaccctcggtaccgttgccagtacgtctccttagcagggaggtggtttcagccactcacccaactgtccgtttacaattagttagttaccagttaaattggacggaaattatagtttcttaagccttaaataaggcttaagaaagccttgagttaagcatttatatttaaaattctataaattatctataattttcttaacaatattttgaggaaaatcatttttataaataggtcttcctacaacaataaaatcaaccaagttttcttttgaaaaatttatatcagcaactcttttttgatcgccactatcttctccaaaaggacgaatacctggacaaagagttataaactcttttgaagtattgtttttaatgtctaaactttcaaaagcagagcaaacaacaccatcaagaccagcctcaaaagttgttttagcaaactctcttgcttttaaatcaatattttctccatagatttttttaaaactttcattatcgaatgaagtaagagcagtaactgctaaaactaaaggtctatttgggatatctttgattctattcataactgtttgcatagcttcaaaaccagcacttgcatgaacattaaacatatcaactaaaccaaatttagaaatgtcttctgcagcatctgccattgtatttggaatatcatataattttaaatcaagaaaaattttaaagtttggatttattgcttttatatcttctaaaaactttttaccatctcttaaataagttctaaaaccaactttaatccatacatcaaaatcttttattttttcaactaaagctagattttcactagaactttctaaatccaaagatacacaaagtttcatattattactcatcttaactcttttttatttggtctaaaatcgcatttataaactttggtgcaccatcacttgcaagtttctttgcaagttctattgcttcatttataacaattgcttttgatagattctcaaataaaatttcattaatagcaagtcttaaaatagatttttcaacacttcctacatcttccaaagtaccttgagtaagatattttataatctcttcatcaattgtagctatatttcttatagttccattaaaaaggtttaatgcaaactctttttgtttatttctaatctttttttcttctaaaatatcatcaacaaattttacaatctcttcattacctaaatcatatgcatatagaagaccaattactgactctcttgcttgtgttcttgttgccaaattatttttccatttcgctatataaatctagcatttcaatgattgtaaccattgcttcagcacctttgtttccaacttttgaaccagctctttctattgcttgttctattgtatctgttgttaaaacaccatttgaaacaggttttccatattttaaagcaactgttgcaataccttttgtagcttctgcactaatataatcaaaatgaggtgtcgcacctcttataactgcaccaacacaacaaatagcatcgtattttccacttgcaagtgctttttcaagagcaaaaggaatctcaaatgctcctggaactaagattaaatctaaatttgaagcaataccaccgtgtcttacaaaggcatcttttgcaccttctactaatctatcagttattatatggttaaatcttccatttattattgctactttttcgtttcctcttagccttaaagctccctctattattctcatattgttctccaaatcttatttaaaataagggttattatacaaaaaaagggcttaatagttagtttgagatttatttaggattaaaattacaaataagttttaatattgtaaacttaaagatatttaaaattttacaaaggcaaggaacatggaaaaagttttaggtttggatttaggaacaaatagcataggttttgcattaaacgaaatagaagaaaaggatggaattgtaatttttaatgaactatcttcaaatagtataatttttagtgagtatatgaatgctgaagatagaagaaattttagaagtggtagaagaagaaacgaaagaacgagtagaagaaaagagaacactagaaagctgttagtaagttttaatttagctacaaaagaaataataaagaatcctatagagtattttaataatcttactaaactttgtaaagaaccatatactataagagaagaagccgtaaaaggtaaaaaattaacaaaagaagaatttactttttctctttatacaatagtttcaagaagaggatacacaaatctttttgctacacaagatgatgataaagaagcaaaagagagcgaaaagataaatagtgcaatacaaaacaataaaaatatttataaaaatagtaactttgttttaccatcaaaagttttaacagcaaaaaaagagaatttagaaaaagatggttttataaatgttgctataagaaataaaaaagacaattacaataactcattagatagaaaactttggcaagaagagttagaaaaactttgtgatagtcaaaaaaacaacaaagagttatttaaagatttagaaacttttgaaaagtttaaagataagcttctaaatggtgtaaatgaaaattctttaggagtatttgagcaaagagatttaaaaagtgttgaggatatggttggttattgtagtttttataatttatatcacgagaataaacaaaaaagagttgtaaatgcacatataaaagctattgaatttattttaagacaaagaatcgaaaactctattttaggaaatttgataataaataaagaaacaggtgaatttgtttctcttttaaaagaagatattgaaactactataaaattttggctagaaactccaaatgttcaaaaaattactacaaaaaatatatttaaaaatgcaggacttaaagatttagagataaaaacttcagataaacaagatgatacagttcaggatataacaacatataaagctattttagaaataattagctatgaaatgattgtaaaaaatgaagatttttattcaaaattacttgaagttttacactactatgtaagtaaagaacaaattataacagagattataaaaatagataaagaaaaaatattaacaaatgaacaaatagaaaaaattgcaaacataaacaagaattctagttcttatatctctttttcattaaagtttataaatgaaattttagaaaagatgataaaaggtattagctatcaagatagtctcacagaacttggatattttaaaaaatatacaaatattaaagcttatgattatcttccaccattaaatccaaataatgaagatattaaatttctcaaaaataaaattccaaattttaatcctcaagagctattttatcaaccacttgttagtcctaatgtaaaaagagtaatatctattttaagaagattaataaatgaattaataaaaagatatggaaaaatagataagattgttattgaaacagcaagagagttaaactcaaaaaaagatgaagaaaaaattaaaaaatcacaagaacagagcaataaagataaaaaagaagcagaaaaattacttgaaagtatgaataaagagattagttcaaaaaatattttaagagcaagacttttaaaagaacaaaaatcaagatgtctttatagtggagaaaatttaactttagaagatgccttggatgaaaatattacagaaatagagcattttattccaagaagtaaaatttggatagatagctataaaaataagattttagttctaaaaaaatttaatcaaaacaaatcaaatcaaaatccagttttattcttaaaatctattggagagtgggaaaattttcaaggtcgtgtaaatgaatacataataagcaaagacaaaaaaaattggttgattgatgaatcgaatattgaaaaaatttataatgatgaaaaattagaagatagatttttaaatgatactagaagtgctactaaaattgttgcaaattatcttgaacactatttatttccaaaacaaaatgaacatggaaagggtgaatcaaatgataaagtaataagagttacaggaaaagcaataagtgaactaaaaaaactttggggaatacacgaagcacagcctacaaatgaagatggtaaaaaagatagacaaacaaactatcatcatacaatagatgctattgtaatatcacttttaaacaactcttcaaaaaaagctttaaatgattttttcaaacaaaaagagaatcattttaaaacaaaagctattttagaaaaattaaaaacaagattccctatttcaaaagatggtaaatctttatttgaatttgtaaaagataaagttgaaaaatatgaaaaaaatgaattatatatttgtccttttatgaaaaaaagagaaaatataagagggttcaaagatggaaatattaaacttatttgggatgaagaattaaataactttgctcaaatagataaaatagatataaataaaaatttattactaaataattttggaaaagatttaaaagatgatgaagtaaaaaaaatatttgaaactataaaaaatagactagaatttccaaaacaaaataatataaaaaaagctttagaagattatgaaaaaagattattggaaacaagagctagaataaatgcaataaaagatgagataaaacaagaggaaaataagcttccgagagataaaaaagctattgatatgcaagagagtttagcaataaaagaaaaaatagaaactcttaaaataaatcaaaaagaacttttaaaagagatggaaacgccttgttattttttaacaaaagatgccaaaaaacaaatagtaagaagtctaaaattaaaaacaaactctgtaacaaaagctgatagtataataataacagataaaaaacaaaataatagagtacaaaggcttgataaagaagtttatgaaagtttaaaagagagtaaaactccatttgtagcaaaactaaatgacaatactctaagtgtagatttatacaacacagaaaaagggcaagtaattggactaaactatttttcatctattaaaagcaatatattgccaaaaataaatgaaaaaaaagtatcacttataaaaaactttgaagataaaattactatttcaaaaaatgatattttagaggtaagtgatttaaaaaatcgtacaaaagagtattttgtttttaatggtggtggagatgttactgcaacaaatcatacagtagttttagaatttataaatttaaagtctgtaacaaaagttaataaaaaaggaaaagaagaaaaaatttctacaaaaaaggttacaataaatgaaactactattgtaaaactagtaaaaataaatttctttggggagatttcttatgaagagtttaagaaaaactaagctaaaatttctccatatcaaatggggatttgatagtctgattaaaacaagggacgatttagtcccgcaaaaattttataaactcttttttaggagtttataaaatgtcttttcaaaaactctatataaaaaataaagcctacttaagctacacaaacaatttaatcaaaataaaaacagaagatagtgaaaatacagcttgtctagatgatatagataccattttagtagaaaattatcatacaactattacaacagcccttttagctcagctttcaaaatcagatattagtgtgatattttgtgatgaaaaatttatgcctagttcaattttattaggaataaataaaaatagccgaacaacaaaaatacaaaaagcacaagttcttttaagtaaaccaaaactaaatcaaatttggcaaaagatagtttactcaaaagtagaaaaccaatcaaaagttttaaaaatatttagtataaaagagaattatcttgatagtttacttccaagagtaaaatcaaatgataaagagcatatagaagcagtagcagctgcatactattttaaagaactttttgatagtgatttttcaagaaatagtttattagatggaagaaattcagctttaaattttggatatacagtttttagaagttctatttgcaggtatttaatagcctatggattaaatccagcttttggaatacatcatagtagtgaactaaatgcttttaatcttgcagatgatttaatagaaccatttagaccaataatagacctttttgtaaaaagaaagataaacaaagatacagaactaacaagtgctataaaagttgaacttttaaaacttttagatgagatagtaatatatgataatcaacgagttcaaatatcatattgcatgaaacaaatagttgcaaactatcaaagtatatgtttgggtaaagttgaagatttaaagctttttagattatgaaaaagcaaaaaaaagaagagataagtaggtatagaaaaatggtactctttgcaatgtttgatatgccaacagatacaaaaggtgatattaaaaaatatacaaaatttagaaaaaaacttctagagatggggtttataatgtttcaattctctatttatgtgagattttgtaacagtttagaaacagcacaaaaatatgagagaaaaatcaaagaaattgcaccaacaaaaggttcaataagagtattaaaagtaacagaagcacaatataaaaatatgattattatagaaaattatcgcaaaaaacctgaaaaaaaagtagaaaaacagactcaaacagtgcttattttttagtgtaaaaactttataaaaccctgtattacagggtttttgcctactctattatatcaaatggggatttgagagtagattaaaacctacatactctttattactaatatcagataattatatcaaatggggatttgagagtagattaaaactaacaactcttattattttaagttcttttgattatatcaaatggggatttgagagtagattaaaaccctttaaaattctaattgcatcatcacaaattatatcaaatggggatttgagagtagattaaaacctacattgtacaaaaaacagaatgagcgaaattatatcaaatggggatttgagagtagattaaaactatcaaagaattatctaaagttaacaagatattatatcaaatggggatttgagagtagattaaaacacctatattttataaatatatctttttatattatatcaaatggggatttgagagtagattaaaacaacaagtttttttgaatccaacgataagaaattatatcaaatggggatttgagagtagattaaaactatatatatttcatacaaaaaggaatctcattatatcaaatggggatttgagagtagattaaaactatgtctaacttcaaaaggtggtgctgggattatatcaaatggggatttgagagtagattaaaaccaggagcagttgaaataattacttcaaggaattatatcaaatggggatttgagagtagattaaaacgcaaatggtatcgtatatgatttattacaaattatatcaaatggggatttgagagtagattaaaacagagttgagcaagaattagcaaaataattcattatatcaaatggggatttgagagtagattaaaaccctcaagatattttccaaaagttatcaaagattatatcaaatggggatttgagagtagattaaaacacaaatggtggagatgaagaaactggaaacattatatcaaatggggatttgagagtagattaaaacttgtagtttctgcaatatattttccacaaattatatcaaatggggatttgagagtagattaaaacccatatacagttgctgaagttgtattgcttattatatcaaatggggatttgagagtagattaaaacagagttttatcttgataattcacttatagaattatatcaaatggggatttgagagtagattaaaacactggactcaatgcatcaatgttttaaaatattatatcaaatggggatttgagagtagattaaaacatgttcgaccatcaagagctaaaaaagataattatatcaaatggggatttgagagtagattaaaacacacttagaagtggaacagctcatcattgtattatatcaaatggggatttgagagtagattaaaactattagttttgcagtatcttcatataaaaaattatatcaaatggggatttgagagtagattaaaactcatagttatattggaaacccgactcgctattatatcaaatggggatttgagagtagattaaaacatagacaatatcatcttcgtaccttggattattatatcaaatggggatttgagagtagattaaaacattataaaattgaagatgtagagcaaataaattatatcaaatggggatttgagagtagattaaaacacttttgggaacataaatgattccttttttattatatcaaatggggatttgagagtagattaaaacctggtcaaatagatacttttatggttggaattatatcaaatggggatttgagagtagattaaaacagaaactaatcctgaaaaatcaatccatttattatatcaaatggggatttgagagtagattaaaactacatatccagctttattatccaaactttcattatatcaaatggggatttgagagtagattaaaacgctacgaatactatcaagcatagttttaatattatatcaaatggggatttgagagtagattaaaactttgttctatttgtagtttctattgagctaattatatcaaatggggatttgagagtagattaaaactggttgccatctaactatggatatgctgaaattatatcaaatggggatttgagagtagattaaaacaaaccattaaaacgataaatataattatagattatatcaaatggggatttgagagtagattaaaactttattctttagctcatatatttcaagtcaattatatcaaatggggatttgagagtagattaaaacgtacgagtgcagttataacagcttatatacattatatcaaatggggatttgagagtagattaaaacactaaatgcaatgtatacaagtgtaaaaatattatatcaaatggggatttgagagtagattaaaactaggatatgagtcaaatactagaattatcaattatatcaaatggggatttgagagtagattaaaacgcttcaatttattcaaatattaaaaatttattatatcaaatggggatttgagagtagattaaaactaagatggataaattaacggcaaaatcaatattatatcaaatggggatttgagagtagattgtaaagaagctttagtttcctaaagcctctttaatagcaaaaatttcattcattgttttataaagttgatcaatatgaagcatatttggaccatcactttttgcaacttttgggtcaatatgcgtttcaaagaaaaatccatcaactccaacactagcagccgctcttgccatatatggtacaaaagagctatttcccccagttgttccaccagtgcttggaatttgaacactatgtgttgcatcaaaaatcacaggagcatattgtttaagaagtagtaagtttctcatatctacaaccaaagcaccatatccaaaagtatttcctctttcacaaagccaaacaccagcttctttactgctttcataacttacttcatttactcctcttgtgtttaatactttttcaacaggatgtttcatagcatcagctgctaaaaattgacctttttttatatttatttttgcaggagttttagcagcagctacaagtaaatcggtttgtctacataaaaaagcaggaatttgtaaaatatccataatctctccagcaggagctgcttgatatgattcgtgaatatctgtaactactttgtacccaaactcttttttgattttttcaaatatttttaaaccttcatcaagccctggacctcgaaatgagcttaggcttgttctatttgctttgtcaaaactagctttaaaataaaaatcaactcttttatcttcactcaaaggtcttaacttctctgcaatctttaaaactgtatccatatcttctaaaacacaaggtcctgtcataactgttagcataatatatcttccttttatttaattggttccaattaaataaaaggaaccatattgtgtgaaactactttttattgaaatttataaaaaatcctaaaagtagcaaaatctaaatggctttgagaacaaagccttgaactaatctattttttacttaccattaatccactaagaataatcaagattataccaaaaagtactataaaagatggaaaagcatcacccattaataatcctaaaaagattgaaaagattatattactatatgaaactgttcctacaattccagcttttgcactagcatatgcttttgtcatataaatttgtgcataagttgaaaatagtccaagtaaaattattataatccactcatctggatttggcataataaattttcctaacataaaatctaaattaggatttgagtagaactcactaattatcataaaaataagtggaaatattgtaccaactgccataaatgataaaactattgctcttccatcataaaattttcttagctctcttattgaagtatatgcaagtgctgctccaactcctgataaaatacctaaataatcggtttttttaagtgtgcttccatcaaattcagcaataaacaaaataccaataaatcctataaatactccaatccagcctttaaatcctatatgctcttttaaaaaaaagtaagccaataaagcagtgaaaattgtagaagtttttgaaaaagtcatagcttctcccaaaggaatatttgcaatattataaaaaaagaaaagtaaagctgcaaaaccaacagttcctctaaaaataagtagccaaaactttccaccaatctgatttaaaggagatttgtaaatagaaaaaagtatgataaaaactccaaaaacattcctaaaaaaaactatttcaattgtgcttaaatggtcactaagctcttttgctgcaattcccattagtgcaaataaaaaagatgcaataagcatatattgtacacctttttttacattttcttccaaaaataaaatccttattaattaatatttataatccaaaagtatatcaaaatagtaatttaaagtaagttttagataaaatagttgttattttagtaaaagttagttaggaaatttatggattatttaaaaattattggaaacaaagaattaagtggtgaaatatcaatttcaggagcaaaaaatgcagcattgcctttaattgctagtacaattttggcaaaaaatgaaactattataaataatcttccaaatgttgcagatattaatacttttttgaaacttataaaaatgttaggtggaagttttgaaaaaaatagctattgtgtgaaaatagatacaaacactataaataatacaaaagcaacttatgatattgtaaaaactatgagagcatctattttagttttaggaccacttcttgctagatttggtcattgtgaagtttcacttccaggtggttgtgctattgggcaaagaccagttgatttacatttaaaagctatggaagctttaggtgcagaaatagaaatttgtcaaggttatataaaagcaagtgcaccaaatggattaaaaggtgcaaaaattgtttttgataaagtaactgttggtggtacagaaaatacagttatggcagctgctttagcaagtggaataactacaataataaatgcagcaaaagagcctgaaatagtacaactttgcgaagtaattcaaagtgctggtgtgaagattgaaggaatagggagctcaaaaatagtaatagagggaacaggaggaaagcttttagatataaaggagttttctgtaataccagatagaatagaagctggaacatatatgtgtgcagcagctattacaaatcaaaaattgactattaaaaatattattccagctcatatcgaagctgttatttcaaaacttgaagagatgaattttgagattgagataaaagaagatgaattaacaatttttccaacatcaaaaatcttaccagtgaatattattacaacagaatatccaggttttccaacagatatgcaagcacaatttatggcacttgcaactcaagcagaaggaacaagtacaattgatgaaagactatttgaaaatagatttatgcatgttagtgaacttttaagaatgggagctgatattcaattaaatgggaatattgctacaataaatggtaaaagtggaggattgagtggaactgatgttatggcaacggatttaagagcatcatcagcacttgtattagctgcacttgttacaaaaggggaaacaaatatacatagaatttatcatcttgatagaggatatgaagatttagaaggaaaattacaaaaaataggtgctgatatatctcgacataaggagtaaatatgttgaatttttttaaagaactttttagtaataaagataaattagatgaaaaatctttaaaaaatttaggtgcatttattggtcttgttgatgttcatttaaaaagagagcatccttatatgaagtttgattgttcagcatgtaaggatattgataaaacagaagatattaaacttatgaaatcaataataatagaagaatcaataaagcagtttgtaaattttgaatatataaaaactactcaaaaagaggtaaaaaaagagatattatggagtgattatgcagtaaactctttaccaagccaaaaaaaacctattgattttttaagaagaaaagagattatatttctaagagataaacagatttgtaatagatgtggaaatagtattgaaaaactaaatcaagcttacacaacatttataaaagatatagagcttggtggtgggtataatgttgaaaacttggcattactttgtgtaaattgcaatcaagttatttcaaatcaagataagaagtcatataaagatattttattgcctttgagggataaactttataatcttttagattaataaaaagtatttattctatgacacattttaattccatataaatatataatccaagatatataaatccaaaaaaatgtaaaaagcaaggttgctaaagagccatagatagttgtataagttttattataaattacataatatacaaatagatttttcgttattgaaagagttgctagagttataaaagatgaaatagcagatgcctttaaagatatctttttatttacactaagtttgaaaagagagaaaaacataagccaagtaaataaaaatagaataagttttttaaactcatttccatcatttaatgatataaaaatattaaaaaacataaaaacagttggaaaaactataaaaaagattgagtatataaaaaatgatttataaatagctcttctttttgttttatgtattttatttacaatatagtcataatctttgaaaaacattatatatacaaaaagcatatataaaatcccaatagttccaagttctcctgaatttgaaatatatttttttagagtttcaacaatctcagcagagtgagttggatttaaaaaatttaataaaaagtttgtaaatgtatcaatatatgagttgaattcagggatatttgaaactatagcaatagcaagagcaatgataggtaaaatagagaagatagtaaaaaaactaagactagctgcaaaatatgttgtgtcatcattaaaaaatgaattaactcctgcaataatcttttttataaatgtttttttactatatatcaatattaaagacccattttaaatggatttaaaatattatttgggtcaaaggcctttttaatacttctaaatagattcatctcagcatctgtaaaagcaatattcataaaaggagcttttgataatccaattccgtgttctccacttaaagttcctcccatatcaacaactaattgaaaaatttcttcaatagctttgtgtccatcagccatctctttttcgtttgttttatcttttaccatgacatttacgtgaatatttccatctccagcatgtccaaaacaaggaacttggaaaccatatttatctccaattttataaatttcgtctagtgcttctggcaacttacttcttggaacactaatatcttcatttagtttttttgttccataaaccatagttgctggacttgcatttcttctagcaaaccatagttttttaccttcttcttcatcttttgcaacaataaaatctattgaaccattctgtttaaatgactcttttaaaatatttaattgatcttctatttcagcttggcttgaagcatctacatcaccaattaatattccaccagcattttcaggtaagtttacttgaggaaatttttgttttaaagcttttattacaagagcatctaaaaactccatagccacaggatttgcaccacttgcaagtgatttaaaaactgctgtcattgctgtatttacatttgggaaaacacccatatatgtttttttgtattttggtttaggaattaattttaatgtaatttctgtaattacagctaatgtaccttcacttgctattaaaattccagcaacattgtatccagcaacatcttttattgtttttttaccagcaacaataatatctccatttggtaaaacagctcttaatgcaacaacataatcttttgtaataccatatttagcagctctcattccaccagcattttcacttacatttccaccaagagttgaatactcttcacttgctggatctggaggataaaataatccaacttcttctactgctttttgaaactgcatatttataagtccaggttgaacaactccaaccatattttgcatatcaatttcaagtagtttattcatatgtctttctaagcttaatattattccaccatttgaaggtagtgcaccacctgtaaatccacttccagctcctcttggaactattacaattttgtgttcattacagtattttaaaatcttgcttatatcttcttcatttcttggaaaaacaatagcatctggctcaaatctacttcttgtagcgtcataacaaaaagctattagatgagctttatctgttttaatattttcatctgtaacaatagaagcaatataatctaaatgttttttttctatcatttttttattcctaaaattttaatatagtgtgaatcataatcatcttttttcttaaaccaagaagagaagcttataaaactatcttttatctcttcaactcttgtaaaaaaaggtaatttcttttctaaatcatctttttgtaaataat

SEQ ID NO: 4257 - DNA, 23531 bp, synthetic construct
  misc_feature 1..23531: note = Synthetic
  source 1..23531: mol_type = other DNA
tttcagcattatttctagtaatactagtaatctcctcaagagcagcagctgtttgttcaagggaagctgcttgttcatttgcttttaatgctaggttattcattgaggagttcatacttgttgaattttgactaagaatctctccattttgtagatttctttttgctgtttcacttaatgcagttcctaatttattaataccttgcattaattctttcatttcatccttgtatttatcaacaacttctattttttttgtaaaatcgttgtgtgtgtaattatttagaacttttaaaattaaagagttacattcatcaataccatgaagcattttatttaaagtatttcttaatgtaaaaattgtgggatttgaagttgaagatttaattctgcaattataaatacctttttcaaccttatcagctgtaaggacaatttctcctaaaactctcatatcctctttatttcttttatcaactgcttttatttcttcattccatctttttagcatttcatcaagttttttatttccggtggattctatgtaatcaaattcatttttttcataagagataaattttataaattgatcgaagtagttatcaattagttctaattctttatttgaaatggttccaaacataaaatctccttttgttatttttttatttaatgataccttaaaaaaaattattttaatacttataaagtgtttttttatgaatatttttatacataagtcaagcaaaacaaagataaaataagattatttataaaggaaaaaaatgaagagtgaaaaaaatatagatttaaaactttttactctgatttttatcgctcttttttctttaagtacaaatcctattttatgtcgtatggcaatgcttaatgaaaatacagatgctattagttttactatcttaagaatcttatcaggtgcaatttttcttttgatgatttactattttagatataaaagatttgatttaaatttaaaaaataattggcttaatccttttatgctttttttatatgcaataactttttcttactcttatgtggatatggaagcgggagttgggacattgattctttttgcttctgtacaattgtctatgattttaatggcagttttttataaagagagtcttacttttaataaactttttgggatattgatagctttttttggattagcttatttactttatccaagtaaagagttctctctttctttatttcacgcttttttgatgattgtttcaggagttgcttgggctttttatacagttttagggaaaaaatcaacaaatgctttttttagtaccacagataatttttttaaagctacaatttttacaattgtatttgcattattttttatagattctttatcttttgatggttttacactatttttagcaattttttcaggagttgtaacttcagctttaggatatatcatttggtatgcagttttacctaaaatagatattttaacagctagtattttacagcttttagcacctgttattgctatttttttagggattttatttttagatgaaactttaagttttgaactttttgtttcaactcttttaattcttttgggaatatttataagttcaataaaaaaagaaaaatctaaataatctttaggttaactctttattttacacaagaacatacttacaattataagaatcatccgttagtattttgattgcagatttatgaaacaaatctttgtatggtataacatacctaaaagctacatctttttcttttattttattttctttgatatatttaattgcactatcataaaaagtcataatatcttctgctttgattgattttgactctgaattattattgcatttgattagaattgttttatcatctttagaacaaattatatctatatttttattttctgttgtatttaaaactactttgtatcctaggtcttcatattttttcatggttcgtaactctaatgttagaccattcttttcattctctttacttttaatttttctttttttattatctttatgtgtgaggaatttttttaataacagtataaagataattataggaattacgtgccagatatatgaaagtgagctaagtatcatttcagtagaatttgtcattgattttttctttttttgtttattttagactacaatgccttaaaaaggcatcgcagctccacttgctcccataatttcccttgcatcttcactcatcatagatggatcccaaggtggagaaaatacaagttttacaaatgcttcatctatttcatcaacagctaatgttacatattttacttgttcaagtaaactatctgcaactgggcaagttggacttgtaagggtcattgtaaccatacaatgtaaatagttgtttttttgttcaaattctatatcataaattaaccctaaatcaaaaatatttgatggaatttctgggtcataaactttttttaaattttctattacttttttttctatctcttttaaatcaaaaattgtactcattttttaatcctttatgcattttgtgcatactcttttattttttttatcattcctataactccactttgtctatttggagttattacttcactaagttttagttcatgaataatatccatatcaacttcttttaactcttctattgttgagtttgagaaaatttctaaaatcatataaaccaaaccttttacgataatagcatcacttgttcctttaaagaaaagtttgccatcttttatctcctttgttagccaaacttgagaagtacaaccgtgaactatatttgcagggattttatcctcttgcttaaactcttctaatttttttcccaaatctataatatattcatattttgcaagttcatcatcaaaaaaatctaaatcttcttttatattttgtactctttgttctatactcattttaatccttcaacatttttaaagcttttgttaaagcctctattaatttatccacatcaacaaaatcattgtaaaaagcagtgcttactcgaatagttccttttattcctaattttttcataataggttgagcacagtgatgaccaactctaactgcaatattcatcttatcaattaaaattccaatatcatcatgaactatgcctttaaaattaaagcttctacttccaatactatcacttatatcattgtaaaaaataatatcaggaagtttttttagttcctcatccaaataagtataaacattgtgttcataggtttgaatattttcataatgaatatgatttatatactctaacgcttttccaaaacctatgattccagctatattttgagttcctgcttcaaatttataaggtgaatcaagtaaagttgagtgattaaaatcaacgtcattaatagttgcgccacctgtttgataggcttttaaatcttttaaaaatttctcttttacataaattgctccaactcccgttggtgcaaaagttttatgtcctgaaatagcaaaaaaatccacatcaagttcttttacatttacttttaaatgtgccaaactttgagctccatcaatcataacaatagcaccataatcatgggctatttttgtgattgtttttatgtcatgaatctttccaaaagcatttgaaatatgagtaatacttacaaaagagtttggatttgcttttaaaagttcttcaaaatgctcaaaatcaaaatctaaattctctttaaaattcacaacttcaagtccatgacccaaacttcttccttgcatatgccaaggagttatatttgagtggtgttctaaacttgaaattattactgtcttaaaatgtgcggcaaaagaagaagctataaagtttatagattctgttacaccttttgtaaaaataatctcttcatttttagaagcatttataaactcttttaaaataactcttactttttcaaactcttgtgttgctttatttgcatgaccaaaattacttctgtgagtatttgcacaatattgtgtatagtaatcaacttgcgaatcaataacactttttggtttttgagtggttgccccattgtctaaatatacaacctttgagttttgaaaatatgggaagtcatttttaaacatattgttcctttttatagttttgaataaactcttttatgatttcatcttcaatattatttttaatagaactttcaaaagcttcaagtaacatatcataagctttatctttactgattccacgtgattgaagatataaaagttgttctttatttaatgtgcctgttgttgttccatgacttgcttcaagttcatctatgtaaatttcaagatgtggttgagcaaaaattgttgcatcatcacttaataaaatagtattacaattttgaaaagcctttgaaaatagggcattttcatttactattgattttatttttactacagcttttgaactattttttaagctatttttatagttgattgaacttatagaatttttttcattatgaattgtttttactaatgttgcattatttgcttcattaaatagttttattaagccatttagttcatagtctacaaactcttcatttatgatattttcaaaactgttgatgataaaaccctctccaaattcaaaatttgtgatttttagttttgaattttttgtttgagttgcgcagttgctaaaaatcatcgaagaagaagcatttatatcttgaatttttacatactctaaagaggcattttcttctaaaactatatttctattaacaccataacaagagttattagactcacttacaaaaacctctacaacttgagcttttatattctcttttacttctatttttaatgaattagtaaaaaatgtttcatcttcttttattttatgaattaaaaaaataggttcagctatgtttttatttattgttaaaactttttgattatcatctaaacttttagtgatattaaataaaacactttcataactattttcatcttttactgtttttaatcccataatatcaagttcataggttttaacttctttaaaatcataagagaacaaagagtcaaaatttatttttaaaaactcttcttcacttttttttggaattttagtatttagttcatttattaacatcatttattcctattgcttcataacccttttcatcaagttctaaagctagtgtataatctcctgtttttactatctttccatcatgtaagatatgcacaaaatcaggttttattagctctaataatctatcataatgtgtaatcattaaaatagatttttttccatcaagcatagaatttataacatttgcaacagttttaatagcatcaacatcaagtcctgaatctatctcatcaagcattattaaatcaggttttagcattaacagttggattaattcatttcgttttttctcaccaccactaaaaccatcatttaaatctctttgtaaaagttttctatcaatattaaatttagcagtttcctcttttgttagctttaaaaactccatcgcatccatttcaggaagtccttcataggctctttttgcattcattgctgtttttaaaaagtagctattattaactcctgatacttcaacaggagattgaaaactcataaaaataccttcatttgccctttgcgttacatccatttcaagcaaatctttatttttataagtaatcttcccatcatttacaacacagtcataatgaccacttaaagtttttactaaagtagattttccagctccattagttcccataagtgcatggatttctccttcttttatctctaaatctaaaccttttaaaatctctttatcatttatatttacttttaaatcttcaatttttaatataatattcttttccatgatttaacccacacttccttctaatgatatgtttaataattccttagcttcagcagcaaactccattggtaactcttttaatacctctttacaaaaaccatttacaatcatagcaattgcatcttcttcatctattcccctttgagatagataaaaaagttgttcttcagagatttttgaggttgttgcttcatgttctatatttgcactactatttctaatttcatgatatggataagtatgtgcatggcacttatttccaattaaaagtgaatcacactctgaaatatttctagcgtttgaggcatttttcccaactcttactaatcctctataagcatttactccactcatagcagaaataccttttgaaataatcgttgatttagtatttttacctaaatgaaccattttagttcctgtgtctgcttgttgtgattttgaagcaattgcaactgagtaaaactctccaacactattatcaccttgtaaaatacatgatggatatttccaagtgattgcacttcctgtttcaacttgtgtccaagagattttagagttatcacctttacagattcctctttttgtaacaaagtttaaaattccaccaactcctaaatcatctcctgggaaccagttttgaatagttgagtattttatttgtgcatcttttagagcaattagttcaactacagctgcgtgaagttgtctttcatctctacttggagcggaacagccctcattataagaaacataacttccctcatcacaaataatcaaagttctttcaaattgtcctgtatttaaggcatttattctaaaataagtagaaagttccataggacatctagtatttggtggaatatagacaaaacttccatctgtaaaaacagcacagtttaaagctgcaaaatagttatccgttggtggaacaacacttgctaaataatcttgcactaattgtggatatttatgagctgcttcagagatagaacaaaatataattcctaatttttcaagctcttcttgataggtagttttaacagaaacagaatcaaaaacagcatcaacagcaacacctgctaacatcttttgttcttcaagtggaattcccaatttttcataagtttttaaaatttctgggtcaacttcatctagtgaatccaaagctttttttggtgcagaataatatgcgatatcttgataatcaatttttggatatttaaggtttgcccaagttggctcttccatttttagccattttttataggcttttagtctaaaatcaagtaaccaagaaggctcattttttttagcactaatagctcttataacatcttcatttaaacctttttcaaaagtatcactttgaactaaggtttcaaaacctaatttatattctttattaattacgtcatgtatttgttggttatcagccatgacttctccaatatagtatttaattttttaaataggatagtttttatcctaattaaaattctatcacaattaagtatacaatgtaaagacatattcttttataaatagtaataaaaaataatatagttttctctagattaatcatataaatgataaaatataatttataagaatgttaattgaaatcaattaagacaaattttatcctatttgcattagaatacgaaaaagttttattaaatactattaattttggaatagttttgcaaatagaattaaaaaatataggaaaaaaaatggaagtttatttagacaataacgcaacaacaatcgtagacccaaaagtttatgaagagatgaaaccttttttctgtgatatttacggaaatccaaattcattacataaatttggagcaggaactcatccaaaaatggttgaagctttaaattttttatatgaaggaattaatgctgctgacgaagatgatattataattacagcaaatgcaacagagagtattaatacagtaataaaaggaatttggattgataaaatcctaaatggtgataaaaaacacataataacaagtgaagtagaacatccagctgtaactgcaacatgtagatttttagaatctcaaggtgttagtgtaacttaccttcctgttaatgagcaaggggttttagaagctagtttagtaaaagattttttaagagatgatacagcgctagttacaattatgtgggcaaataatgagacaggaaaaattttcccaatcaaagaaataggagctatttgtaaagaagcaggagttccttttcatacagatgcaactcaagcaattggaaaagtacctgttgatgttcaagatgtaaatgttgattatctatcattttcagcccataaattccatggaccaaaaggtgttggtggattatatgtaagaaaaggttactctttaactccacttttacatggtggtgagcaaatgggtggaaatagagcaggtacagttgatgttgcttcaatggttggaatgggatgggctatgaaattagcaacttcaactatggcattagcttatgaaaaaaatcatgtaagtaaattaagagataaattagaaaatgcgattttagaactacctgatactattgttattggtgggaaagaaaatagaacaccaaatacaactttaatctcttttagaggtgttgaaggtgaatctatgctttgggatttaaatcaaaatggagtaggtgcaagtacaggaagtgcctgtgcatctgaagatttagaagcaaatccagttatgaatgcttttggaagtgatagtgagttagctcatacaggagttagatttagtttaagtagatttaatacagaagaacaaatagattatgcaatagatgttatcaaaaaagctgttactagactaagaggaatttcaagttcatatgcttatgcaccatcgtgtcataagtctggtttataataaatacgaataaatattaaaaaggaaaatgttatggcaaaaaatagtttaataagtggttcgatttgggatgaatactcaaatcaagtagtaaatagaatgaataacccaaaacatcaaggggaaatcacagaagaaagagcaaaagaattaggagcaaaattaattgttgcagattttggagctgaatcatgtggtgatgcagtaagactttactgggcagttgatgaaaatacagataaaattttagagtcaaaattcaaatcttttggatgtggaactgctattgcatcttctgatgttatggctgaattatgtattggaaaaacagttgatgaagctgtaaaaattacaaatattgatgttgaatttgccctaagagataatccagaaactccagctgttccacctcaaaaaatgcactgttcagttatggcttatgatgttatcaaaaaagcagcagctgagtataaaggtgttgatatggaatcttttgaagaagagcaaattatttgtgaatgtgcaagggtttcacttgctactttaaaagaagttattagaatcaatgatttaacaacagttgagcaaattacagattatacaaaagcaggggctttttgtaaatcatgtatcaagccaggtgggcatgaagaaaaagatatctatttagtagatgttttaaaagatgtaagagctgaaatggaagaatcaaaaatgaaaacagcagcagatgcaagtgttgctggaacactatcttttgataaaatgactttagttcaaagaatcaaagctattgattctgtacttgattctgatattagaccaatgcttgtaatggatggtggaaatatggagattattgatattaaagaaaatattcctcattacgacttatatattagatatttaggttcttgttctggatgtgcgtcaggaagtacaggaactttatttgctattgagtctgttttacaacaaaaagttgatgaaaatatcagagttttaccaatctaataatttattattttagctatttaaaaagggacttatcaaaatgataagtccctttttttattatttatttagttattaaaagtataataattcaataatatgaaaaggttacattatgagtaaaatagctaaaaaaattttaggtttggatataggaacaaacagtataggtttttgcttaaataaaatatatattgaaaatgagcaaacaatttttgaagaattagcctcaaatagcattatttttagtgaatatataaaagcagaagatagaagaaagttcagaagtggacgaagaagaaatgaaagaaatagtagaagaaaagagatagttagaaaacttctttgtgattttggttttactgataaatcaattattactcaacctatcaaatattttaataaaatatctaaaaataaaaatccttatgtattaagagaacttgcagtaaaaggcaaaaatttaacaaaagatgaatttacatttgctctttttactgcaatttcaagaagaggttattcaaatcaatttaaaacagaagattcaaaagatgatggtgttatcaatagtgcaatttcaaagaatagagatttttataaacaaaacaatttagttattccttcattagttttattaaataaaaaaacagaatttgaaaatgatggttttataaatgtagccattagaaataaaaaagatgattacaataactcattagatagagaactttggcaagaagaagtagaaaaattgcttgaaagccaacaaaataatattgaactttttgaaaacaaagaaaaatatgaaacttttaaaaacaaacttttacatggagtaaatgaaaattctttgggaatatttgaacaaagacctctaaaaagtatggaagatatggtgggatattgtagcttttacaatgcttatcataaaaacccacaaaaaagagttgcaaaatctaatatttctagtattgaatttacgcttagacaaagaattgaaaactctaaagaactgatttacaatgataagacagaactttcatattctccaacaaaagaagaaattcaaaatacaatagaagtatggctaaaaagaccaccaactcaaacaatcaacaccaagaatatttttgataaagcaggacttaaaaatattaaaataaaagtatcagaaaagcaagatgacacaattttggatataaaactacactctcaacttttggaaatatttaaaaatgcaaatattgatatatttgaaaaacatagagagttatatacaaaaattttagaaaaaatccactattttgtaaataaagaacaaatagcaaaagagataaaaaaactagatactcaaaatattttagatgatgaaacaatcaaaaaactatcaaatgttgataaaggaaataaagagtcttatgcttctttttctttgctttttatagatgaaattttacaaaaattaagagtaggaataaattatcaagatagcttaacacagcttggatattttaaaaaatatataggtattgaagcttatgattatcttcctcctttaaatccatcgcaagatgatataaaatggcttgaaaaaaatgttaagaatttcaaagttgaacatctattttatcagcctttgatttctccaaatgtaaaaagagtaatttctattttgagaaaacttgtaaatgatttgataaaaaaatacggaaaaatagatgaaattatcatagaaactgcaagggaactaaacacaaaatcagaagaagaacaaatcaaagattcccaagctcaaagtaaaaaagagataaaagaagcccaaaaacttttggaagcttataaatatgagctaacaaataaaaatatagaacgagcaagattatttacagaacaaaaagcaaaatgcctttatagtaatgattctatgactatccaagaggctttagatgaaactgtaagcgaagttgaacattttatccctcgaagtaaaatttggataaattcatataaaaataaaatcttagttttcaaaaaacacaatcaaaacaaaggtgataaacatccaataatttatctaaaatcaaaaaatgcttgggaagattttactcatagagttagtgaggttttatcaaataaaagtaaagtattttggctaacaaatgaagataatataaataaaatatatgatgaaaataataaagaatatggaaaattacttgaagatagatttctaaatgacacaagaagtgctacaaaaatcatagcaaattacctagaacactatttattcccaaaacaaaatgaacatgggaaaggggaaacaaattcaaatattataagagttacaggaaaagcaataagtgaactcaaaagactttggggaatagataaggttcagccaaaaaatgaagatgataaaaaagatagaagcacaaactatcaccatacaatcgatgcaatagttatctcacttttaaatcaatcatcaaaaaaagctttaaatgactttttcaaacaaaatgaaaatggttttaaaacaaaggctattttggaaaatctaagtgctagatttccaaaaacaaaagatggcatatctttggtagattttgtaaaagagaaagttagaaaatatgaaaatgatgagatttatgtttgtcctattatgaaaaaaagagataatattgtaggttttaaagatggaaatataaaactatattttgataaagaaaaagagatattttgccaaatagataaaaagcccatagataaaaatttactatttgaccaaaatggaaaagatgtaagtgatggcgaagtagaaaaaagagtagaagaactcataaaatcactagatttaccaaaacaaaataatataaaagaagctattctaaattacaaagaaaagctattaaatactagaaaaaatatcaaaagtttggaagaacaaatcaaagatataagaggtaacttaccaaataaaaaagattttatagaaactcctgatactttaaaaataaaaaaacaaatcgaagagttaaataatcaaaaaataaaacaaataaatatccaaaatgaaccttgttattttatgacaaacaaaggacaaaaacaaatagtaaaaaacatcaaaatcaaatcaaaagatacttcaaaagtagatagcataatcatcacagataaaaataaacaaaatagagttcaacgacttacaaaagatatttatgaagatttaaaatcaaatcaaactccttttgtagcaaaactaaatgatacaactctaaatgtagatttatataacacttcaaaaggtcaagtaataggacttaactatttttcatctgttaaaaatgatattccagcaaaaataaacgaatcgaaaataaattttataaaaaatcatcaagataaaatcacaattcaaaaaggtgatttactagaaatagaaaatctaaaagagaatagtaaaaaatactttatatttaatggtggaggaaatattgctggagggaataataaaattgaagttaaatcgataaacaaaaaagatgaaaaaagattatttataactttaaataaagatactgttgcaaaaaaaatatttatcacttataatggagatatcagctatgaagaatttaagaaataatattataaaatgttttcatatcaaatggggatttgatagtttgattaaaacaagggacgatttagtcccgcaaaaattttataaactcttttttgggagtttataaaatgtcacttcaaaaactctacatcaaaaataaatcatatctgagttacaagcacaatctaataagtattaaagttaatgattatgaaacaatagtttgttttgatgatattgatacaataatcatagaaaatcaacaaactacaattacaacagcacttttatctcaactctcaaaagcagatataaatgtgatatttagtgatgaaaagtttatgccaagttctattttgttgggtatcaacaaaaatagcagaacaaccaaaatccaaaaagctcaaatcaaattatctaaaccaaaactaaatcaaatttggaaagatatagttacatacaaagtaaacaaccaatccaaagttttaaaaaaacttcataagaaaagcgattatttggattctttgttaataagaataaaatcaaatgataaagaaaatatagaagctgtagctgctgcacactattttaaagaattatttggaaaagatttttcaagaaataatccagaaaatataaacaacgcagttttaaattttggttatgcaatatttagaagttcactttgtaggtatctcatagcttatggattaaacccagcctttgggatacatcatagtagtgaattaaacgcttttaatctagtagatgatttgatagagccatttagacctataatagatgattatgtagtaagaaacataaaagctgatatggaactaaatagtgctataaaaatcgatttattgaaacttttggataaaacagttttttatgatggcaaaaatgtaacagtttccaacgctatgaaatcaatagtggcaaattatcaatcaatttgcctatctaaatgtgaagatttgactctttttgaattatgaaaaaaacagaagaaacaagtaggtacagaaaaatggttttatttacaatgtttgatatgcccacaaatacaaaaaaagatataaaaaaatatacaaaatttcgcaaaaaacttcttgaaatgggttttataatgtttcaatactcagtttatataagattttgtaaaagtttagcatttgcccaaaaatatgaagccaaaattcaacaatcagcacccacaggtggttcaataagagttatgaaaatcacagaagcacaatataaaaatatgttagttatagaaaactatcgagaaaaacctgaaaaaaaagtacaaaaacaaacacaaacggtgcttgttttttagtataaaaaaccttgaaaatactatgaaataagggttttaagctactctattatatcaaatggggatttgagagtagattaaaacataaccattgatatatcctaaaacggataaattatatcaaatggggatttgagagtagattaaaaccctctaattgattagaatattttttaatttattatatcaaatggggatttgagagtagattaaaactaccatttcctcattatcattattttaagattatatcaaatggggatttgagagtagattaaaacaatgggagtgttttccctccacttaaacagattatatcaaatggggatttgagagtagattaaaacttaatagttgatgagcctatagttggcttattatatcaaatggggatttgagagtagattaaaaccatatcctctttaggtacttcttcaatttgattatatcaaatggggatttgagagtagattaaaacttacaaggtaaatcatgagaacgacaacgaattatatcaaatggggatttgagagtagattaaaacttacttcaccagtaaaatcataattgtcatattatatcaaatggggatttgagagtagattaaaacaattaagagtatctattcttaatgtatcaaattatatcaaatggggatttgagagtagattaaaacttgtttgtaaaccataaggcaatctttgtgcattatatcaaatggggatttgagagtagattaaaactcagcaaccgctgtatagccagcaatgctttattatatcaaatggggatttgagagtagattaaaaccactaaagagccaattagagaagttacagattatatcaaatggggatttgagagtagattaaaacaacctgatttgatatatggaaggttagacaattatatcaaatggggatttgagagtagattaaaacatacgatatatgaaattggattttatgaaaattatatcaaatggggatttgagagtagattaaaacgtatcaataccaaatagcgatagtgggtgtattatatcaaatggggatttgagagtagattaaaaccttctttagttgggttagcttttgacttaattatatcaaatggggatttgagagtagattaaaacagaactttagttgttaaaatggctgggattattatatcaaatggggatttgagagtagattaaaactaggcaatttctttgagtatttaagaagtaaattatatcaaatggggatttgagagtagattaaaactaaagctactacacaatccttatcaaacataattatatcaaatggggatttgagagtagattaaaacacttataatcattaacagtagacaattcagattatatcaaatgggaatttgagtgataatgattataaaaaaatcaatcttagggctaatcaaagtaaataaattctacttttgtataatttaaaattaactatcaattaaattagtattaaattacacaaaagtataattttaaagttataattaatacaataagaaataaaatatacaaaagtataattataaatataaaatctattttctaggatttataatggcaaaaaaggtaaaagaatctactattcctgatagtaatatcattacagatattaaagattttggaaaacacttaaaatataaaagaactagtcaaggtttgactttagttgaagcagcacaactttgtaatattaatactacaactttaattaggctagaaaaaggctctgaaggtgttagattatcaacagctttatatgtggcaaaaatgtttggtttaaagctaatattggaataataaatgatgcaactacatatattttatgacaagattgaagttggaattttaaagtatgaaccaatagaagatattttttcttttgaatatactgataattggaaaatagatggatttgaattatctccatatatgaaatttgactctacaatatcaaataatgcaattaagaattttattgaaaatctattgcctgaaggtaaaggaagagaaatattaactaatatgtatcatatttctaagaataatatttttgcacttattcaactaattggtaaagatacaactggtgcattaacattttcacaagataataaaccttttaaaacaagttttagagagatttcaaatacagaactagccaatagaataaaagatagaaaaaatatacctatcgttgtttgggatggaaatgtaagattaagtgttgcaggagttcaagataaattaccaattactataattgatggaaaatttggatttagtgaaggtgaattagcttcaacacatattttaaaatttgaatcaaatgatgataatttggttttaaatgaatatttatctctaaagttagcttcaattgttggattaaaaataccaaatatccaaatattaaatttagaagatgagatggtacttcaagttgaaagatttgatagagaactaatatcaaatgaaaaagtaatcagaaaacatgttattgatggttgtcaggctttaaatttaaatgtaatgcataaatatgaaagagcttttggaaaagaattaaaagattataaagagggtgtaagttttaaaaaactatttagtttaattgaaaaatgttcttctcctataattgcaaaaaaagatattattacttggatatgtgttaatctatgtttaggtaatagtgatgctcatggaaaaaatatatcattcttaattgaaaaagataaaatggaactaactcctttttatgatatattaaatattgaaatttatgaaaacagatatgatacagattttgcaatgagtattgatgatgcttataatataaatgaattaggaagctatcaaataatagagttctgtaaagatttaaaaattaatctaaaaggttttatcaaagagtttaaaaaaatatctatagctataaataaagctctaaataatgatgttttaattgatgtaataaattctagaaataaagatttttatgaaaaatataaaaaagatgtccagtttagaattgatggattaacaaataaatttgagtattgtttagaatataagttgtaatatatgcaaataccgaagttaaaagaactatgtctagaacaggcacaattttattatgattatgtcaaaagatttagcgaaaacaatggaaaaagtttagataaagtagtatctataaaatatcaagaagatagttttccaaaactttatgagataaaactagaaaaacctatttatgattttgaaaaaacttattataaaaacaatcaaacaaatgaatattactttaataaaaaagatatattaatcaaagagtatgatgaaaaaaatcggcttttgtatgttcaagttttaaattctgaaatagagtttgaaaagataaaaagtgatgatttttttgtagttacagatttgctttttttgataaaaaatataattgaatggtatgaaaagaactcccataaactggtatttgatgataatttagttttagatttaaaaccaaatttggagattttaaaggatacaaaattaaatcaaaatcaaatagatgctgtaaattctatatttaaaaacaaatattcatatatttggggagctcctggaactggaaaaacaaaagctgttttatcaacagctttgataaattatatttttcaaaataaaaaagtgttgatagttgctccaacaaatgtagctttggagcagatactttttggagttttagaaaatactgaaaaacttcaaatttcaagggaaaaagttttacgattaggaattccatcaaaggctttttttgataaatatagtgaagtttgcgaaacaaaaggaatagaaagggttttagaatctcttgaaaatgagataaatattttaaatagagtaataaaatatcgagaaggtaaaagtattagtgaggatttagaaaaaatcttaaaacactttttaaaacttcaagaaaacaaagaaaaaatcataaaacatgagtatgaagaagaacaacttcaacctttgataaatcttctaacccaacctttaaaagcttatcatttttcaaataattcaaagatgataaaagatgcaataaaaaaacatgaaaaaagtccttgcgtaaattttgatgaaaaattagtagaacaaaatagattaaaagaggttgtaaatatagattgtgttagaaaagagttagaaaaaattgatgaaaagataaataaaataactcaggaaaattttgaaatattaagcctttgtaaaaatctaataaaaagtgaaaagatttataatgagatatttaaagatttaacacaaacaaatttagatgaaaaacagcttcaaataaatgaaaaaatatctcaactaaatctttggtgtaaaacaagtttaaaatcaatcaaaagtttagtagaaaattcaaatgatgagctaataaatcaagctttagatatacatcataaagctattgatgataaaaaattaaaagataaattagtttttttaaatgatgaaaaagatttattaattgagcaaagcacaaaacaaagagtaaaaaatagtttagttcttgctatgactattgatgcttatatccaatatacaataaatgaaaatatagaaataaatcatatcttttgtgatgaagctggatatatgtctacaattaaagctttaagtctatttaagtgtaatagttcaattacatttttgggtgaccatatgcaacttccacctgttagtgaaataaaaacagatgatacaaacgcatataaaaagagttttttatggagtcaatctgcacttttttttgaaactctttttttgaaagatagcgttgaagagataatttttgagtttttgaatcatacaactccaaagtttgaaaaaacatcacaagtaaatttagtcttaacccacagatttgggaaaaacttagcaaatgttttaaataaatttgtttataaatttggttttcaatcagctttaaaaactgatacaaatttgttttttataaatagtgattcttccaaaaaagaagtaattgagcgttcatctttggaagaagttttgataattaaagagttagtaaaaaaatttgatggaaaatcttttgttatattaactccatataaaaaacaggtaaatcttctaaaagagtatttaggtagaaagtattttgataatattatgacaatacataaatctcaaggaagtgagtgggataatgttattttttctgttgttgatgattcaaatagtggtaaaagaaagatgttttttacagatactttaaataagaattttaaaggtttaaatctaataaatacagttgtaagtcgaacaaaaaagagattagttattgttgcaaatgaagatttttggataaaacaaaaagatactcaactaataggaaatttaatctttatttcaaaaaaagttactgtttaaaataaatcattaatgatttattaaataatttgtattaacatcaaaaaaacaaggaagagatatgtttgctatatataataacggaagtgtaggttttagaagcacttcagataatctttataatttaagtaatgtagatagtctaagtgaaacaaggtttaaaccagatgaaggttttatggcattacttaatcagtcaaataatgaaaacaaaaaatcagaacaaaaagccttaaacacatataaaaaaatggcaaatatagatatttctgaaccagtttttctagtaaaagatattatgacaaaagattgtatttatattgatgcaaaatctacaataaaagaagcttatgatgttttaaaagagctaaaaatagagcagttacctgtcgtttcatttgctaaaaagattttaggagttataaataagaaagtaattttaaatcttttgatggaagatttagaaaatagtaaaataattttagtaaaaagaatagaagatatttatctcccacaattaataacttcagacccaatgacagatataagaagtgttgcaaaagtaatgttggattttaaacttcatgctatacctatagttgacgaaaacgatattttaataggaattgttacaaaaacagatattttaaaagcaatagcacacaatccaaaaatacaattgtggtcataaaatataagactttttgaaatttagatataacttttatataatttttggctatacttcccaaaaaattaaaagagtatatatggattttttacaagaaataacaacgttttggattgttatttttattatcactggatttattgctggctatattgattctattgcaggtggcggtggaatgattcaagttccagttcttttatatagtggaatacctcctgtttttgttcttgctacaaataaaatggcgtcattatttggtactttaatggctacaatcaaatattttttaagtaaaaagatttctttaaaagtagtaagtattgctattattccttgtttattagcttcttatattggaagtaaacttgtgatgtatattcctgatgagataattcaatgggcaattttaattgctattccaatagctttattttttttacttaaaaaagcaaaagatatcaaagaagaagatagtaaattaacaaataaaaatatcattctttcaacagcaccaataggattttatgacggtattttaggtcctgggacaggaacttacatggtaatttcaatgaaaaaatttttacatttagattatatagtcgcaactgcttcaacaaaacctttaaatttagctacaaatgtgggttcagcaattgcttttgttatggcaggaaaagttttgtggatgatagctattcctatggctattgccaatatggctggatcttatgtagggagtcattttgctataaaaggtggagaaaaatttatcaaaaaagtattaatctttgttcttatttttatgttagttgcaaatgttataaaaattattctatccgagatagattagtttttatatctctattccattatcaagtattattctatctcttcctttatgttttgcttcataaagaagttcatctgctctttttttagcttcattaaaagaattatatttatttctataagtaactccagcactaaattttagttttatatttgcctctttatatataaaattactattactaagtgctttttttaccctttttacatatctttcaacttcaatttcatcttgataattaattaaagctataaactcttctcctccatatctagctattatgtcttcttttcttgttaagttttttaaaattcctgcaaaactttttaaaacagcatctccacaattgtgtccatatttatcatttatatctttaaaatggtcaatatcataaaaaactacagcataatcaccattgaaaatagagaattttttttccattttttcaacttcttggttatatcctcttctatttaatataccagttaaaaaatctatttgatgctcttcttttactaaatttagttcattttgaagttcttctatctgtttatttagataatcaaatttttctttattgtctgttattatttgtttgttttgttttaaagagttctcaattttataaatagtatcaattagttttttttgtacaatttttagttctctatgggaagagtttgatatatttagattaattaattcatcttttattttcataatctcttcagtagaattttcaccgtcatttaaagttttatcaaaatacctactcattaaagaggttagttttacaatatcatctgttttatcttttaaaacttttctatctgaatcaagtcttcgttgagaaatctcttttaatttatttatagattcatctgaagttacattttgaggattttttaaaatttcaattataaaattttcaatctcttctataaaattaaaatcagcagaaggtgtaagcatttgctcaaagcaaaaaattaatttttttaattcctctttagaagttctttttgctaaaataattgctaaatctttgaaagattctattttattttgtttctcttcatttgtcaaagactcttttattttttcaaacagttctatttcttcaatttttgcatttaatgcataagattgttttttaaactctacaaaataattttcaggagtagtctccatattctcattttttaattgaaaaagagtatttttcgtaagttctttaatattaaccaagaaataacaccttgtagttttattgtaagttctgtattatatcacttaaatataataataaatataaaaggataaaaaaatgactgcacaagataaagaaatagctcaattacacgataatatagtatcggatgtaaaagatatttttgaaaaatatatgtcaataataggtttagatgttccagaaaataacgaagaaacagcaaaaagtaaacttttgtatattatgaaagatgcaattacacaaatagaagaggaagagattattgattagcatcaattaaaattttttttaaattccttataatttgatataaaattataaggaatttactatgaacacaatttcatcttttttaactcatgaccataaagtttgtg

SEQ ID NO: 4258 - DNA, 23513 bp, synthetic construct
  misc_feature 1..23513: note = Synthetic
  source 1..23513: mol_type = other DNA
attaacatttgtgttgcagaaattcttccgtcaacatttggcctatttaccgttcttggatttaaagcgtcaatatctctatccatatatctattaaatcccattgcaaaatttcgggcacttattgctgctaatattcccaaaattaaaagtttgaaaccaaaccagccttgagctgccacaaccattgcaataaaaataaatggcaaagaaaaaattgagtgtttgaacattacaagttcattaaagtcgtttaaaagtttagatattttattcatggaatgaagtatatcaaaaaagaaataaaaacggagaaacacccctcttttacactcataaaatatttattttgatacaatctttcttatgaaagaaattgcaatcattggctcaactgcctcaggaaaaactggcttatcaatagaaatagcacaacaaactaactcaataattttatctcttgattcattatcagtttataaagagattgatattgcctctgccaaacctacaaaagaagagcgtggagatattattcattttggaatagatgaagtgtttcccgatgaaagatttgatgtcttacaattttttcaatgttataaaaaagcaaaaacatatgcccaagacaataataaaaatcttattattgtaggtggaactggattttatttaaaagcacttgttgaaggtttatcaacagggataaaagaagatataaaacttgatattccattacctgaagcctatgaacttttatactctttagataaagattacatgtctagaattgcttcaaatgacaaatatagagtagaaaaagcatatgcaatttataaacaaacccaaatgactccttctgaatattttaaagaaaatcctaaagaacctatttctaaagatttaaaaatatttgaaatagtctgggagagagaagaattaagaaaaagaattgcacttcgtactaaacaaatgattcaagatggagttatagatgaagtaattttcttggagaaaaaatatagaagaagtacaaattctatgaattcgattggaattcttgaaaccttagagtatttagatggaaaaattgataaaaaacaacttgaagaaaaaatcactttaaatactgcaaagctagcaaaaagacaaaatacttttaacaaaggtcaatttcaaaacaaaactactaacataataaacaacttaaattcagatattattaagtatttttagatataatcgtcctccatttttaaagagtttagtaaagggcgacaaagattcgaccttttgttagacattaattattttaaggaaaatgaagtgagaaaagaaatacacccagattacaaagcttgtactgtttcatgcgcttgtggaaattcatttgaaactaaatcaaatgttgaaactatgagaatagatatttgtaatgcttgtcaccctttctttactggagagcacaaaattgttgatgctgctggtagagttgagaaattcaaagctaaatatgcagctgctaaataatctttattatttagtatgttaacattagttccaactccaataggtaacttagaagatatctctaagcgtgcacttagtgccctattggatgcagaacttattttttgtgaagatacaagagtcacaaaaaaactcctccaacttttatctcaaagagaaaatctaaaatttaattgtactgattttaaatcttttcattcacataatgaaaaacaagttttaaaaactcttacaccttcagattttgaaaaaaatattgtatatgtaagtgatgcaggaatgccttgtgtgtcagatcctggagcaactcttgttcaatactgtattgaaaatgatatttcttatgatgtactgccaggagcaaatgccgttttaactgcttttgcaatgagtgggtttatgcaaactgaatttactttttttggttttttagagcataaaggaaaagagagaaaagaaaaattgacgcaagttatgcaaagttcaatattatcaattctttacgaatcaccgcatagattactaaaaacaatcgaagagataaaaaacattgatgaaaatagaacaatttttttagcaaaagagattactaaacttcatcaaaaaacatataaagactctgctttaaatatttttgaaactttcaaaaaagaaaatatcagaggagaatgggtcatagtcatagaacctgtaaactttcaaggtcaaacacttagtgtctcagatattgaaaccttagacatagccccaaaaataaaagctaaactaatagctaaaatgactggagctaatataaaagatatttatcaaactttactagagtcaaactagttttggaaactatcttctaatttatctaattcattttgtatgctctcaattccatttatactaacaattaacttatcaaaattctctttcttatcttcaataaaattattactttgtttagaactattataaatcttttctattgattcgtttattgtttccatattcgaagatacacttcctaatttatcacttgcagttgtaatagaatcagatactgtatttataccttttattgcaatatccacagaatcattactctcttttaaacttacttgtgttttttgagcaagtttttttacctcatcagcaacaactttaaaaccatttccatattgccctgcccttgaagcttcaattgcagcatttagagctaaaagattagtctgtattgcaataccagaaattgaacttaatacttttttaatctgtgcagcatttgaagttaagttgtgcatgtcatcaacaaggatatcatttgattcaacattatttaaaatctcttttgtaaatagttcaaatttctttgttacttcgtctataatgatatttccctcagaagtattttcataaacaaaatttagtatatttaccatatcttgaattaaaggaaatgttttctttaaattttctaataatgtagttcttactctcgataaaagttgatattgatggatttcacgctctttaaaatatgtactaaacaaggcatatttatttacaaatccatcaacatattcatcataaaagtcttcattttcactaatttcatagaaaaataatgcagttaatgtttgattgatatttaaacctaaaagttccccaaatgtggaacttccagcaagaggaatatcattaaatgtttttatagagtttaaattatttgcattaaaaagtcttcttacaatacagtcattaaatattgcaccaattggtttttgtctttttcgtgaagagtattttttataatcagcatctgtttgagaagcaaactctttattttttactaaatataaaacatccccaaatgcaatatcacaataaaacgatatatttttattttctatatctaagtttgaaacagatcttatgtatatttcatcatccaattttattgcaaaactatattgagataataaatctggaagattttctaaagtacaattaaattttaaacataaagcatctacaaaatttataatcttgttattcctagtatcaagtacactttgaacacttctatttaaaacatttgattgtgctattaagaaagaaacatctgttaaatcacaactctgagacttaaaaactccatatttaatatttggatttaattttactagtgttacaaccgcattatgtcttacagcttcattattattaaaaatataagtatctttaaaatctaattttcctccagctgaaccaccaatcaacagacaaggaagttttccacttttataaactgcctcagtaaaaaaactttcactatttgacaatccatctacaaaagtcatagcaaaagtagattcgtgatttattttaaatggaatatctaatttatctatctcatctctaattctactaattctatctttatgtgaaattctttgctcagtaatattttcactaaataaaggaacagttaatacttcaacttgctcaatcatatctgcgctaaaagcctgcaatactatattattccaaggtgaacttgcatcatgataaagagaatcttttttatgctccaaattaaatgtacaaagttcaccagcagttgttgctaatactacttttgtctcagttggtaaagatgcttttatcatcctagaaatttgactaaaatttatatgtggagatataaatcctaaaactaatttaggggcattaccttcaaaatataaatcttgtaaagttgattcacttaaatcactctcattagtatccacgatttttataaagttagagttttcagtcgtcatatttttttctttaataatttttttttatcataacatataattatagcttaaatagagcacttagtttaattaagtaaattatcaaaagtaaataatatttttgatatacaatttttttaaattattttatgaaagtcgtttatcaacaatatttagataaaatcttgcccatgataatatatggaaaacaagtagtgcagtttgtactcgaaaaacaccctgaaataattgaagagatatttttttcaaaagagatagagaaaaaattgttttcaaagtttttaaaacttggaaagaaaatacataaacttgataaccaaaaagcacaagcattggctaaaggtgggaaccatcaaggatacttcttaaaaatctcaatttttgaatatacttcatttaaagatatgaaagatatgaactttgttgttgtactagatggactaacagatgttggaaacataggtgcaatattaagatcggcatattcattaggtattgatggagttattgcatctggtgtaaaaacattaaaagagtctggacttgtaagaacaagctcaggggctatgttagatataccattttgtaaaatggaaaatactttggatgttgcaaatgaattaaagcaagcaggatttgctttaattggtgcaacaatggatggtattgatttaaaaaaatatggaaaaattgaagcatcagataaagttgctttaatcatagggaatgaaggggaaggtatttcaaataaagttataaaaaaacttgatttgaaagtatcaattggaatgtcaaataattttgattcacttaatgcatcagttgctgctgcaatattaatgtacacactaaaaagataagaaaatgtttaaaatatttataagttctataattttatttgcatcactaaatgcaatcacttttaatgaaaaaataattaatattattggctataatgaatattcacaaaacaaaggtttaatagaccatttattttcaaataaagaagcatattataaaaatggttccctaaattatcttgtagttatggaaaaactaaaacttaatggtttattgaaaatggcttatagtgaacctcaagatttaattattacttttaatataaactatgatccaattaaatcaattaaaatcatttctgattcattaaaagctttgggatactatcattatttcacaaaacatttgttatatgatcaaaatagcaatttaacttggacaataaacctaaaaacggaagccgccattgaccctcttatgttatcaaaagagttatctaaccataactgtcaattcattgatatcagaaaagagggatatataaagtggatgtatacgattgatacatcagattcgattatttcaaaagcagagcttataagttctggagaaagagttgattttagaaaaccattaaaaccatattttataaaagtagaagggtcaaaaaacctaaatattttatcaaaaccaggtaaccaatggtttccgcaaattgtattttatgataagcatctaaatattttagatattgtaaaagaagacaataaatatgattctcttcagttggaaatacctgaagagacaacatatatcaaaataaatgatatatacacgttaacaaatataaaacgtggtttaagtgtaattattaaggagtgataataaatgtttccagaaatagaatttgaaagaatgaaaagacttccaaactacgtgtttgcagaagttaataacatcaaaatggaagctagacgtgcgggtgaggatattatagatttctctatgggaaacccagacggtccagcgccacaacatattatagataaattaaaagagacagcggataagccaaaaaatcatggatattcagcgtctgctggtatttataaattaagattagcaatttgtaattggtataaaagaaaatatggagttgattacttagatccaaataaacatgctgttgcaactatgggttcaaaagagggttatgttcatttggttcaagcaattgtaaatgttggtgatgtggcagttgttccagatccaacctaccctattcattcatatgcttttatgttagcaggtgcaggaattcataactttgaattaccatttggaaatgactttagagtagatgaagatgagttttttgcaagattaaataaaacactaaaagaatcaattccaaaagtaaaatatgttttagttaactttccacataatccaacttgtgcaacagttagacctgaattttaccaaagattagttgaccttgctaaaaaagagagattttatattatctcggatattgcttatgctgatattacttttgatggatatgttacaccatcaattttccaagcggagggggcacttgatgttgcagttgaatcatttactttaagtaaatcatacaacatggcaggatggagagttggtttcatggtttgtaatgaaaaactaattggtgctttgaaaagaatcaagtcatggcttgattatggaatgtttacaccaattcaagttgcagctactattgcacttgatggaccacaagagtgtgttgatgagcatatcgcaaaatacaattacagaagagacgtaatgcttgaagcatttaaagatgcaggatgggaaatggacaaaccaaatgcctcaatgtttatttgggcaaaaattcctgaatgtgcacaacatcttggaagtatggagttctcaaaacaacttttaacagaagcaaaagttgcagtgagtcctggtattggatttggtcattatggtgacaaatatgtaagaattgcattaattgaaaatgaaaaaagaattagacaagcagcaaaaaatataaagaaatatttaaatagtttataggaataattaatgaaagtaggaataattggagttggtactgttggagcaagtgttgcaaatatcttaagagataataaagatattataactgcacgtgctggttgtgaaatcacaccagtaattggagttgtaaataatctttcaaaagatagagatgtaacaattgaactaacagatgatattgaaaaagttttaaatgatgattcaattgatattattgttgaacttatgggtggaatagaaaaaccttacgaagttgtaaaaaaagctttagcaaatggaaaagcagtggttacagcgaataaagctcttcttgcatatcatagatatgaattgcaagatttagcaggtaatactccatttgaatacgaagcagcagttgctggtggtattccaattataaatgctttaagagaaggtttaacagcaaatcatattttatcaattagaggtatcatgaatggtacttgtaattatatgcttactaaaatgataaacgaaggtgtagattacgacacaattttaaaagaatctcaagagttaggttatgcagaagctgatccaacttttgatgtgggtggatttgatgctgcacacaaacttcttattcttggttcaattgcatatggaatagatgctaaacctgaagatattttaatagaaggtattcaagatatagctcctgaagatattgactttgcaaatgagtttgattatgcaatcaagcttcttacaattgcaaaaaaagttggaagtgagattgaattaagagttcatcctgtatttattccaaactctgaaatgatttcaaaagtagaaggtgttatgaatggagtttctgtaataggagataaagttggggaaactatgtattatggaccaggagcagggggtgatgctactgcttcagctgtaattgcaaatatcgtagatattgctagacgaggtaaaggttcaccaatgttaggttttgaatcaacttatggtgaggatttaaaacttatgtcaaaagatgatattcaaacaaaatactatttaagacttagagttgaagataaagttggagttcttgcaagaattgcaacaattttgggtaataaaaatatatctattgagaaaatgatgcagaaaccattaaatagaacttgtgcacatattttactttcaactcatacttctatagaaaaagatgttgttgaagcattaatagaaatcgaaaaaatggctgatattacagctaaaccagtaatgattagaatagaagattaatcttctattctaacctctttaaaacttttttaagatagaatccgctttatctaatcctattggacctttatgaaaaatgatacaaaacatcttttaaatgatgatattccttctttactaaaacaaatagcaattcctgctagtactggaatgttttttaatacaatgtataatgtagtagatactttctacgccggacttatttcaacagaagctatatctgctttatctttatcttttatgattttctttacagttatcggattaggttatggattttcttcagcgattaccgctttaattggaaatgctagtggaaaaaacaaatactttttagcctctttatatgctcacaaaggtattttctttatgcagttgcttgctgtgctcctaacaataattggatttgctacatcaccatttttatttaaacttttaggagcaagtggacattacttggatatttcccttgactacatgaatgtaattctagctggtactattttctttatgacaaactttgcattaaatgcagtgttagtttcaagaggagatactaaaacatacagaaattcactaatctttggtttctttgcaaacttgattttaaatcctttatttatatatggatttgcttttattccagcaatgggaataaaaggaattgcccttgctacagttttaattcaagtgattaatgctttttatatgttttataaagttcttcaaacaaaactaatacattttgaaaatgtaaaatactttttccctcacaaaaaaatctataaagatttgataacacaaggtattccatcaagtatgaatatgcttatcatggctttaggttctattattttgatgtattttgtctctttatatggtgtaaaagcagtggcaggatatggaataggatttagagttgaacagcttatgcttttaccagctctaggattaagctcagcggttctttctatagtttctaataactttggtgctaaaaagtatgatagggttcaggagacggtaaataaagctttaaaatatggtttctatatttcaacttttggaatagtatttttatacatctttggaaaactaataatccaacaatttgataatgacttagaagttatagcctatgggtttgattatattttaattgaagtttggattttctatggatatgtaatactatttgtttgtatctctaccttacaagcaatcaaaagacctaaaatgattttttatattgcactttatagacaaatcatagcaaaatatctagtagctgttataatagtaagctggttagctcttgattatatttatctatgggtcggagttctaatcatgatttatagtgccgctatatttgcctatatttatacacaaaacttgttaaagaagctttgtgtataaaaaatattcctattcattattttaaggcttttttaaataatatgtaactatatgattttaaaggctacttcatgcgtaaaattttaggtttagatattggtacaaatagtataggtttttctctaaatgaaattaatatcaaaaatgagcaaacaacttttaatgaattaatttctaatagtattatttttagtgaatatattaaagcagaagatagaagaaagtttagaagcggacgaagaagaaatgaaagaaataacagaagaaaacaaatagttagaaaactcctttttgattttaatcttgcagataatataatacttacacaaccaataaaatacttcaataaactatcgcaaaatcaaaatccatatatactaagaaaattagctgttaatggcaaaagtcttacaaaagatgaatttacttttgctctttattcaattatctcaagaagaggttattcaaatcaatttaaaacagaagattctaaagatgatggtgttattacagaaccaattaaaaaaaataaaacaatttatttagaagacaaattagctgtaccatctttagttttattaaataaaaaaacagaacttgaaaaagatggttttataaatgttgccattagaaataaaaaagacaattataacaactctttaggtagagaactttggcaagaagagttggaaatattgttagatagccaaaaaaataatcttgaactttttgaagatattgataaatatgaaacttttaaacataaacttttaaagggtgtaaataaaaactctttaggaatatttgaacaaagacctttaaaaagtatggaagggatggttggatattgtagtttttataatctttatcatgaaaacccacaaaaaagagtttcaaaatcccatatttcaagtatagaatttactcttagacaaagaatagaaaattctatcttaggaaatctaatttttaatgataaaacaggggaattttacaatccaacccaagaagaaataaataataccatagaattatggcttaaaaagccaccgattcaaacaattaatacaaaaaatatttttgataaagcagggcttaaaaatattaaaataaaaatagctgagaaacaagatgatactatcttagatataaaattacataagcagattttagaaatatttatagatacaaatatagatatttttgaaaaacacagagatttatatacaaagattttagaaaaaatccattattttgtaaataaagaccaaatagtaaaagagataaaaaaagttgatattcaaaatattttagatgatgaaaccattgataaattatcaaaagtagataaaggaaataaagagtcttatgcttctttttcacttctttttgtagatgaattattagcaaaaatgaaagaggggaaaagttatcaagattcactaactgagattggatattttagaaaatatttggatattaaaccttatgattatcttccacctttaaatccatcactaaatgatataaaatggcttaaaaaaaatgtaaaaaattttaaagtagaacatctattttatcaacccttggtttcgccaaatgtaaaaagagttatctcaattttaagaaaacttgtaaatgatttgacaaaaaaacatgggaaaattgatcaaattattatagaaacggcaagagagttaaactcaaaaaaagaagaagataaaataaaagaatctcaagctaatagtagaaaagaaataaaagaggctgaaaaattactaaaagccaataaatatgaaataacaaacaaaaatatagaacgagtaagattatttactgaacaaaaagcaaaatgtttatatagtggaaatcctatgactatagaagatgctttagatgaaacggtaagtgaagttgagcattttattcctagaagtaagatttggataaattcatataaaaataaaattttagttttcaaaaaatacaatcaaaataaaagtgataaacacccaataatttatctcagatcaaaaaatacttgggaagattttattgaaagagtaaaagaaaacataaccaataaaagtaaaatattttggcttacagatgaagaaaatataaataaaaattgggaaagagaaaaccttgaagataggtttttaaatgatacaagaagtgctacaaaaatcatagcaaactatcttgaacactatttatatccaaaacaaaacgagcatggaaaagatgaaacaaactcaaatatcataagagttacgggaaaagcaataaatgaactaaaacgactttggggtgtaaataaagttcaaccaaaaaatgaaaatgataaaaaagacagaactacaaactatcatcatactatagacgctattgtaatttcacttttaaactcttcagcaaaaaaagctttaaatgatttttttaaacaaaatgaagatggctttaagacaaaagctattttagaaaatttaagttcaagatttccaaaaacgaaaaatggtgtctctttggttgattttgtaaaagaaaaagttacaaaatatgaaaataatgaactctatatctgccctatgataaaaaaaagagataatattgtaggatttaaagatggtaatataaaactgtattgggatgaaaagaaaaaagagttttgtcagctggacaagcacgaaattagtattaaatcaattttatttaaaaaagaaggacaaaatgaaaaagaaagaagtgataatgaagtagaaaaatttgtagatgaattggttaataaattagatttacaaaaacaaaataatataaaagaggcaatattaaactacaaagaaaatttacttttaactagaacaaaaatcaagagcttagaagaacatatcaaaggtttaaaaggtaatttacctaataaaaaagattacattgatacacctgagactttagatataaaagaacaaatgaaagttttagataaagaaaaacaaactcaaaatgagatacaaaatgaaccttgttattttctgaccaataaaagacaaaaacaaattatacgaaatatcaaaataaaaacaaaagaggcttcaaaagtagatagtatcattattactgataaagcaaaaacttctagagtgcaaagacttacaaaagatatttatgatgagctaaaatcgaatgatacgccttttgtagccaaactaaatgatacaactttaaatgtagatttgtacaacacaattaaaggtcaagtaatagggctaaattatttttcatctattaaaaatgatatgtctcctaaaatatataaaacaaaaattcctttgataaaagattttgaagataaaattactatccaaaagggtgatttaatagaaattgaaaaccttaaagataatacaaaaaaatattatgtatttaatggaggtggaaaaatatcagctggtaataataaattggttttaaaatcaattaatacaaaagatgaatttcaaataactttaaataaagatactattgctaaaaaagtatttataaattaccaaggagatatttcctatgaagagtttaagaaataatattatagaatattctcatatcaaatggggatttgatagtatgattaaaacaagtggtgttactccgagccacgcaaggtttatccttcaagtcggagtgttttaatgtctcttcaaaaactatatattaaaaaccgatcatatcttagctataaacacaatctcatatccataaaaattgatgattatgaaaccaccgtttgttttgatgatatagataccataatcatagaaaatcaacaaagtactataacctcagctcttttatctcaactttcaaaagcagatataaatgtaatattttgtgatgaaaagtttatgccaagttctattttagttgggattaacaaaaatagtagaacaactaaaatacaaaaagcccaaatagaggtgtccaaagcaaaattaaatcaaatttggaaaaatataattatatacaaagtaacaaaccaatcaaaagttttaaaaataattcataaaaatagtgactatttagatttaatcataccaagaattaaatcaaatgataaagagagtatagaagctacagctgctgcatattattttaaagaattgtttggaaaagatttcacaagaaatgaccctgaaaatataaataatgcagttttaaattttggctatgctatttttagaagttctatttgtaggtacctaatagcgtatggtttaaatcctgcttttgggatacatcatagtagtgaactaaatgcttttaatctagcagatgacttaatagaaccttttcgtcccatcgtagatgattatgtagtaaaaaatataaaaaatgatatggaattaaatagcaaaataaaaattgatttattaaagcttttatataaaacagttttttatgataataaaaatgcaaccgtttcaaattgtatgaaagctattgtggcaaattatcaatcaatttgtttatcaaaatgtgaaaagttaattctttttgagctatgaaaaatatagagaatataagtaggtatagaaaaatggttttatttacaatgtttgatatgcccacaaatacaaaaagagatataaaaaaatatacaaaatttcgtaaaaaacttttggagatgggatttattatgtttcagtattctatttatataagattttgtagaagtttagctattgcacaaaaatatgaaaagaaaatagaactatcagcacctataggtggttcaataagagttgtaaaaattacagaagcccaatataaaaatatgctcattattgaaaattatcgagaaaaaccagagaaaaaactacaaaaacaaacacaaacagtgcttgttttttagtaaaaaaagctctatacaagcctataaatcgaagttttaaaatactctattatatcaaatggggatttgagagtagattaaaaccctatgagtccttttaagttagatacttctattatatcaaatggggatttgagagtagattaaaacttaaatactcaacatcatatttttttgtgattatatcaaatggggatttgagagtagattaaaacgctgtgcatcttgcattaatgttttactaaattatatcaaatggggatttgagagtagattaaaacatgatgtaagaggtttaaattgggatatttattatatcaaatggggatttgagagtagattaaaaccatttctttgtctgttgataattaatgtttattatatcaaatggggatttgagagtagattaaaaccatctttttttagcttttctgtaatttcgtattatatcaaatggggatttgagagtagattaaaacagtaggtattcgactgaatatgctttctttattatatcaaatggggatttgagagtagattaaaacatgcaccacttagagaattgttttatctaaattatatcaaatggggatttgagagtagattaaaacgcagtaataatatatggattactctcatatattatatcaaatggggatttgagagtagattaaaactggctgttacacctactgatataaaatcaaattatatcaaatggggatttgagagtagattaaaacaacagaatagccaatatacttattcatagattatatcaaatggggatttgagagtagattaaaacatattcttttagatttttaatatctgacattattatatcaaatggggatttgagagtagattaaaacgttcttttatttcaaaagctaaattataatattatatcaaatggggatttgagagtagattaaaacatagctatttattaagtttcttgatgtatcattatatcaaatggggatttgagagtagattaaaactgtaaacttctctacaagctactaaattatattatatcaaatggggatttgagagtagattaaaacgtatttttcaatgtcttccatcctcgaccaattatatcaaatggggatttgagagtagattaaaactgtcttgcaacggacgaaattataataagtattatatcaaatggggatttgagagtagattaaaacgtattccttttgattttgaaaaagatttttattatatcaaatggggatttgagagtagattaaaaccatccagttcttgcaagtaaagctgtataattatatcaaatggggatttgagagtagattaaaacccacaggaatctttaaagtttcatatagttattatatcaaatggggatttgagagtagattaaaacagtcaaaagcttttgataactcctcaaatattatatcaaactactatctgataaaattagcttcactttattaataaaaataaatacagtataatataattactatttttaattaggagcagtttattatgaagatggatattttggaattattaaataaattaaatcttatttattatagatatgacaaacaaaaaaatagtcttcttcttgatgaaattccaaatgaacactcctataaagaactaataaaaataacttttatgttaagtaaacataatattacatttcatgtaaataatgacaaatcaatctctttatctgcttcatcatcttttatatcttctactattcgtaaatactttaatactttagttgagaattttaaaaatagaaattcaaatatttatattttaggaaacaaaaaagtaaaatgggcaaaaaatttatcattgtttgatattgaagttataccgcaaaacatagatttttcagattacgatgctataatttttacatcaaagaatggcgtttattcattaaataaatttaactccaaatggaagaatatccctgcgtatgttatagctccacaaacagcaaaagttgtaaaagagttaaaaggaagacttgcatttgtgggtaaatcacatcatggagatgagtttgcatacgaactaataaatcaattaaaaaacaaaagagttttatatttaaaagcagaaaaaattgtttctaattttacaaaaatattaaatgacaatgaagtaaaatgtgatgaaaaagttgtttataaaactgtttataaaaacttcaaagaaaagattgagttacctaaagattcaacaattatattctcttcaccttcaaccatagagtgttttttcaaaaacattatttggcaaaaaagttttaaagtaatttcaataggaaaaacaactgcaaaatattttccaagttatgtctcttataagattgcaaatactacttctttagaatcttgtgttagaaaagcaatagaaattaaataaaaactttatttgaaaatagttcttccaaaggttctctcaaaagagcttttgcttctttgaaatttatctcattttcatggcacaaattttttaaaacttcacctagagattctttcttgttcaaatttcctaaaagtacataaataagctgattgatttctctaaatacaacttcatctgtaataaaatcataataaatcactaaaaagttttctcttttgtttttataatcactatttataatatcatacttaaagttcttgattcttgcacttttagataaagtataaatctctttatatgaaaactttttttgttttttgaacttatactctttcatgtaaatttcaatttctatccaatcatagtatagaagttcatacaaatattttttattcttaaaaatcttattcctttttacaaactttctatagtcatttggaatctgccagacaaaaggagtggagggcgtatctttcataaattttataacagatttttcaaaactattttcagatatttgtttttttaaaagagggaaactattttcaagaacatccaaaaacctacttaatacaagtctttgatatacttttatagcactattttcaactttttcatcttgatttataagattatctaaaaatcttttttcaatgcttttttcttctgttttactaagcattttgaactcttttaacaatctttttcatctgtttgtactcggcagctaaaacatccaaaggagggatattattatctctttctatcataaccggagcatttaattgttttaaagtatactctaaaagtttccatacaccagaacatattggcataccatgagaatcaattttcatttttgcttcttcatcaaaatagtgtcctgccatatgcatgtaagcaactttacttttatcaatttcatcaataaattttctagctttaaaagagtgatttacagaatttacaaatacattatttacatctaaaagcatctttgcacctgatttttctaacacttcatttataaaatcaacctcagccatctcagaatagggtacataataataagttgcattttctaaaataagatttctttgaataatatcctcaacttctttaactctatcactgataatatttaccatcttttttgtcataggaactggtaaaagttcgtaagactgtttattatctaaagaggagaaagagagatgctcagaataatattcgatattgtatctatctaaaaatgtttttatctgtttgacaaactttctattaagtttgtcagcagatccgatagataatgataaaccatgggctactgttggttttgaaaagactgcctcttcaaaggctttttcatagatttttggcataaacatccaattttcaggagtaacttcccaccaatctggttgaaaattactctcctttacatctaataaaaaatcacttcttaaacctaaaccacaacccttaacgtttatcataaatctctttcaaactttttatttagaatcttttttcttcatgtcgccaccacatttaccagctccacatgaaccatctgcttttttcattttatcttttttcttcatatcgccaccacatttaccagctccacatgaaccatctgcttttttcatttttttcatatcagaaccacatttaccagcaccacatgaaccatcagctttcttttctacttttttcatgtcaccaccacatttaccagctccacatgaaccacttcctgcatatgctcctgtacttgctaatgcagctcctaaaagaattcctgctaatttaatttttgtatttttcattgtcttttccttttattttttgtaagaatatcgaaattttaataatttaatgttaagtcattgtgtagcaagtgtggggactatttatttttttatatgatatactattatttatgaaaatattactccttgaagacgatttaatactaaatgaaataatagaagaattcttacaatctttagactatgaggttgtctgtgtattcgatggaatgaaagctagtgaagttatatatgatgaacacttcgacttaatgatcctagatgtaaatgtcccaaatatcactggttttgaatttttaaaaaatttacgtgataacaatattacaacacctgcaatttttatcacttctttaaattctgttgaagatatagaagaaggctttaaagctggagcagatgattatctaaaaaaaccttttgagttaaaagagttagaacttagaataaacaatataaaaagacttcttcatttagaagaagatgaactaatcatagatgaacatatcaaatttaatgcaaagctaaattatatagattttgactctattaaaacaaaacttccgctaaaagaagcgcaaattttaaagtatcttttaaataataaaaatagatgtatttcccaagatgaactttcctcaaatatttggtcttatgaaggagccccaacttcttcaactatacgaacatacataaaaaatattagaaaaatcatcggagaagagtatatagagactattaaaggagttggttatagatttaacaggaagtgaaaaaagaactttttttagattcttagggctttttttaggctcatcattaatactcttattagtcattttttggcttttttataaaatagaatctaaattacagtatgatttattaacttcaaatatgaaaaatgttgcatcgaaaatctcctctagtattatctatgcccatatgtcagaccttacaattaataccacaaaattagcaagttacataaaatatgattatgctttatataataaaaatcatgtaaaagttgctggaaatataaatgaaagtattgatttaacaaaaaaaatacaaaaagttgatgatagttttattctcgttgatggaacaccaagaggccatttaggtgtttatcatattgctattagagaaaatatattccaagataaaatcactacacttatagaaaagattattttctattttgtagttatctattcaatcattgctatcataggatattaccttgctgatttatttttagcacccataataaatgaaagaagaaaactcaataactttataaaagatactactcatgaattgaatactccaattacagcaattcttatgagtacaggaaaagattcagctttaacccaaaagaatatgcaaagaattaatctaagtgcaaaaagaatttctgaaatttataaagacttagtttatctatttttacaagagaataaaaaagaaccagcaccaatgattttgcaattagataaaatcattgaagaacaattggaatattttgaagcctttgcgttaaagaaaaaactaactatttcctctgatattgaagagaccaaatttgaaatagataaagaaaattttataagactttttaataacataatatcaaatgcaatcaaatataataaaataggtggagagattcatttagaattaaaaaatagaacacttattataaaagacacaggaattggtattaaaaaagaactattaaatgatattttcaacagatactatagagctacaaaagatcaaggtggttttggaatagggcttaatatcgcttatcacatctgccaaacttataatataaaaattaatgttcaatcagttgaaaatgaaggtactacttttactataacattctaaaggtttagtttatatccaattgatttaattgttgtaattctatctttacctaatatttttcgtaagttttttatataggttctaatagtggttgcagttggaacctcatcataaatccagttgtttaaggatatttcttctatagagattgatttatttctattttttataaaatactcaaaaacttttgcttctgttttggataaatgagtctcaatattctctactgtaatatattttgtgtcatgattatatgaaacctcatcactcaattttacaagccctgaactctcaatttgcctaagtctttttatattgtttattcttaattccaattcacttaaatgaaaaggttttttaatataatcatccgctcctgaattaaaacctttttccatatcattagaactatgaagagaagttataaatatagtaggaatatcgatactattcttttttaatccttctaacaaatcaaaaccattcaaagaaggtacatttacatcaagaagtaataaatcaaaggcatcctcatatatagcttctaaggcctcttgtccatcataggttgaaaccacatcataatcaagttcttctaaaaattcttcaatgatttcatttaataaagtatcatcttctaatagtaatattttcatcttgtaagtatagtaaattttacgtgtaatgtatatagaactgcctctaaatcaaatttttgacaataatttttacatatgatataattttcatatgtaaaatatatcatatgaaaggtttttaatatgaaaaaaacatttaaagcaaataatatagcctgcggaagttgtgcaaatttaataaaagtttcattagaagatagttttggtaagattgaagtaaacttagaaacaactccaaaagaagttattgttgaaataaaagatgatgaacaagagaatgagtttaaaaaagagatggcagaacttggatttgagattataaaatagtaatgaaaaagtcaaaaaaactaattcgttcttgttgtgagggggtaagttatcttaatgatatacaagataatttaccaaatgaaaataaactcttagaaatatctaatgtatttaaagcattaagtgattcaactagagtaaaaattctatatgcactattggattatgaaatttgtgtgggagaaatggtaaatgttttagaactacctcaatcacatgtatctcatcaactaaaagttttaagaaaatatggaattgtagattttaaaaaagataaaaaaatgtctttttactatataaaagatgtgtatataaaagaattgttaaatgtcttactcaatgaaaaaaaggagtaaaaatgacataaaaaataaatctcaatatatcggggatgacttgtgttaactgttccaatggtattgaaaagtttttaaatagacaaaaaggcgtactaaaaactaaggtaagttttgcttctagtgagggtgaatttcaaattgattcaaaacttttctcaagagaaaagttaatttcacaaatcgaaaaacttggctacaaggttgaagaagatacaaaagcacttgaagaagagcaattaaaaagtttcaaagaattaaaaaaactttttattacttcaatatctattactatcgcaatttttattttagccttttctaatatttttgaaaaaactttaaatacttatattatatttgttttagcttctataatacaattttattgtggagcaagattttacaaacttgcatataaagcagtagcaaataaaaactatgatatgaatgttttagtagctattggaactagtgctgcttatttttattcaacttttgttgttttttttccttctttattccctgaacatttaagatttatctattttgatggagccgctgttattatcagttttataatcctaggaagatttttagaagaaaattcaaaacaaaaagcaagtgattttttaaaaaaacttatgagtttagcacctgaaaatgcaaatgtaatggatgaaaacaagcaaataaaaactgttttagttaaagatttaaaattaggtgatagtgttttagttaaaataggtgaaaaaatacctgttgacggtctaattatagaaggaaatgcagatatcaatacgtcaatgataacaggagaatcacttccagtttttaaacaagaaggagatgaagtccttgctggaacattaaatacaaatggtgttataacacttaaagttacaaaagaatcaaaagatacaactttatcaaaaatcataactcttttaaaatctgcacaaagtaaacaaatacctattagtaggtttgcagataaaattgccaatatttttgtacctacagtaattatcatatcaattcttacttttatagtgtggggattttttattggtgatttacaaaatgcaattattgcaagtatcagtgttcttatcatctcttgtccttgtgcattaggactagcaacgcctattgca

SEQ ID NO: 4259 - DNA, 23513 bp, synthetic construct
  source 1..23513: mol_type = other DNA
  misc_feature 1..23513: note = Synthetic
ggaattaataattcaaatgggaaaaacttatgaaaaaatgtttggattttatttggttttgtctctcttgctttttttatccaatactgtttttcttcaaaaataaaaggaaaaatctctttattcgaactttcgaactctttttttgctagttcttcaaaactactcaacttagcttctttttataaatatcattattaaaggctttaaatcttttatgttgccaaagccaaaaatctggtttatcaaaaatttgctttgaaacaatatcattttgaatttgagttagctcttttatcttatcatcagttttaaactcaaaagttcttacatctataggctcttttacctcgatagtccaatctctaaaaccattattaactgtaaatataggaataattatcgcatcaaattttaaagccattctagcagttgaatctgttgctaactctttttgccccaaaaattgaacttccactccacttccaatatgttgatcaattacaacagcaatacttttattatctttaaaagcttgaatcataccttttgcagcactttgtttttcaagcatagtaataagatttttacttctagcttttgcatatttttcttgaatatgtggattatccatctttctatttacaactgcaatttctccaaacatcaaagcaatataaggtaaagttatctcccaacctccataatgagcagttacatatataatttttctattatccttaaaagccttttctattatctctttatttaaaatatttgctttttttaacatattttcttttgtaatattctgattttctataaactcatacatattaaaaaccaaagatttataagagctatagataatctgctcttttctctcttcacttatactatttttataaactaaatccagatttgctttggcaatttttttatgtttcttattaaatttataagcaaaaaatgccataaattgcaatactcttttcattaaaaaatttggagtaattaaaaataaaaacataaaagtgttatataaaaaaagtctaaaataatctttaatttttctatacatctaaaagttcctttgccatttttactatctcattttcatctatatcttgaattgaaaaatcatttttatctagtttataaggatttacatcacttgctgattttatagttttatttaactttgttacataagtatttctatatgctggagtatttccaaaaagtgtaatagaaggaatatttaaagcccaagccatatgagtaggaccagtatcatttcctattactaaatcaactttagaaatcaacgcttttaaactatttaaatctaattttggtagagctaaagcttttgaattttgtgtaataaaatctgctatagctttttctttctcatttccccaagcaattaaaaaatttccatctaaactagaaactattttagcaaacttctctttagaatacatcttactatcccaactagcaccaactacaagtaagatattctttttatcttcttgtaaataatcataaattcttttatcttcatctttataaaataaaaatggttttttatttaaaatatcctctttttttatttcaaaatttaaagcttctccaaataaataacagtttctatctattacattttgactatactctatacctactttttttgaataaaaaaaactagctataccttctcttgttgattttctacaaaatccagtaatatttttacctaaaactcttgcaactaagctagattttataagcccttgtgcatctataattaaatcatatttctcttttttaaaacttcttacaaagcttaattgtttaaaaatatttttttttgatttttttatagattttagatttaattttattattttatttatatttggattattttctaaaacagaactaaatacctcttctacaaaccaatctataagtaaatttggataagcttttttaataaattctaaaactaccatagagtgaataatatcacccatagccgatagcttaataatagctatcttttgcactataaaatctctataaatagtttttgtggtaattctagcttttcaatgtaagacttcactaaaaatgatttatttggcaaatttagttgtaatatatttttatccaaaaagtactctacttttgggcaactaaaatctatatttattgctaaatttagtgcttgcataaatgccaaccattgcatagtttcaagatttggtaaaagttctttatactcttctaaatctttctcttttggtaaagatttttttgataattttaaaatatgtgctacaacaacccttgaagagtgtaaaaaatcataatttaaaccatttaatataaactcaaaagcattatcatttaacttataaaaattaagtgttgtaccaatagagtgaagttttgaagcaactactaaaagagtagcaaatttatcatcaagattgtgaagaggttttaatttttcaaaaatctctctagcattttttcctaaataagcactttgttttgggcaaatttgaaacctatcaagtaaagatctaacacttacattaaaatttgctggaaatttatgattttgtgttcttaataaatcagttaaataaacaccttctctcactccaactccagaagttacaacagtctttatttttaattcatcaagaattgttttaaatataaaagttccttcttttatagtatcaaacctatctttttttactccaagaacttctaaatcttcaacagttcttgtatttagaatatctaaaaataaattttgttcatcttttacactatatgtaaaaccatgaattgcatctaggggatagagatttttttgcattattaatttcgataaaaatctaatacttcctccaattcctacaacctttgaaggaatctcaactcctaaattaaaaaccttttttaaattctctaaaatataattttttgcaccatcaagattatctttgttaaaatataactcttttaatcttacagttccaatatctagtgaaatcgattttgttatttttccatcttttacaaaacaaaactctgtacttccaccacctatatcaactgttacaaaattatcatcatgaagcaaatttgaagtagcaactccaccaaaatatgcctctttttcaccttcaataacttttatattcaaacctaaatttttcttaactctattcaaaaaaactttagaatttggagcatctcttaaagctgaagttgcaacacataaaatttttcttgattttaaagcatttgagatatttaaaaaagattttaaagcttcataagctctttgcataggaagttcttgaagatttccaccattttcgtagcaaccttcagaaattttcaccttacttttggtctcatttataagactaaatgcaaacctactactcttttctaaaacaaccattctcattgagtttgacccaatatcgatgattgttgtaatttttgacatattaattttcttcttccattagttgttcatacttgaattttagttcctctaatgtctcttcattatctggatccaaaataatacaatccactggacaaacttctacacattgtggttcttcataatgtcccacacactccgtacagcgatcaggatcaattacatatattggatcaccctcttcaatagcatagtttgggcactcttctctacaggcatcacatgctatacattcatccataattattaaagccatatattttcctagtataatttattatcttggagttatacctaaaattgattaatattttctttaaaataatcaaacgtatctttatattttgttataaaaatcagattttcattcttataaatatataaatctccacttataaataaagcagcttctatatcaaaaactcttaaatcaccaataaatagtacaaataaagcatctcttgcatttgctaaagaaagagctgtcgctcctaaaactctaaatttaaaatttttatcatctaagattttacaaatatttggatatttataacctctttcaaaaatagcaacttttgagctatgattttctattttgttaaactcttttttgctttctaaacaaaaatatctaatatcttcacttaatatcctataaacaaccgttttactagctaaatttgctacaaatccagcaatagtaatatcatcttttttaacagcaaccgatgtaccaaaatatggaatatttgagaaaaaattattacttccatcaagtgggtcaattataaatgtaatatctttttgattatctatatatccacactcttcactaaaaatatttccaaaatcttttaaattttcaataaatatctcttccaaaatagcatcaattttaagtgttttatcaccaccaaagcctattttatttgtatataaaaaatcattttttttcaaactattttttatataacccaaaatttctatatttgattttattattgcatttttaatattttccaaaattataaactctctttatgctctattttatttaactcaatatcttcatctatatctttactctttattagtgaaatcttctcaagttctatgaaataagcatgagatagataaattgtataaaaaactgctacaaaaagagtaataaacggtattgtagagataaaatacaaaaaaagagttctcattctaaaagagcttccattttttgaatatatctgcttatactcttgcttacttaaaattgtagaagatacatcataatttaaaagtttatgaaaaaaatagtacaaaggtagataaaaagctattatatttatcaatggcacaaaatataacggtactagcaaaacatacaaaaatatcattacaaaaagagcttttaaaaatacccaaaatgctcccaaaatagttccataaggttttaaatctaaattcttataatgcaccttttccaaataatttacaacaaaaggagttaaaagaccaattaccaataaagttattataacacttaaatgaaaaataaaaattgccccaactgtataaaataaagttgcagctaaccatgaagtaattgagtatttaaataaaaaaacagttaaatatgtaagccaaacaaaataaaatggtgctttatcatcaattacaacctcacctgttgcttgtgaagtttcagcaacagttcttaaagcttctattccatagcttgccattccaaaaaatatcatatacattagtaacattgttacaagaagtggaattaaagctagttttagcattgatgaactaaaaaaatctcttacacttcttcttaaaatctctatttcattcatttttcatctttttttcaaattttattattctacctataaacaattaaaaatcaaaccttgttctatattcacacttttggcaaagttcctctactaaaatagaatttttaaacccttttatcatatttttcgctctattagtttgcaaaatatcttttacagttgattgatgaatatttcctaaatttatatttgcatccaaatccaaacaacaaggaactacagttccatttgataaaatcccaaaatgtgaagttaaaccataacaaaaacctttttgacttacaatctcatttttaaggtttggccaaacaaaatattcatcaaaatttataaaaatttttctatcaactcttatattttttggtttatttttataaatctcatctatatataaatttgaaccaaaaaaaatatttattttatcaaaaacttttttattaaattcaaatgctgttttttcttcatctaaattccaaattctaaaatttataaaatattcatgtttctcttcttgtgcaaactttacaaactctaaaattggctctaaatactcttcaaagctctttttatgtgaatttgcattatatgaatttaaagaaaaatttatctgttttatagaagaatttatcaaagctttatagtgcttttgactaatattatttgctgttgttgtaatatttacttttaaattatgttttaaactaatatctaaatactcttctaaatttcctaaaacaagtgggtctccaactatatggtaagctaattcttttgtaaactcttttaattgagcatttaatatatcaaaagtgcttaaatccataattttgtttggaaatagttttggtgggcaaaatgtacattttaaattacaaatattagtaagttctatatgtacttttttaaacttttttataatatttccttgattttttttgtgattgtaaccaataattacaaaataatcgattactaaaagtagtttaaatataatttgaaaaaaattagaaggtttattaatggaaatgatcttaaatgaagatgatatggttgttggtgctagatttgaaaatggaacaattcaagattatatagataaaaataataactatggtcttttaagagttgaagatacaacttgcaattggtttttatttaataaagttgaaagtgaagatgaaatacaaaaactatatgaagaagttacaaaaaaagagcacttcattcaaaatgattttggagaagagattgtaatttttaataaaaatggagatatatcttttgaagagttagcaaaaaaaatagatgagtatttaggcgacgaattaggaaatttcatctaattcataaataattttttataaatattatcaaaattttggataggctttggattaaactcctcttctttttccaaactccaaaatagatgtttatttctaaatctatcaatacttggtttaaaacttatattataagctgtagcaattacaatattatttaatttatctctaaataaaaactcctctttagaataaattgttgaaaaaaagctctttatctctttctttgtaacttcgaatcttggtttttcatctaaaattctattatttccgtttaaatatactctttcaatatcaaaagtgtgtcgattaaatcgtgtagaataagtgcttatatctataaatttatcaatatatttttcgtgtactttagaaatatcatatctatcatctaaatttaacattccagaatttcttaaaggataaacataaatctcttttaaatctaaactatcaattttcccatttaaatttttttgtgcttttattaatattttactatccattttaaataatatatgataagttctaactacatattttaaaaatatatctccataaaataagctactaattaaacttaaagttataaaaaatattaaaaaacttctaaaaagttttgcaaaaataaaactaataaaaaaacaaaatgagattaatgaaatatttgaaaagacaaacagtaatttttctggtaaaactaactcaaatgttggcatataactactttattaagaaattattttgtaatagaagattgttttttgattttgtggatggggtagaaggattcgaaccttcgagtgacggtaccaaaaaccgttgccttaccgcttggcgataccccagaaggattaaataaaagtggagctggtgaagggagtcgaacccccgacctgctgattacaaatcagctgctctagccaactgagctacaccagcacttttactttattttatggtgtcaaaagagagacttgaactctcgacctccggcttatgagaccagcgctctagccagctgagctactttgacttaaaaattaaataaattggttgcggaaataggatttgaacctatgaccttcgggttatgagcccgacgagctacctagctgctctattccgcgataaaaaaataaaagaacttcactttaaaaaagtggagcgggagacgagactcgaactcgcgacagtctgcttggaaggcagaagctctagccaactgagctactcccgcatgaaacccttttctaaaaggattggaatgatatctaaaaaaatattaaaaaaaacttaatatcttttagctggtgggtcgtgaaggactcgaaccttcgaccactcggttatgagccgagtgctctaaccagctgagctaacgacccagtggcggacagtgagggatttgaaccctcggtaccgttgccagtacgtctccttagcagggaggtggtttcagccactcacccaactgtccgaaatctgatttcaataaatcaggacgggaattatagtaatctaaggcttaatactaacttaaaaatatataaactttaaatatttgctaatatattttttacaacaactctaggattctcacttttatatataggtcttcctacaacaataaaatctactaaattctcttttgaaaaaccaatatcagcaactcttttttgatcaccactatcttcaccaaaaggacggattccagggcataaagttataaactcttttgaagtattatttttaatatctaaactttcaaatgctgaacaaacaacaccatcaagccccgcttcaaaagtctctttagcaaactctctagcttttttatcaatattttcaccataaatttttttgaaactatcattatcaaaagatgtaagtgcagtaacagctaaaactaaaggtctatttggaatatcttttaatctttgcataactgtctgcatagcaaattttcctgcacttgcatgaacattaaacatatcaacaagtccaaaattagaaatatcttgtgctgcatcagccatagtatttggaatatcatatagctttaagtccaaaaaaattttaaagtttggatttatagcttttatatcttctaaaaacttctttccatctcttaaatatgtcctaaaacctactttcaaccatacatcaaaatcttttattttttcaacaagagccaaattctcttttgaactctctaaatctaaagatacacaaagtttcatatcttttttcattttagcccttttttacctgatctaaaattgcatttacaaattttggtgcaccatcacttgctaatctttttgataactcaatagcttcattaataataactgcttttggtaaattttcaaataaaatttcataaatagcaagtcttaaaatagacttttcaacagaacctatatcttcaagatttccttgagttataaaggcttttatttggtcatcaattgtgcttaaattttttattgttccattaaataaatttaaagcaaactctttttgattatttcttatttttttctcttcaagtatttcatcaacaaattttgtaatctcatcatttcctaaatcataggcatataaaagcccaattacagactctctagcttgtgttcttgttgccaaattattttcccatttcgctatataaatctagcatttcaattattgtaaccatagcttctgcacctttgtttccaacttttgaaccagctctttcaattgcttgctctattgtatctgttgtcaaaacaccatttgatacaggttttccatattttaaagctactgttgctataccttttgttgcctctgcacttatataatcaaagtgtggagttgctcctcttataacagctccaacacaacaaaccgcatcatattttccacctgatagtgctttatccaatgcaaatggtatttcaaaagctcctggaactaatatcaaatctaaattatcttcatttccgccatgtcttttaaaagcatctcgtgctccttcaactaatctatcagtaattatatgattaaatcttccatttataatagctactttttcatttccttttaatcttaaaataccctctattattttcattttttctccaaatttcttttcaatattcttttattatacataaaaatatcttaagattttcaatcttctattgttaaatagttttgtagtaaactctataaatataatcactttcaaaggcaaggaaatggaaagaattttagggttagatttaggtacaaatagcataggatttgcactaaataaagtagaagagaaagatagtattacaatttttaatgaactagcttcaaatagtataatttttagtgaatatgttccatctactgatagaagagcttttagaagcggaagacgaagaaatgaaagagctagtagaagaaaagagaatattagaaaacttttttgctattttaatctagcttcaaaaaatatattagataatccaatagagtattttaataatcttacgaaactttacaaagagccatatagtttaagagaagaagcaataaaaggtaaaaaattatcaaaagatgagtttacatttgctctttatacaataatctcaagaagaggatatacaaatctttttgcaaaagaagaagatgaaaacaaagcaaaagagagtgaaaagataaatagtgcgattttaaataataaaaatatttataaaaatagtaactatacacttccttcaaaagttttaacactgaaaaaagaagaattagaggaagatggttttataaatattgcgataagaaataagaaagataattataataattcacttgatagaaaactttggcaagaagaagcagaacttttaatagagagtcaaaaaaataatatagaactttttaaagatataaaaacttatgaggatttcaaaaataagtttataaatggtgtaaataaaaattcaaaaggaatttttgaacaaagaaatttaaaaagtgttgaagatatggtaggtttttgtagcttttataacttatattcaaaagagcctcaaaaaagagttataaatgcacatataaaagctattgaatttgttttaagacaaagaattgaaaactctattttaggaaatttgattttaaacaaaaaaactggtgagtttgtaaaaatctcaaaagaagatatagaaactactattaatttttggctatatactcccaatgtacaaacaataactgctaaaaatatcttcaaaaatgctggacttaaagatttagagatacaaacttcagataaacaagatgatacagttcaagatatatctgtacataaagcacttttagagatagttgattttgaaactattttgaaaaatgaagaattttactcaaaacttttggaagttttacactattttgtaagtgagcaacagataaaagatgagattaaaaagctaaataaagagaatattttaagtgaagaacaaatagataaaatagcaaatataaacaaagctaaaagctcttatttatcattttctttaaaatttatagatgagattttacaaaagttgaaaaatgatatatcttaccaaacatgccttgaagagttaggatattttaaaagatatactcaaatggaagcttataattatcttccaccactaaatcctagtattgaagatataaaatggctagaaaaaaatgttaaaaattttaaatcagaacaactattttatcaaccacttattagtccaaatgtaaaaagagtaatctcaattttaagaagattggtaaatgagctaatatcaaaatacggaaaaatagataaaatcataattgaaacagcaagagaactaaactcaaaaaaagatgaagataaaatcaaaaaatcacaagaacaaagcaataaagagataaaagatgcccaaactttactaaaaagtggaaataaagagttaagtaataaaaatattttaagggcaagacttttgaaagaacaaaaatcaaaatgcctttatagtggagagggtttaactcttgaggaagctttagatgaaaatataacagagattgagcattttatccctagaagtaaaatttggatagatagttataaaaataaaatattggtacttaaaaaatacaatcaaaataaatcaaaccaacacccagtaagctttttgaaatctattggtaagtgggaaaattttgtaggtcgtgtagatgagtttatagcaaataaagataaaaaaatttgcctaacagatgaaaaaaatatccaaaaaatttgggataatgaaaaattagaagatagatttctaaacgatacaagaagtgctacaaaaatagttgcaaactatttagaacactatttatttccaaaacaaaatgagtatggaaaaggtgaatcaaacgataaagtaataagagtcacagggaaagctataaatgaactaaaaaaactttggggaataaatgaagcacaaccaaagaacgaagagggtaaaaaggatagagatacaaactatcatcatacaatagatgctattgttatttcacttttaaataactcttcaaaaaaggctttaaatgactttttcaaacaaaaagaggataaatttaaaacaaaagctattttagaaaaattaaaaacaagattcccaatttcaaaaaatggcaaatctttatttgaatttgtaaaagataaagtagagaaatatgagaaaaatgaactatatgtttgcccttatatgaaaaaaagagaaaatattcgtggttttaaagatggaaatataaaacttatttgggataaagagctaaataacttctctcaaatagataaagtagagattaataaaaaattactcttaaataattttggaaaagatttaaaagatgatgaagttaaaaaagagtttgaaaaaataaaagataagctaaatcttccaaaacaaaacaatataaaaatagctttagaagagtatgagaaaagactactagaaataagaaaaaaaataaataatataagtgaagagataaaacaagaacaaaataatcttccaagagataaaaaagctattgaaacagttgaaattttggaaataaaaaatagaatagaaaaattggaacagactaaaaaagagtttgtaaaagagctagaatttccttgtttcttctatacaaaagatggtaaaaaacagatagttagaagcttaaatctaaaatcaaactctgtaacaaaagctgatagtataataatcacagataaaaagcaaaaaaatagagtacaaagattaacaaaagaagtttatgaaaatttaaaatcttctaaaacaccttttgtagcaaaattaaatgataacaccttgagtgtagatttatataacactttaaaaggacaattaataggtctaaactatttttcttctataaaaaatgatattttgccgaaaattgatgaaagaaagataaaattaatatcaaattacgatgataaaataactgtatcaaaaaataatattatagaaattgaagatttaaaaaatggtacaaagaattattatacttgtaatggtggtggagaaataggtaaaggaaaaaatgttattaaagtagataacataaatacaaaaaataaatcagtaattcctattcaaatagctgattatagaattgtaaaaccagtaaaaataaatttctttggaaagatttcttatgaagagtttaagaaaaattaagataccattttcccatatcaaatggggatttgatagtctgattaaaacaaggggcgatttagccccgctaaaattttataaactcttttttgggagtttataaaatgtcttttcaaaaactttacataaaaaacaaagcctacttaagctatacaaacaacctaatcaaaattaaaacagaagatagcgaaaacacagtttgttttgatgatatagatactattttaatagaaaactatcatactactatttcaactgcacttttagctcaactatcaaaagcagatattagtgtgatattttgtgatgaaagatttatgcctagctcaattttattaggaataaataaaaatagccgtacaacaaaaatacaaaaagcacaagttcttttaagtaagccaaaactaaatcaaatttggcaaaaaatagtttattcaaaagtagaaaatcagtcaaaaattttaaaaatttttaatataaaagagaattatttagatagcttacttccaagagtaaaatcaaatgataaagagcatatagaagcagtcgctgcgacatactattttaaagaactttttgataaagattttagtagaaactctttacttgatggtagaaatgtagcattaaattttggatatacaatttttagaagttctatttgcagatatttaatagtatatggattaaatccagtttttgggatacatcatagtaacgagttaaatgcttttaatttagcagatgatttttcgtccaatagtagatttatatgtaaaaagaaatataaaaaaagataccctaatttcaagttctatgaaaatagagcttttaaaactattagatgagataataatatatgataatcaaagagtacaagtatcctattgtatgagacaaatagttgcaaactatcaatctatttgtttaggtaaaagtgaagaattaaaactttttaaactatgataaaaagtaaaaaagataagaatcaagagataagtaggtataggaaaatggtactttttgcaatgtttgatatgccaacagaaacaaaaggcgatattaaaaaatatacaaaatttaggaaaaaacttttagaaatgggttttataatgtttcagttctccatttatgtgagattttgtaacagtttggaaaatgctcaaaaatatgagaaaaaaataaaagaaattccacctacaaaaggttcaataagagtattaaaagtaacagaagcacaatataaaaatatgattattatagaaaattatcgtgaaaaacctgaaaaaaaagtagaaaaacagacacaaactgtacttgttttttaagtataaaaagcttttaaaagctctatatacagggttttaagctaccctattatatcaaatggggatttgagagtagattaaaaccttttagaacttatcctgattatgtttcacattatatcaaatggggatttgagagtagattaaaacacgattaaagaatgataacgatattaaagattatatcaaatggggttttgagagtagattaaaactgtgtcttttcctaaaaataagctcatagattatatcaaatggggatttgagagtagattaaaaccattttgatagaaaaatatattagaaattaaaatatttgaagagagtatagaattaaataaaattagtaaaactaattttttataaacaatttcaaaaaagctttagtttcctaaagcctctttaatagcaaaaatatcattcatagttttatataaggtatcaatatgaagcatatttggtccatcactttttgctacacttgggtcaatatgtgtctcaaagaaaaagccatctactccaacactagcagctgctcttgccatatatggaacaaatgagctatttccacctgttgttcctccagtactaggaatttgtacactatgagttgcatcaaaaataactggtgcatattgtctaagtaaaatcaagtttctcatatctactactaaagctccatatccaaaagtatttcctctttcacaaagccaaactccagctttttgtgaattttcataagaaacttcacttattcctcttgtatttaataccttttcaacaggatgtttcatagcatctgctgctaaaaattgtccttttttaatatttatttttgcaggtgttttagctgctgctaccaataaatcagtctgtctacataaaaatgcaggaatttgaagtatatccataacttctccagctggagatgcttgatatgattcatgaatatctgttacaactttatatccaaactctttttttattttttcaaatatttttaatccctcatcaagtccaggtcctctaaatgagcttaaacttgttctatttgccttatcaaaactagctttaaaataaaaatcaactcttttatcttcgcttaaaggttttaatttctcagctatttttaaaactgtatccatatcttctaaaacacaaggtcctgtcataactaccatataaattcctttattttttacttactaaaattccactaattacaatcaagattatacctaaaactattataaacgaaggaaaactatctcccataaataagcccagaattattgaaaaaacaatattactatatgaaatagttcctataattccagcttttgcaaaagagtaagcctttgtcatatagatttgtgcataggttgaaaaaattcctaataaaactataaaaatccaatctttgtttgttggaaatataaactctcccaacataaaatctaaattagaatttacataaaattcactaattatcatcaaaattagtggacaaatcgttccaacagccataaaagataaaactatcgcccgactatcataatattttcgtaattctctaattgaagtatatgctaaagctgctccaacacctgataagattcctaaataatctgttttttttaaacttgaaccatcaaattcagtaataaataaaatcccaataaaacctataaatactccaatccaacctttaaaaccaatatgttcttttagaaaaaaatatgctaaaagggcagtaaatatagtagaagtctttgaaaaagtcatagcttcacccaaaggaatatttgcaatattataaaagaaaaacaaaagagctataaatccagcagttcctctaaaaataagtaaccaaaactttcctcccatttgatttaacgggcttttataaatagaaaaaagtataaaaaacactccaaaaacatttcgaaagaatacaatttctattgaacttaaagttgaactaagctcttttgctgtaattcccataagtgcaaataaaaatgaagcaataagcatatattttatacctttgtttacattttcttccaaatttgctccttttttaaaaaagcaatagtatagtaagattactaaaataaagcaattttcaggtaaaatctttcctattttaaaacattatttaggaaatttatggattatttaaaaattgttggaaacaaaaaattaagtggtgaaatatctatttctggtgcaaaaaatgcagctcttcctttgatagcaagtacaatattagctaaaaatgagactattataaacaatcttccaaatgttgctgatattaatacttttttaaaacttataaaaatgcttggtggaagtttcataaaagaacaaaatagtgcaaaaattgatactagttcaatagacaatacaactgcaacttatgatattgtaaaaactatgagagcttctattttagtacttggtcctttacttgcacgatttggacattgtgaagtttcacttccaggtggttgtgcaataggtcaaagacccgttgatttacatctaaaagcactagagcaaatgggtgcaaaaatagagattttacaagggtatataaaagcaactgcaccaaatggattaaaaggtgcaaaaatagtatttgataaagtaacagttgggggaactgaaaatattgttatggctgctgctttagcttcaggtgtaacaacaataataaatgcagcaaaagagcctgaaatagtacaactttgtgaagtaattcaaagtgctggagtaaaaattgaaggtattggaacatctaaaataatcattgaaggaacaggtggaaaactgcttgatattaaaccttttagcgtaattcctgatagaattgaagctggaacttatatgtgtgtagcagcaattacaaaccaaaaattaactataaaaaatataatccctgctcatttagaagcaatcacttcaaaactagaagagatgaattttgaaatagatgtaaaagaagatgaacttacaatttttccaacatcaaaaattttacctgtaaatattatcacaacagaatttccaggatttccaacagatatgcaagctcaatttatggctcttgcaactcaagcagaaggtacaagtacaatagatgaaagactttttgaaaatagatttatgcatgcaagtgagcttaatcgtcttggagctgaaatacatttaaatggaaatatcgcaacaattattggaaaaaaaggtggtcttagtggaacagatgttatggcaacagatttaagagcctcatctgcattagttttagcagcacttgtagccaatggagagacaaatatacatagaatttatcatcttgatagaggatatgaggatttagaaggaaaacttctaaaaattggagctaatattcaaagattaaaagagaattaatgaaactagagatatctctatttaggttcgataaagatagcgattatcttccatactatacaaaacattttataaatctaaaagatgaaaagaatcttttagatattttaagaacaatttataaaaatgagaaattttcatttttcgattcacaaaatagcctttttgttgtaaacaatatctttatgaaagcttcaacacttttggaagatatcataaaaagttttggaaaagatttaaaaattgagccaatttcaataaaaagagcatataaagattttttgataaatgaagatgatttttatacaaaatttaaaattttaaaagagttttgttctttagaagatagagatttttataacaatcaaaaactattttattatgcttcaaatacactaaattacaaagaatcttatattggtgatgccctacttcttttagcatctaaaaagataaaagatactccaaataaaaaagatgaaatttttaaaattttaaaagagcaaaaatatggagctaattttcatacaagcttaaaaaatagagtttttaactttgatttgcaaatagaaagagatatcaaggaacttcaaaaagagttaggatttataaaagattttaatgaaagaactataatttttgaagaacttggaacagatttaaatataaaatatacttttaaaaattttaatattgcttgttttaatagagatttaaaatttgatatatttttacagaaattagaagcaaattttttaactttagaaaactttgatttagatttggcaaaagatagtttttttataaatcctaaattaacatattttatagcttcccaaattttattaactgcttttgatagtggagctgattttttagttgtttttaatagtgaagatttttttatttttaataacaaattaaaagagatagaaaaaatctcaaatagagaaatccctcttccaattatccatataaatgagctacaaatgttagcaaatgaagattttgaaaaagcaagaaaaagttttaaaaatcacaaaattaatccaaagattatataaatggaaattttaatatatactcttagctttttatctatattagcttttatacttttcttgctaaaaaaaccaaaaaaacttaaaaaaagtgataataaatttgaatttttcctaaaaaatatacaactttatataaaaagataccatcccaaaatagagataaactataaaatagtagaattatcaaaagatgaaaaaaacttaaaaataagacaaactttaattattcaagatattgtaaatcaattttataactataattttatcaaaaaatctcaagagccaataccaaaagagaaactttggccaacatatatagacaatcccaaatgctcttcatacccaaatgattggcttcaaagaaaagagttcgcatatacaagagataataaatcttgtaaaagatgtggaaaaaatctactaaatttaaatgaagtttatagctcctttgtaagacctataaaagatggtggaagcttcaattttgaaaatattttaactctttgtagtgattgtaacaaaattttagattcaaatttagaaaaatcatcactcataaattctttaaagctttatgatgatttactaaaatttattgaggattaagactatcaaaaatctcttttgccctattttcagctgatatcccaactttttttgtagcttctttattttttatatctgctagtttattatccaactcttttagtttttcagaagcttttttactatcttgctctttttttaaagcctcctcttttactcttattaaactatcttgaagatatttatcttcaagatttttaagctgtgctaactcatttcgaacaaaggttatatcctttgattttggtatcatataaggagttacaattacaactaaattactctttttactcaaatttgcatcattcttaaatatattcccaacaactggaacatcacctaaaataggaactttttgttctatttgttcatttttattctctattaaacctccaattattacactctcaccattatttaatatagccgttgtttttatctcttttttcaaagtatctggattttcacctgctccaactgattttgtttttatcccttcaagtaaagtatttatctctaaagttacctttgtatcactagaaattctcggtttcacttttaaagttaatccaacatcttctctttgaaaatttgttctttgtgttccaccatctgttacactacttgaagtttgaatagagattttctctccaacataaattgaactctctttattatttatggccaaaatagatggttcagaaacaatatttaaagcaccattttgctttaacaaatttaaacttgctcccaaagccaaaccagaagttatatcaggaattttaagatttaaaatatcctttacaacatttgctgaattacttccaccatttaaactagctgagaaagtagaaagattgtgatttccaactttaccaccaaaaattccataagaaactcctatattttctaacatctcatcatttagctcaataattctagcttgtacataaacttgtgattgctctttatctaaactgcttatcaaagttattaaattttctaattcctctttacttcccattaaaacaagagaatttgactctatatctaaagttattattggtttttgagttccctctttataaactcttttatttactaaatcttctaaaatttttaatatatttactccatcaacattttttagatttaaaatctctgtaataagtggtttttcttcaatttcattgattttactaagtttaaaaaagcctttttcttcttttaatatataacctttttgttttaaactaagctctaaaatatttagaagttcatcttttgatagttttttattggaagagaaatttatagtaccttcaagtggctcatttataaaaatatttttatctaaaatcttagagacaattgttacaaactcatctaattttaaattttcaaaatttatatcaattaactcttttgaaaaaagatttgaagataaaacaaataaaaaaagaagtttaaaaatagttttcataaaacaactcaataataatttattaagttattatagtatcttaatttctcttggaagtaaagtttttaaatggataaattcatcttttgaaagagaaatatctactctaacagttaagttaaaatctttatttaaaatagctatattattttgatttaataggtactccaattgtgataataaactatattcacactccaaagagtagccttcttgctttttgtaagaagaaaactctgcaatttttatcacttcatttacactatttccataagctcgaaccaagccaccagttccaagctttaccccaccaaaatatcgcacaataataactgcactatttataatctcggcaccacttaaaactgccagtgctggttttccactcgttccttttggttctccatcatcacttgaattttctacaatttgttcaaattcatttaaatatctataagcatatacaaaatgtacagcttttaaatattcagctcttaatctttgcatagttttagaaaaatcactaaaaggaaacaaataagctataaattttgattttttttcttctatagtaaaagtaaactctctatttacaaatttcattttatatctattatctttttttatattaaattcattttataacatttaagctaatattgttataatttttcaaaattttaattaattattaaaaaggtattttatggaaatttcaataaataatatctcttctgtaaattcaaatataactttaaactatgaaaatatggattcagtaacaaaagagaaagaaaaagatgtttttgatttattcttagaaaaactagaaataaagaaaactgaagaaaaagagcaagaagctcttttagagaatttggattctgttgcaaaaactggttttactaaagatgagctagaattaataaaacagatttttgaagagttacaaaagcgtagagcagaatctactcaaacatcaaaaaatcctgaagattatattaaagatttacaaaatgatttacaaactgcaatttttaaagctacagggaaacaagtaaagttagataaagattttgtgaatagctttttaaatcaacaaaataataacactgaacttttagcaaaaccaactatagatgaagagctaagattattatataatcttaaaaaaatatgagattagatttatacttaactacaaactttaatattcaaagtagaaacaaagcaagtgaactcataaaatccaataaagtaaaaatagatggaaagattatatcaaaagcttcatttatagttgaagaagatatgaatatagagctacttgaagaggatttttatgtttcaagagctgcttataaattaaaattttttcttgatgaaataaaaatagatttgaataattttatagctcttgatataggaagtagtacaggtggttttacacaaattttacttgaaaatgaaataaaaaaggttatttgtgtagatgttggaagtaatcaacttcatgaaagaattaaacacaatagtaaaatagagttttttgaaaactgtgatataagagattttaaaagcgagatttgttttgatattataacttgcgatgtctcttttatctcaatattaaatataattgaaactataaactctttaaattttaaaagaataattattctttttaaaccacaatttgaagttggaactggtataaaaagagataaaaaaggtgttgttaaagataaatttgcaatagaaaaagcaagagataaatttttaagtaaaactttagaattaaattggaaattagaaaaaaatagcattagtaaattgcaaggaaaagatggaaatgatgaagaactcttctattttagtagataaaaaaaatattaaaagtatagcaattggtggatttgatggtatgcatattgctcatcaagaacttttcaaacacttagaaagttttggagcaattgtttgtattgaaacaggctatgcaaacctcacgccaaaaagcttcaggcaagagtacacaaactacccaatatactattacattttagaaaacattaaaa

SEQ ID NO: 4260 - DNA, 23507 bp, synthetic construct
  source 1..23507: mol_type = other DNA
  misc_feature 1..23507: note = Synthetic
attcgatactaaatggctcaatttttataaatcacctatcaaagatagaagtaaataaagatattctgatagtaatagtagaaaattttgaaaacctattacaaataaaaaaacaaaaatatctatttgaaatctataataaaaaaatactatttatttttagaaattcagctatttacgaatacttaaaatattttgagaatgaaataatatattttggagatatagatttagctggtatttcaatatatttaaatgaaattaaatccaaaattttaaatcattcatctttttttattccacaaaatttagaagagttactcgaaagtgcaaattcaatcttgtattttaaccagtatgataagtataaaaatcttaaaagtgatgaaaaatatttagaaaacttaattgcattaattaataaatataaaacaaccgtagaacaagaagtattgatattaaattaagatgtaataaaatactttggtttaattttattttttattatttgtaattaaatcaattaccccttaactgaaattttgataatatcagtgcatgaataacaaatacaaaatactaaaagagacttttggacatgatgggtttagaagttttcaagaagaggttgtcgatactattttaaacaaacaagatgtattgacaatcttacctactggtggtggaaaatcactttgctatcaacttccaacattacttatgagtggagttactgttgtaatctccccacttattgcacttatgcaagatcaagtaaaagctttaaatgatttagatattagtgcagaaatgataagttcatcacaatcaaatgatgaaaatagttttacaatgcaaaagcttttaaatagggatttaaagtttatctatgtagctcctgagagatttacttcaaatgagtttgtaggagttctacaaagagtagatataaactattttgtaatagatgaagctcactgtgtatctgcttggggtcatgagtttagagctgagtatagaaatcttgatagattaaaacagtttttcccaaatacaccaattgcagcatttactgcaactgctacaaaaaaagtacaagatgatatttgtgcctcactaaacttagtaaatccaagactttttagagcaaaaacggtaagagataatttagatataaaagttgaaccacgaatagtaaatggtaaaactcaaatactaaacttcctaaaagagcataaaggcttatgtggaatcatctatacctttactagaaaagaggctgaatcaactgcgcagtttctaagtgaaagtggatatagcgcaaaagcttatcacgcaggtttaagtccacagattaaagacgaagtatatgaggattttgtatacgaaaagattgatatagttgttgcaactattgcttttggaatgggaattgataaatcaaatattagatttgttatacatacaagcttaccaaaaacactagaaaactattatcaagaaatagggcgagctggaagagatggagagatgtcttatgtgtatttactttattctaaaagtgatgaggtaaaaagaaagatacaaattcaagaagcaatagatgatagttatacccaaactggacttgaaaaactagaagccatgtatagatactgtgtatcaaataattgtcgtcataaactaatagcaaagtattttgaagatgagatagaagattgtgaaattttatgtgataattgtacaaaaggtgaagttgagcaagttgatgtaagtgttgaggctcaaaagtttttaagtgcagtatatagaagtgaacaaagatttgggacaaaccatatcatagatattttaagggcttcaaaaaatcaaaagatattagaatttggacatgataagcttagtgtttatggacttggagttgataaaagtaaaaatgaatggatagcaatagttgataaactaatagatatgcaagctttggatttaggtgagtttagagcactgaaaatcacagctttaggtatgcaaatattaaaaggaaaagaaaaactgctaatagatagtgataagttaggaatcgctcaaaaggttgaacaaagcgaagaagtacttagttttgatgagcaattatatgaaagatttagaacacttagacgtgaaatagcccaagagcatgaagtgccagcttatgtgatatttggggataagagtttaaaagagtttgcttcaaaacttccagttactaaaggagagatgttagatataaatggagttggtttagtaaagtatgaaaagtatggagagccatttataagactttgtagtgaaataaaagaagagtttagtgaaaaactaaaagaaaaagcaccactaaaaaaactaacaaaaacttatcttgatacttatgaattgattttagaaggtaatagtgtagaagaaatagctcaaaaaagagacttaggaattacttctattttatctcatatctcacttttaaatgaacatgaaaaaataccagatgagaaaaagcaagagttattacaaccgcttcaaataccaagtgagataaaaaactggatagaagaaggaataaaacttgatagtttaaaacagttaagacaacacttatatttatacgagtatttatcaaaggaattataatgatatatgaaaaatttgaagatatagattttaatgagctttatgtaaaacaaaaagaaaaaacatcatttaaagccaaaaatagtgatgattgggataagaaagcagattcaatgaatcaaagagttcataaatcaatttataatgaagagttcctaaatatcttaaatctagatggaatagaaacactattagatgttggatgtggagttggaaatttatctttaaaactcgcaccaaagttaagtcaagtatatagtttagattactcaaaaggtatgcttgaagtattaagaaaaaatgctactgaacaaaatattacaaatatcaaaacgataaatagctcttggtatgactcatgggaaaatattccaaatgctgatttagtaatagcttctaggtcaatggaagtaaaagatatgaaagaagcacttactaaactaaatgataaagcaaataaaagagttgcaatttcatataaagttggtggttcttttgtatcacaagagatattagatgttttaaaaagagaaattatcaaaaagcctgactatatttatgtgctaaatattttatactctatgggaataaatgcaagtgtaaattttgtgcgaagtgaagggcgaaatacaatatatacttcaaaagagaagtttattcaatcagtttcttggagtattgatgggctaagtgatgatgaggttagtagactatcagaatattatgagggtttagatatagataagaaaaatgaggctgattttgtatattgggcagtaatttcttgggaaaaatgtattaaatattaaaaatgagtcatttgtgagtcatttctttgttacaatgttttattttataaacaggggaatataatgacgaaaatctttttttctattttgtttgcttttttagcagtttctttaaacgcaaaagagaatgaaacttggctatacaaagggaactctttgtcttttggttgttttacttttcaagatgattttgtggaatcttatccagattattaccaaacacagtttagattgaataaagcctatgaggatgattttacatctaatccaggaaaatattttgaaggaaatattaactggtataaaaagcaagcttatggtatagatattgaaagttacggatatggattagctgcagtaaatttaaaagagtgtttatcaaaaaaacaagactttttagaagattatcaagttagagaatggttgtcaaaagatacttgtaaaaaattagcacctaatcttgatgcaacttgtaaaaaagctgcttatgtagtagttatgaataaatatggtggttcaggaaatagagcttttatgtatgtatatggagagtttgataaagatggagagacgtttattgttccattaaaaaaatttaatcactataaagatgcagatagatttgtaaaaaatgaaaacaaaaaaagagacttagtttcatcaaatgatagtattgatttaaaaacatcacatgaaattgttggtaataagcttattttaactgtaaaatcaaaaaatttagttgataatggaaaaggaggaatttctatctctttccctcaatttcaaactacaaaaagaataatcaaaagtgaaaaaataggttttgataatgttaacctttataaaaaaggtacaaagatttggaatagagaaattagaaaaaccgttaggtcttcttatcttttaagtgaaggatggacaaataaatggagagctaatgaagaaaaaattattaaactagtagttgatataagtaatttagataaattagttgttcatgttagaagtaatattattaatggtaaaaaagagtatgtaaatccagttgattctacttattataatcagcaaggttactatgacaaaattttaaatatctctttaagatagatactaaaaaagatagaatgaatttaactttttgagttaaattcatctcttccaaagaagtttgttttatttgtatcaacaaccattcttttagccatttcatgattgatatttgcaacttctaaagtattttgagctcttgtagcattttcttgagttgatttgtcaagttgagcaactgcactattaatttgctcaattcctctttcttgctcttttaatgaatttgaaacttcatttataattacttttgttttatcgatattatcattgatacttgtatattcattaatcatatcatttgaagctgttttaccttgttttgtaacttcactagcatcattaactaattttttgatttcacttgcagcttctgcacttctactagctagatttctaacttcttgagcaacaactgcaaaaccttttccagcttcaccagcagttgcagcttcaacggctgcatttaatgaaagaatattagtttggaatgcaatttggtctataacaacaattgcttcttcaattgcattagttttttcattaattttatccattaatgaagcattctcttttgcatttgaaaaacctttttcaatagaactacttaattcatctgagtaagttaacatatcatgtacatttttattattgttaataactgtacttgtaatctcttcaattgcagcagctgtttcttctaatgtagcagattgttggattacactatttcctaaagaatccatatttgcttttagtgaatcagagtttgcatttaatttagtgttattttttaaactactaagaagcatttttgatattttgatatttacttgattaatttcatcaattaactcttttaagtcattattgtatttattttctatttggattgtaaaatcattgctattatatttttccatgaaattttttattgaatcaattgtttctctaaattgatttagagttgtattgatatttgttgcaattttttgaagtttttcatttgaagaagtacctttaactcttaaatcatactctcctatgcttgactgataagatacttcaagtatctcatctaatatctcttcatcataattatcaattcccttttcttcaataaaagtctctttttcttcttttttattatttatgaagtttatagagatcatagaaataacagcaattactccaaataaaatagataatgtatcttgatttgaattaattaaaactattattgtagatataatagcaattagtgataaaattaataagtttttgttcatttatttttcctatagtatatttaactgatgtgctaaatctgctgcaattctttcatagtttctaactgataatagcctattttgaccatttataccaacttgtgttacatcctcttttgaaagagaaataatatattctaatttttctcttattgagtcttcatcaaaatttacaaaccaagcactaatattatcttcaaatatagagttattattttcattattactcataatacaaggaatagcactagagtaataatctaaaactttcataggtgttgaactattgaagagttcaatatcaggtaaagcagctaatcctatatcagcttttgcaatcacatcaagtaactcttttcttgtttttgtttcaaaaatctctatattatcttttaataaagagtattcatcaagtaatttttgtaaatattctgggtcttttgtggaaatcataagtttatagttagaactatttatgtttgaaaaagcctctaaaatagtttcaaattctcttaacttatctaatgtacctgcataaaaaaatcttttttcactaccagtatgttgaatattctgtgttaaattatcagggtcaatagcagaaggaattacaaagcttcttgtttttacatctttaaaataatcatctttcatcttaaaagatgttggtaaaaagatgtcacattcattgattagatttatttcagaataagtcttaactttatttgaaataacatcaagtaaagattttttattattagcttcatctgtttgaagttttgcaattctttttggaaaggataatctaaatccaactttaaagttatattcatttttcttttttaatacttcttttaataaatcagtactatttcttacaactacaaaatcaaaagtagataaatctatatctgcattttctaattctttgattaaattacctttgaatttctcaggaataattattgttccattatcatgaacttcaatatcaaatttataatcagaaaaaaatgtagtttgtatatcaaaatgttttgttaaatatttttgaaataaagggcctataaaactatgatctgtaaattcattttggtctgttatatataaaaatttactcactttaactcctttaatttttcctaaagattttaacactagatagttgcacgaaaaaagcattaattaattatattctagttatcatggatttatgaaaaatacaagtgtagaaaacattgggtgttttaaaactattttagacccatataatggtataacaatcgactctaaagatttaccaaaacagatagaagaatttgagataaaccttgattatttaataaatgaaactatcaataaaaggtttttaatttggatttatataccaattgaaaagtcagattttataaaaatagctactaacaaaggattcttttttcactcgtgtgcagaaaattatattttagttgtaaagagattaaaacaaaatgcaataattccaacagctgcaaatcatactttaggcgtgggggttgttgttataaatgaaaataatcaattattagttataaaagaaagaatctcaactgtaggctataaattgcctggtggtcatattgatgatggggagatgatatcaactgctgctactagagaagttttagaagagacaggaatagaagttgagtttgagtctataatatctttaggacatttttatccacatcaatttcataaatcaaatttgtatatactttgtaaagcaaaacccattagtcatgagataaatattcaagatagtgatgaaatagaagatgcaaagtgggttgatgtagatgaatatttagttgatgaaaatgttcttgattattctaaagctatagtaaaagctgctatttcaaataaaagttttattagagaaaatgaaaaagtcttaagtcatataaatagagattttgaactctttttccctaagaaaaactagagaaaatctctagttttttagtaaatacactggttatttacgtattttccttttctatccatacaattcatctcttcttttgagattcttgagaagtttgtaatagattgtttaccatttgaccatgttgtagttgcattaaagttattcgtattacctttaatatatgcatctatttctccaccatttttccagtccataaagattttttgtgttgaattattatatttccacacaattttctcatctctatctacttttccacttccaaagaactcagctgcataagctgtattatttgcatataattttatatataagtgatattggtcgtatgttcttttattatcagtcattttataataaccaacaaaagagtttttatctgcatatttaacatttactggttttgagaagttagcattgttgattaaatctacatttaatccaccacttttaataatatgtgcttcaactcttctattttggaatttaccatttcttgtagaatttgatgcaattggagcaagttctccataaccaatagcataaattctattttcatttacaccatgttttagtaactcttttctaactgattgagctcttttttcagatagatttttattatatttctctttaccttctgagtctgtatgcccttgtatttcaactccatagttattgttttttaagtagttagctaattttttaattggctcttgatactgagatttaactttacttgaacctgaatcaaagttgattttaaaattataaacacctgatgtccaactagaatctttaatatttagttcatctgtaattttatcaagaacttcatttagtttactaccatcttcagctttgaaatatacacctttccccaaaactaactgttttaattgatactcaatttttgaatcaacagaataaccaattacaaaaatattaattctatctccaaagatttgttttaatctttgtgcttcataaactggatttccaccacaagtctcttctccatcactaataattactatattgatatttttatcaatattactcatcatctgacctgtttttctaatagacgcagcaagaggagtatttccatttggaataatattattcgcagcagtgataatattgttgaagttattattacttggttctacaagtaattttgtactataacaaccatttgaaaagttaactaaaccagcgttagtttttgtagggtcaagttttaatgaaatatctttgatgatatctttggctgcttcaattttaaccaaaccatagtcatcttttccgttcatacttcctgatccatcaagaatcattaaaaatacatctttatcagaagtatatttcttgttaaagtctttaaatgggtttaatttttgtagttcattcatgtttacattaacacatcctgtaaatacaaaaattgccaaaatagacaataaaaagctaatttttttcatttgtttcctttgtcgataaattatactaaattattctatctaaagaatgtctcacaaatgactcatttttgaattattttacaaataaaagtaactaaatagtataatttcttttttaaatattataaaggaataaaatgaaagaaataatttcaactaataaagctccatctgcaattggaccatataatcaaggtacatcttttgaaaagttagtatttttatcgggacaaattccattagaccctgaaacaatggaattagtaggtggtgatgatattcaagctcaaacaaaacaagtaatggaaaatttaaaagcagtattacaagaggcaaactcttcttttgaaaatgtacttaaaactacttgttacttatctgatatggataattttgtagcatttaatgaagtatatgcacaatattttcaagcccaaactgcacctgcaagagcaactgtagcagtgaaaactttacctaaaaatgttttagttgaagttgatgtaattgcatttaaaaactagagtttttctctagttttttcttctttttttgttatatttccctttgaatttattatattgagtcatttctgagacaattatatgttattatttagtaattaatatgattattgaggaatagggtatgaaaaaagttttaggattagatattggtacaaatagtatagggttttcactaaatgaaataagtatagaaaatggtcagactatatttaaagagcttacttcaaatagtataattttcagtgaatatataaaagctgaagatagaagagcttttagaagtagtagaagaagaaatgaaagaaaaagtagacgaaatggcattgttagaaaactattaagtgattttaacttagctaaaaaaagtattgttacaaaacctattaaatattttaataaattatcaaaagataaagatccatatatcttaagacaagaagctgtaaatggcaaaaatttatctaaagatgattttacattttctctttactcaatcataacaagaagaggctattctaatcaatttaaaactgaagattcaaatgatgaaggagttattaatgaagctatttctcaaaataaagagctttatttaaaaaatgaattatctataccttcacaagttttattaaataagaaatttaatttagaaaaaaatggttttacaaatattgccattagaaataaaaaagataattacaataactctttagatagaaacttatggaaagaagaattagaaatattattagaatcacaaaaagaaaataaagagctttttgaaactattgaaatatatgatagtcttaaaaataagcttataaatggtgtaaatgaaaattcaaaaggagtctttgaacaaagatcattaaagagtatggaagatatggtcggttactgtagtttttataataagtttcatagaaatccacaaaaaagagtacttaaatcacatatttcgagtatagaattaactattagacaaagaattgaaaattctatttcaggtaatttgatttttaatgataaaactggagaaatatttactccaacaaaagaacaaattgataacacaattgaattatggttaaaaagaccacctacaaaaactataaatactaaaaatatttttgataaaacgggattaaaaaatattaaaattgaaactttaaataaacaagatgaaaccgtacttgatattggtattcatgtacagttattggaaatatttaaaaagactgatttagacatttttaaaactcataaagatttatattctaaaattttaaagaaaatattttattttgtaaataaagagcaaattttaaaagagattaaaaaaattgatgaagagaatcttttaaatgatgaaacaattaaagaactatcgaaagtttcaaaagggattaaagatacatatgcatcattttcattatgctttattgaagaaattttagaaaaaatgaaatcaggtaaaaattatcatgatagtttagctgatttaggatatttcagaaaatatttaaatatggaaccttactcttatttacttccactaaatccttctgaaaaagatttaatttggcttgagaaaaatattgaaaacttcaaaagagaacatattttttatcagcctttagtctctccaaatgtaaaaagagtaatttctattttaagaagattaataaatgacttaatatcacaatatggaaaaatagataagattattattgaaacagcaagagaattaaactcaaaaactgaagaagaacaaataaaagaagctcaagcaaatagtagaaaagaaataaaagctgctgaaaaactacttctatcagataactgtgaattaagtaaaaaaaatatcgaaagagcaagattattaattgaacaaaaatcaaagtgtctttacagtggagaacctttaactttagaagatgcacttgatgaacaaaaaacagaagttgaacattttatcccaagaagtaagatatggataaactcttataaaaataaaatattagttttaaaaaaacataatcaggataaatcgaatacgcatccaatagcatacttaaagtcaaaaaatagttgggaagaatttacttcaagagtaaaaaaagaattaacaaacactagtaagattttttggctaactaatgaagaaaatataaataaaaactgggaaaaagaaaaccttgaagataggtttttaaatgatactagaagtgctacaaagattatctctaattatttagaacattacttgttcccaaaacaaaatgaatttgggaaaggtgaaacaaatcaaaatgtaataagagttactggaaaagctataagtgaacttaaaagactttggggtgttgataaagttcaacctaaaaatgaagatgataaaaaagatagacaaactaattatcatcacactattgatgcaataataatttctcttttaaatgaatctgctaaaaaagctttaaatgacttttttaaacaaaatgaaaatggatttaaaactaaagagatattagaaaaaatcaaaactagatttccaatcacaagtgatggagttaatatagtagaatttataaaagaaaaagttaagagatatgaaaacaacgagatatatatttgcccagtaattaaaaaaagagataatgtagtaggatttaaagatggaaatgtaaaactatacttagataaagagaaagaagagttttatcaaatcgataaaaaagctatcgataaaaatcttttatttgataactacggaaaagatataagtgataaagaggtaaataaaaaagttgaagatttaatctctcatttggatttaccaaaacaagaaaatattaaaaatgctttattagagtacaaaaataaattattgattactagagaaaatatctcaaatattaaaaaagagataattgaactaaaaggtgcactaccaaacaaaaaaaactatgaagatacagagcaaacaatagctataaaagataaattatttagactagatgaactaaaaaaagataatgagttattacaaaatgaaccttgtttttttattacaaaaaaaggtttaaaacaaatagttagaaatataaaagtaaaaacttcaagtgcctcgaaagcagatagtttaataattactgataaaactcaaaaagatagattaaaaagattatcacttgatgtttacaaagaattaaaagaaaaagatattccatttgttgcaaaactaaatgacactacattaaatgtggatttatttaatacttcaaaaggtcaagttataggattaaattatttttcttctataagaaataatatcccaccaaaaataaatgaaaagaaaatagcccttataaaagattacgaagacaaaattactattcaaaaaggtgatatcttagaaattgaaaatctaaaagagtctacaaaagagtattttatttttaatggtggtggtaatattgctggtagcaataataagttagagttaaagtccttaaatagaaaagaagtaaaaagaatttttatgactttaaataaagatacaattgcaagaaaagtatttataaattatcaaggagatatttcctatgaagagtttaagaaataatataataaaatactctcatatcaaatggggatttgatagtctggttaaaacaagggacgatttagtcccgcaaaagtttttttataagctcttctttttgaggagtttataaatgtctcttcaaaaactatatataaaaaacaaatcatatctaagctacaaaaataatctaatatctgtaaaaattgataattttgaaacaacagtttgttttgatgatatagatacaatagttattgaaaatcagcaaactactataacttcagcactcttatctcaacttacaaaatcaaatataaatgtaattttttgtgataaaaaatttatgccaagttcaattttattaggaataaataaaaacagccgaacgactaaaatacaaaagtctcaaataatagtttcaaaaccaaaactaaatcaaatatggaaagatatagttacctcaaaagttaaaaatcaatcaaagatattaaagaaattaaataaaaactatgaatatattgatttattgatttctagaataaaatcaaatgataaagaaaatattgaagcaatagttgcagcttattatttcaaagagttatttggaaaagatttttcacgaaacaatcctgaaaatataaacaatgcagtactaaattttggttatgcgatatttagaagttctatttgtaggtatttaatagcctatggtttaaatccagcgtttgggattcatcatagtagtgaattaaactcttttaatctagctgatgatttaatagaaccatttagaccaatagtagataactatgttgcaagatttataaaagaagatatggacttaaactcttctattaaaatagctttattaaaattactagatgaaactgttatttatgatgatagaaatatgactgtttcaaattgtatgaaattgatagttgcaaattatcaatcaatttgtttatcaaaaactgaagaactaattttatttgaattatgaaaaatatatcaaaagaaagcaggtatagaaaaatggttttattcgcaatgtttgatatgccaacaaatacaaaaaaagatataaaaaaatatacaaagtttcgaaataaactcttagaaatgggttttataatgtttcaatattctatttatataagattttgtaaaagtttagcaattgcacaaaaatatgagaaaaaaattgagttagcatcacctttaaatggttcaattcgagtaataaaaattacagaagctcaatataaaaatatgttagtaatagaaaactatagagaaaaacctgaggaaaaagtagtaaaacaagtacaaactgtacttgttttttagtgttttaagccttaggaaggctacaaaatcgaagcttaaagctactctattatatcaaatggggatttgagagtagattaaaacacacaaaggacacatcacaatggatgatttattatatcaaatggggatttgagagtagattaaaaccttgatcttttgttgttcttggaaatttagattatatcaaatggggatttgagagtagattaaaactaatccactaaccaaagcatttacagcattattatatcaaatggggatttgagagtagattaaaacttatatatgttgctatctcatctgagtttattatatcaaatggggatttgagagtagattaaaaccatagaatttatctcttagtggctcaaattattatatcaaatggggatttgagagtagattaaaacttaacttttttactattcctgcttcatatcattatatcaaatggggatttgagagtagattaaaactcaatagttttctataatatttcagtgttgattatatcaaatggggatttgagagtagattaaaacaccaggcgttgaatagttacaatgatgcaaattatatcaaatggggatttgagagtagattaaaacaccttgagacagctaaaaccgctatgatgtattatatcaaatggggatttgagagtagattaaaacaacaacagtttcataagaaacacctctataattatatcaaatggggatttgagagtagattaaaactgattaaatttagtctcaaacgtatcaacaattatatcaaatggggatttgagagtagattaaaactaacactttcttaggaaaagggacaataggattatatcaaatggggatttgagagtagattaaaacatattgttttattgcaattattacatctaaattatatcaaatggggatttgagagtagattaaaacttgcctgctctaaagttaatccaataaggattatatcaaatggggatttgagagtagattaaaacatgactaaagcaattaaaaaatatatcttaattatatcaaatggggatttgagagtagattaaaacggcttgaatatccaaaccaaaacaaaggagattatatcaaatggggatttgagagtagattaaaacatactcaaaaaacaaatgaacttgaaagaattatatcaaatggggatttgagagtagattaaaacaagaccagcattcgaaccattgttcaaattattatatcaaatggggatttgagagtagattaaaacaattagcttcaagttgattatataaattgcattatatcaaatggggatttgagagtagattaaaacagagataatgcactaaatgacttagaactaattatatcaaatggggatttgagagtagattaaaacgggtatgttgtcctgctgttagcgaaatcaattatatcaaatggggatttgagagtagattaaaacgcaggttttacaaatatactagataaagatattatatcaaatggggatttgagagtagattaaaacgcgatgctcttactggcttaagtctttgcaattatatcaaatggggatttgagagtagattaaaacagttaaaagcgtatttcttagaagagttcaattatatcaaatggggatttgagagtagattaaaactgttaaaacttgggtgtgttaatgttattgattatatcaaatggggatttgagagtagattaaaaccagcatcatttataatcgtataatttacaatctgagggagtgttagaaattccgtgtcaatctgataaaataatatcaaggattaacaatggaacagaaaatagagtttgacttcaatgaagttttagaacaatttaaaagtggaaaaaatcttacaggtaaagatggacttttagctccacttattaaacaacttacagaagctgcacttgaagcagaagtagaatcgcatattgctaatgatgttttaaatggtacaaagaaccgaaagaacggtgtaaataaaaaaactatcaagggtttatctgatggatcatttgaacttgaaacaccaagagatagaaatggcacatttgaaccacaacttgtaaagaaacatcaaactacaatctccaatgaaatagaagataaaatactctcaatgtatggcttagggatgagttatacagatatagcctctcatattgaagagatatatcaagtatctatttcaactgcaacaataagtacaattacagataaaataattacaaaggtaaaagagtggcagtctcgtccacttgatactatatatccctttgtatggcttgatgctatacattataaagttaaagatggtggtaaatatgtatctaaagctgtttatactattttaggtgtcggtatggatggtaaaaaagatatacttggactatatctatcagaatcagaaggagcaaacttctggctttcagttcttactgatttaaacaatagaggtatccaagatatacttattgcatctgttgatggattaaaaggctttcctgaagctataaaaaccatatttccaaaaactgaggtacaactatgtattattcatcagattagaaattcaatacgatatgtagcttctaaaaaccataaagagtttatggctgatttaaagcctgtatatcaagcagtatccaaagaagctgcagaagatgcactaatattgcttgatgaaaaatggggtaataaatatcctatcgtacttcaatcttggcaaaataaatgggaaaacctatcggtgtattttaaatatccaccagagataagaaaagtgatatataccacaaatatcattgaatctgtacatcgtcagtttagaaaacttactaaaacaaaaggagcttttcctaatgaaaatagcttactaaaattgttatatatgggtataaaaaatgctactaaaaaatggaatatgcctatgtggaattggaatctaaccctctcacaattagctatatttttcgagggtagattggatagtgaacttaaaatttaagtttgggtgtgataggattttatcctatcagaattatgttgacacggaatatttaatggtctccaatctgaatcagaaaataaactattttctgatggattctttaattcaatgctcactatgctcttcaatcatagtttgtattttttcataaattgttttagcatcttcttctgaaattttatcctcttcaagaccttttacaatatgctctaattcctctaaaaaaaactgcatctcttcaataccatttaggtcatcttgtgttgctgtgttattattttttttaacttttaattcttcgatataatccatagtttctggaattatagtttcatcaatcattgtttttaatttttcttttatattttccatttatttcctttttttctaaattatttaagagtcaatccgactctttgtttttctaaatctacacttaatacttttatattctctaaattttgattgatacttagaacttcacttgggtgatttattcttttttgagatatttgagaaatatgcaataaagcatcatttttaagtccaatatctacaaatgctccaaaatcagtgatatttcttactattccacttagagtgtaaccctcttttaaatcttcgatatttaaaatatcacttgaaaacttcacttgattgaattcatttcttacatcatatcctggttttaaaagctcagagactatatcttttagttttaaaggtgtggtatttagctcacttgcagctttttcaaaatcaacaattttttctaattcatagtttttttgtaaaatatttgttaatttataatcttctgggtgaatccctgtattatctaaaatagatttaccatctttaattcttaggaatccaacactttgttcataagcttttgctccaattccttttacatctaaaagttgttcttttgaagtgaattttttgattttagctctatgttctataatattttttgctaaattttcactaattcctgagataaaagatagcagtttatatgaagcagagtttatatctacacctactttatttacaaggtcaatggtaatattttccagcttttgtgctaactctttttgatttacatcatgttggtattgaccaattccaagggattttgggtcaattttaacaagtgctgccataggatctcttaatcttccagcaatagatatagcacctctaatagttacatcaagatttggatactcttgtgcagctatttttgaagctgaatacacactagcacctatttcactaacaattgcataatttacatctaaattctcttttttgataagttcatcaacaaaatttgcagtttccctagaagctgttccatttccaatagctatagatgatattttatattttttgattaattcaagcactttttttgatgaagtttttatatcctcttttggtttagttggataaataacatcactatctaagtagtttccattttcatctataactgcaagtttacaaccagttttatatccagggtcaattcctaaaataacttgattaactaaaggtgctgttagaagtaactcttttaagtttttaccaaaaagttctatggcttctaaacttgctttctcttttagtgtatttatagcttctctttttaggcttggaagtaataatctttttaatccatctttatacgcatcatatactaattcctttgaactattagcatgtgatggaattttatatttttttatattttctaaaatatgcttttcgtcaatatcaacttttattgataattgtttttcatttactgctcgcaaaatggctaagactctatgagattttatatatttaattttttcactaatatttgtaaagtttgaatatacaccatttttatcaaactctttcgcctcttttgtctctaagattccccaatttgagattaaatttctaataatctcttttgatttaaaatcatcggcatatctttgggctattatatcttttgcaccatttatagcatcatcaatagtttttatctctttatttacaaactgttttgccttgtagtttatatcttctagggagtatttcatagattggattatatttgcaagtggttcaagtccattttctatagcactacttgttcgtgaagattttttatctttaaatggtgtataaatatcttctaatgcttgaattgtttttgcatcatttaggtttttttgaatcttttcacttaaaaagtttttctcttttaaaagattttctatctcctcttttctttttaagaatttttgaaaatagttatatgtttcttcaaaaactctaagctcttcatcactagctccacctgtataatcttttctatatcttgcaataaaaggtattgtacaaccttcatttataagatttattatgttggtgattgattttgtagataagtttgtcttttcttcaagtaaaactattaagttattagtcaagttctacttcctcaaaatcacttctagtatttgaaataggcttattactctttgctcttactgtataaacaaatgatatttttggagtatctgtactatttttacttgcatggtgtaaagtcttacaatgaaataaaacaatatctcctttttctagtggagttgatgttttttgtttaattaattctatattttgtttattctcatctaagaaatttgagtcctcatcaaatctatcaggtgtgaaattcattttatgactttttggaataaactccaataaaccattatctaaaaactcatcaccaagggcaagccaaactgaaactaaattgtcattttcaaaatgccaatatcttctatcttgatgccaataagttctagtactctcttttggaagttttgtcattattgaattatggtgtgcaagtgttaatataggtgtgtcatttaaaacctgttttaaaataggtcttatttctctatatgtcatccaatttctaaaaatctcttctctttgataaacttgtcgtaatcttcttactgtaatttttttctcatcaaggtttaaatactcttgttcagactctatgggtgctatttttgcttgtaagtgttctttggctttatttagtatatcttcacataattgttgtggtgcaaagtttttaataactaaaaagccattctcttcaaactcttttagttgttgaggtgttaatatcatcaatactctttatgaataatttatttgtgattatatacaaataatcctatttaagtgataaaattaattaatgataaaaatagttttctttaataactttctaagttttttagctctataatccttgtagttttattagtaaaactaattaattatttataaggaaaaattatgattaaaaagtttttagtatttgtaagtgctctttttttatctgctaatttatatgcaaatgaaaatagtgcaaagggattaaatgtaattgttacatcagcagataatcaaactcaaatgatggcaatggtattagctacaatggctaaaaaagcaggaaaagaagtaaatattactttatgttcaagtgcaggggatttagctgataaaaatatgaaaagtgctactttaaagccaaaagataaatcaccaaaaatgctattaaatggtttaattaaaaatggtgcatcagttaaagtttgtcctttatatttaccaaatgcagggaaagatacttctgtattaatggatggaattagtgttgcaaaaccaaatgaggttgcagcttctttattaaataaagatttccaaaatttaagttactaaagtaagagttcttactttagttaactatggcattgtgccattgaacaagggaaattcgtctaccttgttttacttttaatacttcatgagtgaagtagggattacttaagaatactaccatattcccagcttttggtttaacttttatttgatttccatttatgtcatataaaaagttaaacaaaagctctcctccttgaaaagagtttttatctatttcatcttcacatgaagttgtaaataaaacagtagatacttttctctcatttgtaacaggaacaaatccaactaacttttcatctttgaaaagcatactagaatcatcactatgcatcatataaaatgagtcttttttatattctagtacttgtacattagttgatgaactaatagctaatttaaaatagtcttctatttgtttttgatatgaattaaatctttcattatataaatttaataaaatattatctagtttatagatatttgtttttctaattttttcattagttttactagtaacaactgcttcttgaattaagacttgtgctttttcaaaatcatcatcatcttttattatctcattgattaattcacactctttttgtgtgaaaaaatcttcaattattaaaaatggtaaatcataatatgggtttggtaatagttttgtttgaatatcaaaatctaatagaaaatcttcacaaaaaacttcattacttatttgcgtcatgaaagctgtttcgttaaagtatttaaatcaccaagtacccaaatatctacaatttttccatctctaaatttaaaaaatgatgcaccattgtattggattttattattactagcttcataatcaaatagttttcccgtatgtcttccattgtataaagctctaactgctatttggtcattttcatcaactaaacttacaattgagtgaaaaagatttggaatacctgttaaaatagtttccatatagttttcaaactcttttttaccttttgtattgatatttaaagaaccatgaaatgtaatattatcatcaaataaaatatctatgtactcttttttttgtttattccatagttcatcataataaagttttacaatctctttattcgtcatcttcttcatagtgtccctttctatgtggactataatctaaatcatcatagtcatagtcataatcatcataatcaacagtaaatattttttggtatcctaaagcaactaattctttatcaatattctcttcagttagtctatttttaactttatccattattaaatcaatatgctcttctggtatatcgtttgctcttaattcatatataattgataagctcattttttaaacctttttctctattttgttgttaatataaaaatcacttaatatgtttatcacagtttttacagacttaattgatgctgtttcttctactgtatgataacctgttgttggtatttgtaaggttgttccttgaatcaatccctttgattctttgacaattctaccaagttctgtacttcctaaagttaaaggctcttgtcctttttcttttctaattttatttttttcttgaataaatttgtctttacaaataaaatcaattttgttttttctacaatactgttttaattgttttaaaataacagatttaaatttagcatttgcatcttgatttcttaaaactatttgcattgcatcagcttctgctcttgtatcaaatggacttgtatctaaaactaacagttcatctgtatttagttcatttttcttaaaccattcatatacatatctcc

SEQ ID NO: 4261 - DNA, 20596 bp, synthetic construct
  source 1..20596: mol_type = other DNA
  misc_feature 1..20596: note = Synthetic
cctgttacattatcgtacatccactcatttgctgcttctggtaaatctaaatgttcttttaaaaatttcaaattttcaaaatatttactctctaaataaaattttattttttcagacgttatatcaatatttagagctgtctgaaaattttcaaaatatagatttccaaaaaaatttaattctttagaaaaataatctattttggctttcccatcaaataaaactttataatcttttaaatataatgaatttaactcaaaaaaaactgtatttgaagaatcatctattttcgaagaaagatttataaaattattatcaagatataattctttcccattaaaccagatataaaattcattatcatttatttttaaattttctatttttatgctttgaaaaaactttaaaatttttggaagtaactgaatatcattttttaaattttctaaagagttactttctttattactttttgactcatattctattttttcaatgttcaaaataagttttttatccatttttatatagaattgcgaaattaaaaaattagagaaagaaaaagagtcgatttttatgccaatatacagagatgaaaacattaaaaatataaaaagaaatgatacaaatattgcaattttaatgttttttaacattatagattttatcctcattggtttaatagttgttttattttatctaacaatgccagtaaattccacaaaagttttgtttatccctaaaggcagtacggctaatattatatcacacttaaataaaagtggatatgaaatgaatgcattagatgaaataattataaaaatgacaggttacattcaaagtggttggatagatattgatcaaactagacttacaaaaatggattttatttataaactaattagctcaaaagctgctttaaaaactattacattaatacctggtgaaacttcttattttttcttaaaaaagatagctcaagagtttagcctttcagaggaaattttaacaaaaatttataatgaacatgcatataaagcagatggaaatattttagcagatacttattctattcctattggtatgaaagaagattatattattttttatctattttctcaaacaaatagaaaatatgaagagttttcaaaaaaaatatttggagtttatgataaaaagaagtggtacaactatataactttagcctctgttattcaaaaagaagcagcaactacaaatgaaatgccaatagttgcaagtgtagttcataataggttgaaaaaaggtatgcgtcttcaaatggatggaactttaaattatggtaaatattcaaatagtgtagtaacagcagatagaataagagaagatacaagttcatataatacttatttgaatgctggactacctaaagatcctatttgtgcagttagtcttgattctataaaagctgcaatatttccagtaaaaagtagctatttatactttgtgagagataatcgaacaggtttacacaaatttgcttctacttttgatgaacatcaagtaaatattcaagcaaatgttggtgtaccaaaaacttatacaaaagttaaagctgttgaaacaaaaattgatgaagaagctgagactattatgaagacagatatttctaatcaaaaaccaacatcaatcaaagatttatttaataatataaattaatattttgtgaaaatttgaaacaatcaaattttcataaactaatatatattctcaaattaaataaccttaaatacaaatctagataatattttttcaaattcaaaatttaggaaaaaatatgtcaaaaatcatttacacaaaagttgacgaagcaccagcgttagcaacatactcttttttaccaatcattcaatctttcacaaaaagttcaggaatcgaaatggttcaaaaagatatttcacttgcaggaagaatcattgctgctttcccagaaaatttaacacctgagcaaaaaattggtgatgcattagcagaacttggtgaaatgactcaagatccaaaagcaaatattattaaattaccaaatatttcagcttcaattcctcaattaaaagctgcgattgctgaattacaatcaaaaggttataaaattcctgattatgattcaagtgaagaagcaaatgcaagatatgcaaaaatcttaggatctgctgttaaccctgtattaagagaaggaaatagtgatagaagagctccaggtgcagttaaaaactatgctaaaaataatcctcatagaatgggtgtttggacaaaagattcaaaaactgatgtagctcatatgaatgcaaatgatttttatggaactgaagtttcaactactttagattcagctgataatttcaaaatctcttttataaataaaaatggagaagagactgttttaaaagcttctttaccattattagctggtgaagttgttgatgctactaaaatgtcttcaaaagctttacaagagttctatcaaaaaggaattgatgaagctaaaaaaagagatgtattattatctttacacttaaaagcaacaatgatgaaagtatctgatccaattatgtttggatttgctgtaaaagtttacttcaaagatttaattgctaaacatggaaaattatttgatgaaatgggtgttaactttaacaatggtttaggtgacttatactctaaattagacaatattgatgctgcaaaaaaagctgaaattttagctgatattgatgcagtttatgcaaaacaaccaagacttgctatggtaaattcagctaaaggaattactaacttacacgtaccatcagatgttattattgatgcttctatgcctgctatgattaaaggtggcgggaaaatgtggaatgcgcaagataaagaagaagatactttagcgatgattccagatagatgttatgctacaacataccaagttgtaattgaagattgtaaaaaacacggagcacttgatccaaaaactatgggttcagttccaaacgttggattaatggcacaaaaagctgaagagtatggttctcatgataaaactttccaagcaaaagctgatggaaaaatcgttgttacaaataaagcaggagaaactgtatttagttttgatgttgataatggtgatattttcagaatgtgccaaactaaagatgaaccaattaaagattgggtaaaacttgcagttaatagagcaaaattatctggaactccagcagtattctggttagataaaaacagaggtcatgatgcacaaatgatcgcaaaagttgaaaaatacttaaaagattatgatttaacaggattagaaatctcaattatggctccagatgatgctattcaatactctttagatagaatgagaaaaggtcttgatacaatttctgtaactggaaacgtattcagagattataatactgacttattcccaattttagaacttggaacatctgcaaaaatgttatcaattgttccattaatgcaaggtggaggattatttgaaactggtgcgggaggatctgctcctaaacacgttcaacaattccaagaagaaggttatttaagatgggattctttaggtgaatttatggctcttgcagcttctttagaacacttagcaaatacacaaggaaataaaaaagctcaagttttagctgatactttagataaagcaactggaactttcttaatcaatgataaatctccagctagaaaaattggaagcattgataatagaggttctcacttctacttagcaatgtattgggcacaagaattagcagctcaaaatgtagatgctgagttaaaagctgaatttactccaattgcaaaagcaatgactgaaaatgaagaaaaaattgtaaaagaattaactgaatgccaaggaaaagctgttgatatgggtggatactatttaccagatgatgcaaaaacatcagctgctatgagaccttctgcaactttaaattctattattggataattaaattttttaatttataaaaaggcaaagtttcggctttgcctttttttatacccaaaaagatataatctattttaaacaaattttaaaggctctattttgaataataaaacaataggaattattggagttggaaatgtaggttcaacattagctttcattttagctacaaataatatctgttcaaatatactattaaaagatataagaaacaatatttcacaagctatggcacttgatatttcacaagctatgcaagaaacaaatagtaatgctaaaattactgcttgtttaaataatgaagaattcaaagattgtgatattattattataacagcaggaatagcaagaaaaccaaacatgagtagagatgatttactcattacaaatgcaaaaattgtagcttctgttatgaatgatatatcaaaaaacaatccaaatgcaataattataataatttcaaatcctcttgattcgatggtttatacagcattaaaatcttcaaattaccctaaaaataaaattcttggaatggctggaactttagatagtgctagaatgagttattttatagcagaaaagctaggatttccaaatattaatataaaaacttctgttattggtggacatggagatagtatggttccattgattgatttttcaactgttgatggaaaaaaattaaatgaagttttatctaaagaagatatagatgatattgtaattaaaacaaaaaatggtggtggacaaattgtaaaactattagaaacaggttctgcatattatgctcctgcttattctacaattgcaatgatagaagctattttaaatgatacaaaaaaatgttttgcatgtgctactatactaaatggagaatatggttataaagatatagtttctggagtgcctgttattttaggaaaagatggtgttgagaaaatcatagaattagaaatcagtgattttgaaaaagaacaatttgcaaaatctattaatagtgttaaagaatcaataaacattttagaaaataattttcttaattagttatcaacttagaaaaataggatttattgattagagtcaatattctttaaataatatttgagtacaataatcttatcttatttcacaaaaggatctattatgaaaaaaattgttattgcaactactattttaactgcatgttttgcttttgcaaacccttatgcaaaatgtgttgtatgtcatggagcaaatggggaaaaagtagctctaggtaaatctaaaattattaaagatatgacaaaagcagattttgtagcagcattaaaaggttatcaagctggaacttatggtggagcacaaaaagctttaatggttggtcaagtaaaagatatgtctgaagcgacaatgaatgagcttgctgatttaattatcaaatagtttttaactagagaattttctctagttatccaaaattttactcttttttatatcatttagaatatttaatagctctttcttttcatttaaaagttgttttattaaaatatctttttcatcttcaacttctatttcagctatatttttttgttctaaaatttttccaagataaaattcaaaaatacctttttgttgtgaaaaatctatttttaaacattctataacaatttgaggtttatcttctcccaaaccatttgttaataatagtttactgatttgtttaattttataagttaatttattttcaataataattggttcaagtaactcttttttccaataattagagctctctttttctataacatacaatttttttgataatattttagaaaacaaatctttatttactgaaagtttaaacaccctatttcctatatttttctgtactatatctataaattactaaattaaaaatatgatacaatctcgcaaaataaaaaaggatagaaatgaataatttatttaaatatctatttataacaatatttagtacaattttatttacagcttgtactacaaaagaagtagtaatcatagaagtaaaagaaaatgacttaacagaattttcaaaaaaagctaatgataattttataaatcaagatcaagcaacaaacgactactttataaaatactttagaccttgggaattaacaaaagtttcatatccaaaactagaagctatgtggggacaatcatatagatttaaaaaagtatatttagaaaatcatcaattagctacaaaagagtggtttgataaacaaatagaaaactcaaattttgatgaatataatgtagtaccaaaaaaagctataactttaaaaaatacaaatgtaagagttcttccaacaaattctccaatgttttataatccactactaccaggagaaggatttccttttgactataatcaaaattctttaatcaaaataaatactccaattatggtttctcatttgtcaaaagataaagcttgggcatatatagaatcaagtagtgttggtggatgggttgagataaataatatagcatttgttaatgaaaattttataaaacaatttaaaaattcaaactactttgtaagtataaaagaaaaattcccaatttatgatcctatttttagagaatatgtaaaagtcggaacaatctttcctaaagaaaaagataactatctaattgccaaaaaagatgataatgcaaatgcaataatttcacatatacaactaaatccaaatgaaattgaagctatgccagtactttataatagtgaaaatagaataaaaatattaactgaacttttaaatgaaccttatggttggggtggattactaaataatagagattgttcaagttttactcaagatttttttactccttttggatcatatttacatagaaattcaaaagcacaaacaacaaatgggaaatatattgatatttcaaaactaactttagatgagaaaaaagagtttataaaaaaagaaggtgttccattttcaactttagtttatttaaaaggtcatattatgctttatttaggaataaaagataatgaaccaatggttgtacacaatgtttggagtgtaagattgaaagacaaaaacaataaagaatttagacatataattggaaaatcaactattacaacattagaaccaggaaaagagttagaaggatttgatgataatagtaatattttaaataaagttctaggaatagttattttataagctttagtaagaactaaagcttaatcttcttgtaaatctttactttgatctatttgttgtaaaggattgaataataaagaatcaagaatctgatttttaaatttcatatcttcaagttgttgagataaaaaagtattttcttcttgtaaagaaatatagtgtgcatacaatttatttatatctttactcgtataataaatattatttcttaaatatatttttggaaaatataaacataaagcaaagaataatatcgcaaatacaatagctattgaactttgtgaatttaatttaatcaaatttaaaaacccttaatttagaacttctgcttctaggattttgtttaatctctaaagcagttggaattataggcttttttgtaataatttttcctaaagcatgattatttccacattcacatctaaaaacattatctggacaaatacaagatttgctccattttttaaaatagttttttacaattctatcttctaaagagtgaaaagagataattgcaacaatacaatcttttaattttgctttttccaaagagtcaaaaagtctctctaaaactcctaattcatcatttacttctattctaattccttgaaaaggtaaagttgctggatgaagttttccttttgacatttttttagataaaaaatctgcaagttcttttgagctattaaaaggtctattatttactatcaaggaagcaacttttttatactctcttacttctccataatctttaaaaattctttctaattcagtttgagaataagtatttacaacagttgcagcatctaaactttgattttgattcattcgcatatcaagtgttaaactttcaaaaccaaaacctcgttcaagtttatctaattgtaaagatgaaactccaatatcagctaaaactcctctaatttcataatctttaaaagtttctattacatgctcaaaattacccttattgaaaattaccctattttcaaatttttcaactctttttttactaaaagctaaagcttcatcatcttggtcattgcaaattaattttatattttgattttgatttaataaaccactactatgaccagcaaatccagtagtacaatctattatataaccttcatttatatctttaaaagtttctagaacttcattatataaaacggggatatgaggaatatccattaaaactgtccttaattaaattaatatataatatccaaaaatatattcaaaggcttttaatggtagataaagatactataaaattactctctgatttatcattttctatgtttagtaagaacttttttggtatctatcatggtgcaatttcttctaaacttgatcaatataactttatgataaataccagtgatgctatatttgacaaaatggatgaaaaatctttttgtactttaaatatgaataaacaagattatagatggaatattgctagtatcgaatcccatattcattcgacaatatatacaaatatccatgaagcaaaatatattgcttttggtatgccaatttatacaacagcctatacattacttcatgacaaaatagtatttgaagatttttttggtaaaactttttttggagaattatctatttataatcctggtgatttttcgacttggtataaaagaaatgcccttgaaattacaaaatatttaaaagaatctgaacacaatttgatggttataaaaggtgtaggaacttatgtatatgatagagatgtttatgaactagttaaaaaaatagctattcttgagaattcttgtagacttttaagtataaaaagttcttttgaataaaaaagatacagaaaagataaaaaatttatttgctaaagcccgaacttttagctatttcaaagcttaaatactataaagttttctcgatttaattttatacaaggagttctccaatgaacaaagcagagtttatcgatgcagtagctgcaaaagctggtttatctaaaaaagatgcaaaaggtgcagttgatgctgtattagatactattactgaagcattagtaaaaaaagaatctgtaagctttatcggatttggtacattcgcaacagctgctagagctgctagaacagcaaaagttccaggtacaactaaaactgtagatgttcctgctacaactgttgctaaatttaaagttggaaaagctttaaaagaagcagtagctaaataatttcttttaaaaaagtaagttcatctgccacagatgaacttacttttttttctctaaaatcatatgccgctatggtgaaattggtagacacaagggattcaaaatccctcgcctttggtgtgtcggttcgagtccgactagcggtaccatatttaaatgcatcaaggtctatataagtccattaagctccataaaatcgtcattttagcattttttcatacgaatatttttcacccaaattccctaatttatggtactttcaaaattttttacggtattctttacggtaatgagattaaaaaatagaacaattatagaagtaaaaagttctaaaacttctttagagtaaaatatgtcaaattttattaaagatataaaataaattgagtaaatctatgaataattttatattttataaacatttcaaaacatgataaataataatatctattataaattattttttaaaactaatttacgaaattcaactttttgttgcttagctaagctacaatatagtagacttaaaactatttaaattattttaaaggcaagaaaatgttaaaagttttaggattagacttaggaacaaatagtataggttttgcattaaatgaaattgaagaaaaagatggagttatagtttttaatgaattagcttcaaatagtataatttttactgaatatatgaatgctgaagatagaagaaactttagaagtggtagaagacgaaatgaaagaacaagcagaagaaaagaaaatactagaaaacttttagtaagttttaatttagccacaaaaaatattttagataatcctatagagtattttaattcccttacaaaactttataaagaaccatatactttaagagaagaagctataaaaggtaaaagattaacaaaagatgagtttactttttctctttatacaataatttcaagaagaggctacactaatctttttgctacacaagatgatgaaaaagaagcaaaagaaagtgaaaaaataaatagtgctatacaaaacaataaaaatatttataaaaataacaattttttattaccatcaaaagttttaactgtaaaaaaagagaatttagaaaaagatggttttattaatgttgcaataagaaataaaaaagacaattacaataattcactagatagaaaattatggcaagaagaattagaaaaactttgtgatagccaaaaaaataataaagagctatttaaagatttagaaacatttgaaaaatttaaagataagctactaaatggtgtaaataataactctttaggaatatttgaacaaagagatttaaaaagtgttgaagatatggttggttattgtagtttttataacttatatcataaaaataaacaaaaaagagttataaatgcacatataaaagccattgagtttatcataagacaacgaattgaaaattctatttcaggaaacttgatagtaaataaaaaaactggtgagtttgagtctctctcaaaagaagatatagaaactactattaaattttggttagaaactccaaatgttcaaaagattactgcaaaaaatatattcaaaaatgtgggaataaatgatttagaaataaaaacttcagataaacaagatgatacagttcaagatataactacacataaagctatctcagaaataattaattatgaaatgattataaaaaatgaagatttttattcagaattacttgaagttttacattattatgtaagtaaagaacagattattgcagagattttaaaaataaacaaagacaaaatattaactaatgaacaaattgaaaaactttcaaatataaataaaaactctagctcttatatgtctttctctctaaaatttatagatgagcttttacaaaaaatgaaaaaaggtattagctacaatgatagtcttacagaacttggatattttaaaaaatatacaaatatgaaagcttatgaatatcttccaccattaaatccaaaagatgaagatataaattggttagaaagaaatattacaaactttaaaaaagaagatatattttatcaaccgcttattagtccaaatgtaaaaagagtaatatctgttttaagaagattaataaatgaattaatatcagaatatggaaaaattgacagaattattatagagacagcaagagagttaaactcaaaaaaagatgaagaaaaaataaaaaagtcacaagaacaaagcaataaagataagaaggaagcagaagctttattaaaaaatatgaataaagaaattagttcaaaaaatattttaaaagtaagacttttaaaagagcaaaaatctagatgcttatatagtggagaaaatttaactttagaagatgcattagatgaaaacattacagaaatagagcattttattcctagaagtaaaatatggatagatagtcaaaaaaataaaatcttagttttgaaaaaatacaatcaaaataaatcaaaccaacatccaataacatttctaaaatctattggagagtgggaaaattttgttggcagagtaaatgaatatatattaaataaagataaaaaaatttggcttaccgatgaaaaaaatattgaaagaatttacaatgatgagaaattagaagatagatttctaaatgatactaggagtgctacaaaaatagtcgcaaactatcttgaacactatttatttccaaaacaaaatgaacatggtaaaggtgaagtaaataataatgtaataagggttactggtaaagcaataagtgaacttaaaaagctttggggaatacatgaagcacaacctacaaatgaagatggtaaaaaagatagaaatacaaactatcatcatacaatagatgctattgttatatcattattaaacaactcttcaaaaaaagctttaaatgattttttcaaacaaaaagaagataaattcaaaacaaaagctattttagaaaatcttaaaaatagattccctatttcaaaaaatggaaaatctctatttgaatttgtaaaagataaagtagaaaaatatgaaaaaaatgaattatatgtttgtccttttatgaaaaaaagagaaaatattagaggttttaaagatgggaatataaaacttatttgggatgaagaagtaaataactttgtacaaatagataaaatagaaattagtaaaaatttacttttaaatgactttggtagagatttaaaagatgaagaaattaaaaaagagtttgaaaaaataaaagataagctaaatcttccaaaacaaaataatataaaaatagctttagaagagtatgaaaaaagacttctagaaataagagcaaatataaataatataaataaagagataaaacaagagcaaagtaaacttccaagagataaaaaagctattgaaacagtagagatactagagctaaaacaaaaaattgaaaaactaaaacaaactcaaaaagagcttgtaaaagagttagaaattccttgttattttcttacaaaagatggcaaaaaacaaatagttagaaacttgagtctaaaatcaaattctgtaacaaaagctgatagcataataattacagataaaaaacagaaaaatagagtacaaagattaacaaaagaagtttatgaaaatttaaaatcttctaaaataccatttgtagtaaaactaaacgataatacttttagtgtagatttatataatacttcaaaaggacaattaatagggctaaactacttttcatctattaaaaatgatattgaaccaaaaatagatgaaaagaaaaaagacttaataacagattttgaagataaaatcactatctcaaaaaataatattttagagattattgacctaaagaatagtaaaaaagagtattttgtatttaatggtggaggtaatatttctgctggaaataataaaatagaattaaaatctattaataaaaaagaagataaaagattatttattacattaaataataatataattgttaaattaataaaaataaatttctttggggagattttttatgaaggttttaagaaaaactaagataatatttttctatatcaaatggggatttgatagtctgattaaaacaagggtcgatttagacccgcaaaaattttataaactcttttttaggagtttataaaatgtcttaccaaaaactctatataaaaaataaatcctatcttagctatgcaaataatctcataaaaataaaaaccgaagaaaatgaaaatacagtatgttttgatgatatagacactattttaatagaaaattatcatactacaataagtacagctttactggctcaattatcaaaagcagatataaatgttatattttgtgatgaaaagtttatgccaagttctattttattaggaataaataaaaatagtagaactacaaaagttcaaaaatcccaagttcttttaaataaagtaaaattaaatcaaatttggcaaaaaatagtctactcaaaagttgaaaaccaatcaaatattttaaaaatatttaacataaaagagaactatcttgacagtttacttccaagagtaaaatcaaatgataaagaacatatagaagctactgcagcagcttattattttaaagagttatttgataaagactttacaagaaatagtttgactgatgagagaaattctgctctaaattttggatatacagtaattagaagttcaatttgtagatatttgatagcttatggtttaaatcctagttttggaatacaccatagtagtgagttaaatgcttttaatctagcagatgatttgatagaaccttttcgaccaatagtagatttatatgtaaaaagaaatataaaaaaagatacagaactttcaagtagcataaaaatagaacttttaaaagtattagatgaaattgtgatatatgataattaaagagttcaagtatcatattgtatgaaacaaatagttgcaaactatcaaagtatatgtttggaaaaaagtgaagagttaaaactttttagattgtaatgaaacaaaatcataaacaaacttacaaagaaaactctaaagaaataagtaggtatagaaaaatggtactttttgcaatgttcgatatgccaacagatacaaaaggtgatataaaaaaatatacaaaatttaggaaaaaacttattgagatggggtttataatgtttcaattttctatttatgtgagattttgtaacagtttggaaaatgcacagaaatatgagagaaaaataaaagaacatgcaccaacaaaaggttcaataagagtattaaaagttacagaagctcaatataaaaatatgattgttatagaaaactatagagaaaatcctgaaaaaaaaatagaaaaacagacacaaactgtactaattttctgattaaaaaactatctaaaagccttaaattgaaggttataagctactctattatatcaaatggggatttgagagtagattaaaacacagcgaaaaaggtgatttaacatctaattattatatcaaatggggatttgagagtagattaaaaccgcctaaagctgatacttcttcaacatttaattatatcaaatggggatttgagagtagattaaaactaacatattcagtgttaacatatgaattaattatatcaaatggggatttgagagtagattaaaacttgtatcttgtagcagtttcgtattgccatattatatcaaatggggatttgagagtagattaaaacgttgtgctatttcatcatctgttctaaagtattatatcaaatggggatttgagagtagattaaaactaagatttaaagtaaaaggaagtggtatagattatatcaaatggggatttgagagtagattaaaactagagtatttacaacctaattctaaattttattatatcaaatggggatttgagagtagattaaaacgctattgcacttgtattgttattgccttgcattatatcaaatggggatttgagagtagattaaaaccaaatcctgaggcaaattattataatgtatattatatcaaatggggatttgagagtagattaaaactagcatttgagagtttaaacgacacagtaaattatatcaaatggggatttgagagtagattaaaaccaacaattttatttcttgaaatatggtagtattatatcaaatggggatttgagagtagattaaaacgctcaatggcaaacagaagcaacggctaatattatatcaaatggggatttgagagtagattaaaactgaggtacgcgtacgatgacattagaagaattatatcaaatggggatttgagagtagattaaaactaataactgcattttctaattgatccataattatatcaaatggggatttgagagtagattaaaaccgatagctatttttaaatcatcagctggttattatatcaaatggggatttgagagtagattaaaactcgccgtcattcctgctcttgctttttctattatatcaaatggggatttgagagtagattaaaactgcatttttactaaatcaattttgctatctattatatcaaatggggatttgagagtagattaaaacctaattctttaatagctgtactttctcctgattatatcaaatggggatttgagagtagattaaaatctgcatctgatttatcaggacttcttccaaattatatcaaatggggatttgagagtagattaaaattaaatctataagataacctattagccttgaattatatcaaatggggatttgagagtagattaaaacacactatttcgcaactacttagaaaagcaattatatcaaatagggatttgagagtagattaactcattaattttatttcataattagtttagtcaatcaaccaattccctcattaatacttttaagatattttataaactttttctgttcttatttgcttaagccaatacctgcattctcacaccaaaagaatccaatactttttttattgtttcaaatttaggttttgtacctttttgaaatgttttatataaactctctctacctagtccagtatcttttgctaattggctcataccttttgctttagcaatatttcctaaagcttctaataattcatctgtatttccatcatttaatatttgagataaatattctgctattacttctttatcatcaaggtattgtgctatatcaaaatttgtaatttctaatttactcattatctagctcctttaaaatttcatttgctttttttatatcatcactttgtgttgatttatctccaccaattaataaaacaataatctcttcatcttttttagtatagtaaactctataagctgtacttgttgtaattcttagttcagatatattattacctacagatttacaatctccaaagttaccaagtttcattctatcaattcttcgtaatattgaaactttaccttgagtatcttttagttttaataaccattttgaaaaaatatttgtttgttttattatgtacatgctgaaattgtatcctaaaagatactatgtgtcaagagttaattttttacagaatcaacctaaataacaataaagatattgtaaagatgaggctcaatatttaacggtaatgataacggtactattcgatttatagccctaaatatcgaacttatgtaaaaattttaaagtccgactagcggtaccacttctaattaatctaaaataggtctatacctacattaagataaataccaattaaacttttttatctttattttttaattctccaagagttacttctaaaagacttttttggattgtttgttttgattcatcccaagtatcatgaagttcacatttatttttttgattgcaaaccccaccacccaaaacacactgcttaaaactttcatcttctaaagcaacaagtatatcttttaatttaatctcttctttgggttttgaaagtttaaatcctccatatcttccttggattgctaaaatcaattctttttttgaaagattagtcataactttagagagatatttatatggtatttcaagaatttttgaaagttcttttacagaataaagctttgaattatcttctgccatatacatcaaaactttaatagcatactgtgaagtagtagaaagtatcataagtatccatttttccttgaaatttctttgattttatcagataaaaatttaaacatagataaatactacttttaagtagtatttaaaagataaaagtttattatttcacaaatactacttataagtagaatttaaaggagaaaaaatgagtctatctctaatggagaaagttatgagtaaaaagagtctatatgcctctttctggatcgtttctatttttatggtaacgatattaatttattttactgcaaatcttgcaaaagaagtaccacctcttcctaaacaagtagtttcagtagagggtgaaatactatacacttatgatgatatagtaaatggtaaagcaatgtttcaacaatttgaccttatggattatggttcacttctaggaatgggagcatatttgggtccagattttactactgaatttttacataaaagagcagaatttttaaataattattatgcaaatgaaatttatggaacaaatttcacatcacttgatgatatgaaaaaagcttcaataaaagctagagtaattcaagatgtaaaaaaacaaacttctttaaaagaagaaggtgtatcttatacaaaagcttctgctttagcatataaagcaaacaaagaatatttaattaattttttaacaaaaggtgatgaaaaaagagcatggagaggcaatattataagaacagatgaagctgctcttattgctgcattttttgactggtcgcagcttgtttcttcaagtgttagaccaacagcacatgatggaagaagttggtcaaacaactggccaccagaacctttaatagaccaagatgtgacatttacaagccatttagtttcacttattgaatttttattactttgggctttaactattgttatagttttcatggcatatgaatatatctttaataaagaacaccaagatggtgaattatcagaaccacttaaaattacaaaaatttttccttcacaagaaaagttacttaaatatattccaattgtagcactttttgtacttattcaaatggttttaggtggttatttagctcacatttatgcagatccaactgatcatttcattatatctcaagatattttaccttttaatgtaacaagagctttacacacaaatatagcaattatctgggtagcaatcggttggcttgttggaggattgttaatcgctccaattgttgctgggaaagatttaagatttccaagacttgttgatttactttggacagcactaattgttgttggtgttggtggacttgttggtatttatatgggtgcacaaggatatatgagagatacttggttttggcttggaaatgaaggtagagaacttttaaatcttgccagagtttgggatattggattagttataggtttagttctttggtttggtatggtttatagcactatacgaaatgcaaaaggaaacaaacttcttataggaacaattatttggtcagcttttggtattgcaactctttatctagcaggtatgtatccattacacaaaattgcacctaattatactgtagatgattattatagatggtgggttgttcatctttgggttgaattaacatttgaactttttgctgctggggttattgcatatctttcagttgcgcttggacttgtaagagaaaaaacagcagaaaaagttatgttattagaacttggtcttattatgtttagtggaacattaggtgtaggacatcactactggtggcaaggtcttgatgaatattggatagcaattggtgggattttttctgcattagaaccacttcctttagctttacttatgattgaagcaataaaagagcaaaatcatattaaatcagaaggaaaaaattttgattttggaataccatttatgtggcttgcagggagtgcctttttaaactggtttggagcaggattcttaggaatggttataaatactccaacaattagttattactcacatggaacatatttaattatgcctcatgcacacgttgcacttctaggagcttttggatatatttctattgcttttatttatatgactgcaagaacaaactctcttgcaaaaggattagaatggaatgaaactatgagtaaatgggctttttggcttataacaattggagttatagtttacgtacttcctactatgataatcggtatagaacaaacttctactgctcatacatttggttattttgcagctagaagtagagaacttcttgaagatatgagtggatggatgtggtttagaatcttacctgatagtatgatgatattaggatcgctattattatttatagatacttttaaaaaagtttatttagcaagaaaaatcacaaaataaacagtaatacaaaggataatatcctttgtatttatttaaaaacttttattatttcatccaaatctttttctatttcatcctcacttataccattttgcatagcattttctttaacatcaccttgtgatattttttctatagttccattagctaaaagcttataaacaaaatatctgttttgtttattgtcatttaatccaaaagaattaataaaacttccattagaatcagttattaaaggtattttagagtctttatacatcttttctaattcatcattaactgcaatttttttaactaaccaaggagcttcagatatatttgcaactaaaacgatattatttttatcaacttttttgtataaatccttaaatacaatcaaagaatcatgatttaaaactacaatatatttttcttctccaagcttaaacaatgtatcaatttttgaataagtacaaaaagtgctacaattggaatatatttaagtaacttttcttgtgaaggaaaaatttttgtaattttaagtggttctgataattcaccatcttggtgttctttattaaagatata

SEQ ID NO: 4262 - DNA, 20053 bp, synthetic construct
  source 1..20053: mol_type = other DNA
  misc_feature 1..20053: note = Synthetic
ataaattaagagtttaatatttgtttttcaaattcttaatataaaaaataaaatttaattttttaaagctaaactacatccagcactaataaagataccaccggtgattctatttaagtatcttcccacaaaagagttttttataaagttagttgctttatctcttgcaatagcatatagtatcatagatataaatcctaaagttatagtcattagtgtatattgagagagtgatgttccctcttttgatataaactgaggaaatagtgcagtaaaaaagattatcgcttttggattttcaattgctattaaaaaagcttgactaaatagactaaaaactgaactattattattgtgaaagctattgattatacaattttttagtcaaaatattttaagatatttacaaaatatgtcaaatgggaagataaatgccaaaaatagttaattttgacgagaaaatcgattttatatgtgaaaaagcatacgatgaatttataaaaaatggagtaaacaatttctctttaaataaatttattgaatctttaaatatgtcaaaggggcaattttattattatttcaaaacaaaagaggaattgatatttgaggtaattaataaaaaaagtgaaaaattttttatcgagatggagaaaaaaatagaggaagcaaatactttttataaaaaattactagctcttttttccatttatttagatctatccgctcctgaaaatatcccttttgacaaactaatgaaagatactttttatatgtatctaaatgtagaaaacaaatttataaaacaaaaaaatgcagagtgttatgattatctatttagtgttacaaatgggatatttgacgatatgattgccaaaaaagttttgaaaaaaagtgccaaaaagtttatccctagtttaattgcaacagctgatggaatgtatctacaatctatgattttagaaaattatgatttaaaaaagaatctaatggagtatattaaaatattagatggtttattaaaaaaatagcttttaagatatctttttgggatttaaagaaaatagatttactctattttctcatttccaccaaaagaggtatataaacttactctatttatcaattcatttagttttgtatctattaaagccctttttgaatcaaaaaactttttttgtgaaattaatacatttaaatagtttcctaatccatacttataagagtttaaagatacctcataacttttttttgccgtatttactaaatctttttgtgccttgagctgttttgttatatttgctctttcactcaatgcatcggatacatctttaaatgcagactgtatggttttttcatattgggcaagagctattttttgttgagcatttgcataatctaaatttgccatattttcacctcctttaaatataggtaaattaatacttggtataaaagaccacacagtatgagaatttccattaaataatgaactcaaagaattacttgcaagaccataatctgctgttaaactaattgaagggaaaaatgcagctcttgcaacacctatatttgcattttttgcttttaaattgtattcagcttgaataatatcagggcgtgaaaataaaacttttgatgaaattccagcttgaattagcataagacttttttcattttcttcaaaaccacttggtattaaatttttaggaattgttgttgatattaataattctaaagtattcttatttttttctataattgttttctgatttaaaagagttacttctgcttcttttaaacttgtttttgcactaagaacatcatcaattaatgtaatacccatatcaaattttttttgtgttaattcatatgataaagttaaattctcaatacttttttctaatattttcaactgttcaatatttgcacaaagagtattccaactattaataacttcagagattaaactaatttttgtcgctgttgttgcatattttgtagctaaataactttgtaatgcaaaatcatttgaatttcttatctttccaaataaatcaagctcataagaagctccaaattttgaagagtatgtacgagaaatttctgtattattagatgtaatatctcttgagtttgtactattagcttttgcttcaatagaaggaaaatactttgatttttctattctatatgtagctcttgctgcttctatatttaaaattgctatttttaaatctctattattttcaagagctattttaatcaatttttttaatttatcattttttacaaaatcttcccattttggttggatatattctactttactatttttatctactacatttttaaatttagatggaattacagagttgttatatacaagttctggttttaaactacatcctgtcaatataagaatatttattaaaataaataaaaatttaaacattttttgtacctttttggtctttttgactaaatactttttttaccaagatgaataaaagaggaacataaaatatcgctaaaactgttgctgttagtgtaccaccaatgattcctgtacctattgaaattctactatttgctcctgctcctgttgaaattgctaaaggaataataccagcaataaaagctaatgaagtcataattattggtctaaatctcagtgttgctccttcaactactgcaactgttaatgattcaccttttttataagcattttcaacaaactcaactattaatattgcattttttgaaaccaatccaatggttgtcaaaagtgcaacttgaaaatatatatcattgtttaatcctctaaagtagactgcaataacagctccaataacccctaatggtacagctaataaaacagaaaaagggatactccaactctcatataaagcagctaaacataaaaatatcacaactaaagataatgcgtataaatatacagcttgtccacttgataatctttcatgataagataatccactccatgagtatttagtgtctttattattaagttttgctaatctttccatctcatccattgcaactccagaacttacacccgtagcagtttctccttgaattaaataagaggctaaaccattatatcgtgtcaatgatttctcagctgttttccaagagatatcagtaaactcttcaaaagagaccattttattttgattatttctaacattccattgatataaatcttcaggtttagatcggtattgtgcatcagcttgtacatacactttttttatccttgatttatcaataaaatcattaacataagaacccgcccaagctgtgtttaatgtatcatcaatatcatcatatgataagcccaaagaaaatatttttttcttatcataattaagttttaattgtggtgtttcttccgtaccttcaactcttccatttgctattaattcatttgaatttactttttctaataaagaatcttttgccacaactaaatcatctcttgtcattttagcaccagcttgtaattgaaattcaaatccatctgtattacctaagcctggaacagaagatgggttcattacaaatacttgtgcatctcttataaaatattttgatgtattatctgtaaaattcatcattgctctattggcaatagaatctgcactattttcaataccagctctttgatcccaatttttcaattcaacaaatcctaatcctccattttgtccatttcctgaaaatgtaaaaccaacaattgaaaaaatagaatttatattacttttctcttctgttaaaaaataatctcttattattttttcaatattttcagaacgtgttgcacttgcaccagctggaagggtaaattgaatcatcaaatcaccttgatcttcaggcggtataaatcccgtaggtaattttataaaaaataaaatactaacagctattattaccatataagcaacaagtgatttaaaaggagcattgataaatttaaaaactcctgatttgtatttttttgttaaattactaaattttatattaaaccaatcaagtacatcattgctttttttattcgtattatgaggttttaaaaatgtagcacaaatagcaggtgataatgtcaaggctacaacaacagataaaaccattgaagatataattgtaactgcaaattgtttatatataattccagtagaaccagtaaaaaatatcattggtaaaaacactacagaaagtacagttgcaactccaattaaagcactagtgatctcctgcattgctataattgtggcttcttttgcgcaaagttttttttctctcatatttctttctacattttcaacaacaacaatagcatcatcaaccaataagcctatggataataccatagcaaacatagttaaagagtttattgtaaatcctaaaaaatttaaaatagcaaaggtaccaagcaatacaactggtacggcaatagcagggatgatagtggctcgccaattattaagaaaaacaaacattacaacaactactaaaaatatggcttcaaatagtgtttttacaacttcttttatagactcttcaataaaaatagttgtatcatatggatatgaaactacgtatccacttggcaaagagttttcaaatgatgataaatattctctaactctttttgctacatctacagcatttgccccagcagataattttacacctataccacttgcttgataaccattattttttgatataaaagagtaatcattactacctaattcaacttttgcaacatcttttaaaaaaacatctgcaccatttttattgctttttaccacaatattttcaaactcttttacatttttcaacttatctcttgatacaacatctgcatttaactcttgatcttttacttgtggtcttgatccaatacttcctgcagatacttgtgtattttgctttaagattgcattatttatatctgatggtattagattataagatttgagttttttgggatctatccaaactctcattgcatattctgaaccaaaaagttcaactccaccaacaccatctattcgagaaagtccatcttttatattggtgattagataatctgaaatatcactttcatctgatttacctgattcatcgtgcatactaactatcataagaaaatcatcttgtgattttacaacagtaactccttcttttctaacatcttctggaagtcttggtaatacttgttgaatcttattatttactttaacttgagcaatatctggatctacaccctttttaaatacaacatttatacttgaacttcctgtttggctggttgaagaaaaatataataatccatctaatccagttaactcttgttctataagttgtgtgatactattttcaatagttttagctgttgcaccagagtatgttgcttgaatgttaattgtgggaggagcaatatctggatactgctctacaggtaaattcttaatagaaagtattcctactaacattataagtaacgatataacccaagcaaaaattggatgattaataaaaaaacgagctatcatttcacttctttttttgaattatctacatataagttattaacatttttaggaataactatgctgtttttatttattttatttaaaccttcaacgataattttatctgtttgtaaaagaccatctgtcacaagccatttatttcctactgctttttctactgttattatttttttctggatagtgttatctttttcaataattgtaaccatataatttgattttccatctaaaactacagcttgttgaggaactaaaaaggcattagaataagtaccaatatctattatggtatttacaaacatattgtccaataattccccttcaggatttgaaaactctgctcttagcgttacatatccagtatcttcatctactgaaatttcttgaagtttaagtatccctaaatgtgcatatattgaattatctggcaatataatatttacaggtatattctgttttttattgttattttttgttatcttttttaatttaaataattgattatttgactgacttaaatcagcatatactctacttgtatctctaattgtagttaactcatttgtttgatttgctaaaactaaagatccaatcgtataatttgatattccaataaaaccagagatttgtgcttttatttttgttctatcaagatttatttttgcactttttagtaaagctttattttgttcaactaaagcagctgcctgcaaatatgcagcatttgcatcgtctacatcttgttgtgatactacattaaattttactgatttttcatatctttgtttttttagttttagtgttattaaatttgcttctgaactttttaatgttgctaaagcttcattataagtagctaaataagagtctgaatcaatctcatataaaatatcacctttatttacataagttccctctttaaaaagttgtttttttataataccatcaatttgtggtctaacttcagatttgtaaatagctttgattcttcctgacaactcttgttgtaaaggaacttcttgtttctttaatgttatgtatccaacttcagttttttgttcttcttctgaaaagttattatctttttgattttcacatcccaataaaaaaattgtaatgaacaataagaataaactttttaagcaaaatttcattaattaacctttacaatacatacgtatgtatttaatggcatgaatactatttaaagtagtcttaatttttaattaaataatatgaaatgaaaaaaggaagcgtttgggtacaaaaaataaaatagataaaaataatttaataagtattattgaagatattattttagctgaaggtatttctggtttaagtattagaaaagtagccgctaaagcaaatatttcaatagggggagttcaatatatttttggaaataaagaggccatgataaaagcagtttttgaaaagaatgatgatgattataataagcaaataaaaaacttatcaaaaagtgatgactcaaaatattctgaattaaaaactcatattgaatatatttcaaaatacaatagtactaaagaacttcataaaatatctaaagttattactattcttttacaagataaatctgtttttgatggactacatgagtggcatggtagtgctttaaaatcaattgatacaaacacagatgaaggaaaaaaattaagattggcttttttattttctgaagcaatgtttacagcaatgaatttaaactacgttaagctatcagataaagaacaaaaagaggttttcgaagatttaaaaacttttttactataaaaatactttagttttatttttataatattttatcttaattcacacatcttttttaagcaatttttttggactaaactttctaaacagtataattgcaattacaaaagtaaatgcttctgccaaaggaatggccataaatattccattatcaccaaatacaaaaggtaaaataagaatgaaaagcactggaaaaataagacttcgagaaagtgctataagcattgaagccaaaggtttatgcattgctgttaaatatgctgaaatgaccaagtttctaccattaaaaagaaatgccacccatataaaaagagtaaagtttaaaacaatttgttttgtatcaagattgttgtcttctaaaaagatattggctaaggtttcaggtaaaaacagcaacagggctatcataacaactcccactaaacttgtagacctaaacgccaattttaaaaactcatctattcttgtatatttttttgcaccataatttttgctgataatgggttgcaaagagtcactgataccaaaactgatcatgataccaatcattaaaagataattaataaccgtaaatgcagcaataccttctatgtcaaaattttgtatcatcacatagttaaaaatcaaagtggttatgcctactgagatttcattgacaaactctgatgttccgttgtaacacgctttgatgatttgaatgtaattccctgcaggttttacaaatttcaaagttgctctttttgaaaaaaaatggggtaaaagaatgattagtaaagccatctgtgaaagaccagttgctaatgctgcaccaaaaatacctttttgtaaatatacaatcataaaccaatctaaaataacattgataagagcacttaaaagtaaagctataaaggcaagatttggtctattgtcaactcttacaaaatagtcaaagactacacctatcattaaaaaaggaataaatatcaacataactgataaatactctatagcaataggtgtcaaatctttattagcacccaatagatgcaatagggtttcgatatttaaatataaaacagcgcaagttaaaaaactaaaaagagagatacttataatggttttactaaaaaccaccgaagcattgtaaagcttaccttcaccaataaatttgcccgacacaacactgctacccacagataacatcaaagcaaatccaaataaaaaagagaaaacaggaaaacttatattgattgaagcaagtccacgatcaccgacataatttcctataaaaaaaccatccacaatacttgcagatgaaatggccaacattcccaacactgaaggtatggaatattgaaaaaaaatagatgatattttagcttttgttacgttcatatatattctttaattttgtagtttgtttagttttttaaatcataatccaagtgattgtaaaagtatcctctttgtagtcatatgttagtatataaacaaattttttaaaatcaacacaaaatagctttatttttaaaccagtagtttaattctatcagaaaaaaacttttttataataaactggtagtttatttaaactttacttttaagtttaatggtttgtttatatttgattttagtaatatttttattgagaaatagactctaaaaaaaagagtctacttagtacacttattacatcttgcatctaagctgtatctgcctgcacccataaacattatagaaatagaagttaacaaataaagtaaaggcaattcgattgctggaccacctgtatcttccaatacaaatatatctgaactatgtgctaaaaatattgcaaaaaccattgttagtgcaaaaaataatgatgaaattcttgtaaataaaccaataattatcaaaattggaaaaacaatttctccaaaatatatcccataagctataaattcaggaagtcctgcttgtgtaactaaatacttaattccatctattccattaaaaagtttaaaaaacccatgaaataacataatccctgcaatacttaatcttaagattaatttaccaatatcttcatttaaaacacaagctaatctattttcacaacttgtcacaatctatccttcttcaaattttttggaattataatttttaaatgtttagtaattgttaaatgataacatttttagacagaatttgaagatttattttaagattattgatttttggcagtggatgatatattttcaataaaaacttgtgttttaacaaataaaaattaagtgtaatttaataatatttcaattataattttaaccctttaaaagtaaatatttttttaaagttttagtaatagaggttcatttttgaatttttataactgctattttgaatttgagttatctcaatttctttattatgcgggagtagctcagttggctagagcttctgccttccaagcagattgtcgcgagttcgagtctcgtctcccgctccatttaaaaagccctatgaaagagaattttattttttttcatagggctttttttattttaccctccacatctaaatataagaaagaactaataattttcatttataaagaaataaaaagataatataataaataactaattataaggtttaaaatgaaaaaagttttaggtttagatattggtacaaatagtataggtttttcattaaatgaaatagaaataaaaaatgaacaaacaatttttaatgagttaacttcaaatagtattatttttagtgaatatattaaagcagaagatagaagaaaatttagaagtggtcgaagaagaaatgaaagaaatagcagaagaaaacaaatagttagaaaactcctttttgattttaatcttgcaaataatataataattacacaaccaataaaatacttcaataaactatcacaaaagcaaaatccatatatattaagagaattagctgtaaatggcaaaagtctttcaaaagatgagtttacatttgctctttatacaattatttcaagaagaggttattcaaatcaatttaaaacagaagaatcaaaagatgatggtgctataacagaaccaattaaaaaaaataaaacaatttatttagaaaacaaattaactataccatctttagttttattaaacaaaaaaatagaacttgaaaaagatgcatttataaatgtagcaattagaaataaaaaagatgattatactaactcaataggtagagaactttggaaagaagagttagaaaagttattacatagccaaaaaaacaatattgagctttttgaaaacagtgaaaaatatgaaacttttaaaaacaagcttttatatggagtaaatgaaaactctttaggacaatttgaacaaagacctttaaagagtatggaagatatggtgggatattgtagtttttacaatctttatcatcaaaactcgcaaaaaagagttgctaaatcccacatttcaagtatagaatttacacttagacaaagaatagaaaattctattttaggaaatctaatttttaatgataaaacgggagaaatgtttacaccatcaaaagaagagatagaaaatacaatagaactttggctaaaaaaaccaccgacacaaacaattaatacaaaaaatgtatttgataaagcaggacttaaaaatataaaaataaaaacaacagataaacaagatgacactatcttagatataaaactgcatactcaacttttagaaatatttaaaactgtaaacatagatatatttgaaaaacacagagatttatatacaaaaattttagaaaaaatccattattttgtaaataaagaccaaatagtaaaagagattaaaaaagcagacattcaaaatattttaagtgatgaaactattgaaagattatcaaaagttgataaagggactaaagaatcttattcatcattttcacttctttttatagatgaaattttacaaaaattaagagatggaaaaacctatcaagacagtttaacccaacttggatattttagaaaatatttggacataacaccttatgattatcttccaccactaaatccatcaaaagaagatataaaatggcttgaaaaaaatataaaaaattttaaagtagaacatctgttttatcaacctctagtttctccaaatgtaaaaagggttatctcaattttaagaagacttataaatgatttgataaaaaaatatggaaaaattgaccaaattattatagaaacagcaagggaattaaactcaaaaacagaagaagataatataaaagaatctcaagcaaatagtagaaaagagataaaagaggctgaaaaattactagaagccaataaatatgaagttacaaataaaaatattgaacgagcaagactatttattgaacaaaaagcaagatgtctttatagtggaaattctatgactttagaagaggctttagatgaaagccaaacagaggtagaacactttatcccacgaagtaagatttggataaatttatataagaataaaatcttagtttttaaaaaatataatcaaaataaaagtgataagcatcctataacgtatctaaaatcaaaaaatgcttgggaagattttcagcatagagtaaatgaaaatttatcaaataagagtaaaatcaattggttaacaaatgaagataatataaataatatttggaacaatgaaaagcttgaagatagatttttaaatgacactagaagtgctacaaaaatcatagcaaactatttggagcattatctctatccaaaacaaaatgagcatggaaaaggtgaaacaaacgataaattaataagagtaacagggaaagctataaatgaactaaaaagactttggggcgtaaataaagttcaaccaaaaaatgaagatgataaaaaagacagaactacaaactatcatcatactatagatgctattgttatttcacttttaaactcttctgctaaaaaagcgttaaatgatttttttaaacaaaatgaaaatggctttaagacaaaagctattttagaaaatcttagcaccagatttccaaaaacaaaagagggtatctctttggttgattttgtaaaagaaaaagttaaaaaatatgaaaatgatgagttgtatatttgccctatgatgaaaaaaagagataatatcgtcggatttaaagatgggaatattaagctttattgggatgaagagaaaaaaatattttgccaaattgataaaaaacctatagataaaaatctactttttgaccaaaatggaaaagatgtaaatgatagtgaagtgaaaaaaagagtagatgacttaataaaatctttagatttaccaaaacaaaataatataaaagttgcgataataaactacaaagaaaaactacttaatacaagagaaaagataaaaagcttagaagaacaaatcaaagagttaaaaggcaatttacctaataaaaaagattacattgatactcctgaaactattgatattaaagaaaaaatgaaacttttaaccgatgaaaagcaaactcaaatagatatacaaaatgaaccttgttttttcttaacgaacaaaggacaaaaacaaattataagaaatatcaaaataaaaacgaaagaggcttcaaaagtagatagtatcattattacagataaaactcaaacttccagagttaaaaggcttacaaaagatatttatgaaaagttaaaatcaactcaaactccttttgtagcaaaattaaacgatacaactttaaatgtggatttatataatacacaaaaagggcaagtgataggactaaactatttttcatctattaaaaatgatatttctccaaaaatatatgaaaccaagatttctttaataaaagattttgaagataaaatcactatttctaaaggtgatttattagagattgaaaatcttaaagagaatagaaaaaaatattatgtttttaatggtggaggaaatatttcaagtgggaaaaatcaaattgaattaaaatctataaataaaaaagatgaaaaaagattatttattacattaaataaagatactattgcaaaaaaagtgtttataaattatcaaggggatatttcctatgaagagtttaagaaataatattataaaatttttccatatcaaatggggatttgatagtctgattaaaacaagggacgatttagtcccgcaaaaattttataaactctctttagggagtttataaaatgtctcttcaaaaattatacatcaaaaacaaatcatatcttagctacaaacacaatctaatctctgtaaaaatagatgactatgaaactactgtttgctttgatgatattgataccataatcatagaaaatcaacaaagcactataacctctgctcttttatcccaactttctaaagccgatatcaatgtaatcttttgtgatgaaaagtttatgccaagttctattttacttggaattaataaaaacagtcgtacaactaaaatacaaaaagctcaaatagaggtatccaaaccaaagttaaatcagatttggaaaaatataattatacataaagtgagtaatcaatctaaagttttgaaaaaacttcataaaaacagtgattatttggattctttaattcctcgaataacatcaaatgataaagaaaatatagaagccacagctgcctcatactattttaaagagctgtttggaaaagagttttcaagaaatgatcctgaaaatataaacaatgctgttttaaattttggttatgccatttttagaagttctatttgtaggtatcttgtagcttatggtttaaatccagcttttgggatacatcacagcaatgagcttaatgcttttaatctagcagatgacttaatagaaccttttcgtcctattgtagatgattatgtggtaagaaatataaaaaaagagatggaactaaacagtaaaatcaaaattgatttattgaaactattagataaagcagttatgtatgatagtaaaaaggtaattgtttcaaactgtatgaaggcgatggtggcaaattatcagtcaatttgtttattaaaatgtgaagagttaactttatttgaattatgactaatataaaagaaataagcaggtacagaaaaatggttttatttacaatgtttgatatgcccacaaatacaaaaaaagatataaaaaaatatacaaaatttcgtaaaaaacttttggaaatgggatttattatgttccagtattctatttatataagattttgtagaagtttggttatagcacaaaaatatgagaaaaaaatagaattggtagcacctgtgggtggttctataagggttgtaaaaattacagaagcacaatataaaaatatgctagttattgaaaattatcgagaaaaaccagaaaaaaaattactaaaacaaacacaagcagtgcttgttttttagtaataaaaatgccataaaagcctaaaatacagtgttctaagctactctattatatcaaatggggatttgagagtagattaaaacttgtaaacacatcatagaagataacatcgtattatatcaaatggggatttgagagtagattaaaacagagatagttattatgcaaaatcagaaaaaattatatcaaatggggatttgagagtagattaaaaccccgtttgagcaattgcaataggtaaaacaattatatcaaatggggatttgagagtagattaaaacaactttttacaaaaataaattaaaaaaataattatatcaaatggggatttgagagtagattaaaactagttggaagcgttacttattgggtggctaattatatcaaatggggatttgagagtagattaaaactaagaagtggcatgtctataccaaaagctgattatatcaaatggggatttgagagtagattaaaacccaataaaaggaagatacctaacaagtgatattatatcaaatggggatttgagagtagattaaaacactgctattgttggggaaaatggagctgggattatatcaaatggggatttgagagtagattaaaactcagctgtaatctgaaactcatcttttgtaattatatcaaatggggatttgagagtagattaaaacaggtatttgcttcatatgctgacattacttattatatcaaatggggatttgagagtagattaaaactatactttgggagtttcacaaagttcaccaattatatcaaatggggatttgagagtagattaaaacatttcattttgttttttccacatcataaaaattatatcaaatggggatttgagagtagattaaaacctaatcaaaattttttagctgggggaaataattatatcaaatggggatttgagagtagattaaaacaaaagtgaaatcaaaaatcaaggtggtgatattatatcaaatggggatttgagagtagattaaaactacaaatttttcttcatcaactaaataaaattatatcaaatggggatttgagagtagattaaaaccatgacagcacttatcatcaatacaggtggattatatcaaatggggatttgagagtagattaaaacaatatggaggtaatcaataatgagtggagcattatatcaaatggggatttgagagtagattaaaactctcttttattttctttaatatttaatcccattatatcaaatggggatttgagagtagattaaaacaggggtgacattttaaaaactttatttaatattatatcaaatggggatttgagagtagattaaaacggtaatgataatgttgatgctctttatacaattatatcaaatggggatttgagagtagattaaaaccttaacagcagtaacacgagttaatatttattatatcaaatggggatttgagagtagattaaaactgttgttattttcatcacccccataaaatgattatatcaaatggggatttgagagtagattaaaactaagccttgcctacccaataagtaacacttattatatcaaatggggatttgagagtagattaaaacaaacaaagatagaaaagaaatagcaaaaatattatatcaaatggggatttgagagtagattaaaacgatttgatttttcttaagtcatcatcattgattatatcaaatggggatttgagagtagattaaaactagttttaggaaacaacctttcaatcatttattatatcaaatggggatttgagagtagattaaaactggtactgctattacaagagttgcaaacttattatatcaaatggggatttgagagtagattaaaacctctgcattatagaaacaaagctcttttaattatatcaaatggggatttgagagtagattaaaacaaaggcaagaagtagagcatacagtaagtgattatatcaaatggggatttgagagtagattaaaacattgaccatttatcataaacccaatttaacgattatatcaaatggggatttgagagtagattaaaactcatatttactttatctttacttaatcgttattatatcaaatggggatttgagagtagattaaaacaccatttattattaaaaataagttcgctcaattatatcaaatggggatttgagagtagattaaaactaataccttttttagaatctcaaagaaaaaattatatcaaatggggatttgagagtagattaaaacacacgtccaagttaaaatcaatatttgtgattatatcaaatggggatttgagagtagattaaaacattgattatatattgcctgttaagaaaaaaattatatcaaatggggatttgagagtagattaaaacgagcaaatgatgcaaaagctgctggacaaaattatatcaaatggggatttgagagtagattaaaacactaatttaaaaaaagaagataagatacaaattatatcaaatggggatttgagagtagattaaaacacatatgcttttatcattttaaacctcttcattatatcaaatggggatttgagagtagattaaaacgagtaatggactttacatatgcagaaccagattatatcaaatggggatttgagagtagattaaaacaattaacagaatgtgacttcgccatatacgattatatcaaatggggatttgagagtagattaaaaccaagcctggcaacgatactcaaagaaagttattatatcaaatggggatttgagagtagattaaaaccattactgtatcatcgtctttatctaaaacattatatcaaatggggatttgagagtagattaaaacaaatagcaccatctttaaactcatctacctattatatcaaatggggatttgagagtagattaaaaccctttttgctttttagtttcgggcttaataattatatcaaatggggatttgagagtagattaaaactataaggttaagcgtttaaatcaaataaagattatatcaaatggggatttgagagtagattaaaactatgagttctatatcttcttactctttcagattatatcaaatggggatttgagagtagattaaaacccgtaaagcaatttaaaatcgcaaaagactattatatcaaatggggatttgagagtagattaaaacccgacggaaacttctcctttagtgcagataattatatcaaatggggatttgagagtagattaaaaccaaaattttgcagaatatcttttctatttcattatatcaaatggggatttgagagtagattaaaacccgacggaaacttctcctttagtggcttcattatatcaaatggggatttgagagtagattaaaacgtgcataagtaacaactgtattagcgaattattatatcaaatggggatttgagagtagattaaaactagttaataaagcatctagtttgttacaggattatatcaaatggggatttgagagtagattaaaactgattgtgaagcagaagcttttaacatctattatatcaaatggggatttgagagtagattaaaactttatttattgttatcatatttattaaagtaaatttaattaatccataaaattattttgaataaaataataatatgcatgatattaattaattaaatagttattctcctttgaatagctattaaaggaattaatatgttcaaaaatataagtataaagatgaagttgatagcatctttttcaatggtttcaatatttgttgcattcttatctatttatagtgtgagtgggattagtgaatcttctgatggtttttcaaactatagagcaatggcgaaggatagtttgttagcaagtggtgttcaatcaaatatgttaatgttaagaatgaatgtcaaggattttttaaatacctcttctgatgtagatataaaagagtttaatgattattataaaaagacaagcgaattaataaaagttgctttaaaagagattgaaaatccaaaaagagcccctttagtaaaacagatagatgaaaacctaataaagtataaagaggattttgaaaagcttattaaattaactagaagtcaagataagttagttttatctgttttaacaagcactggaaaaaagatagaagtattattaaattcaataatggtaactgctgatattgatggaaaaaatgaagttgcaattgaaacagcatttgcaataagagcaattatctcaagtagattaagtgcaatggagtataaaaactcaaaaaatagtgaagatttaaaaaaagcaaataaagatttagatgatttgtctgagcaacttattgaaatcagagatataattacaaatgtatcaagaaaagataagcttttagaagctataaaattagttgaagaatacaaaaaaggtctaaaagatttagaaacaatatttttgcaaagagataaaactattgataagaccacttctttaggggaaaatattgctcaaatgactgaagatattaaagtatcaataaaagaagagcaagatagtattggtccaagagttgccaaattgaatagcaatcttatgaaagcctctttaactgtatcaataataattattttatgtgtaatcttttttgcaattgttatacctgttaatattgcaaaatcaataaaaagattaaatgatggtattttaaatcttttaaatagtaatgatgttagatcacgagtagaagttctttctaaagatgaattgggtgaagtatcaacaaactttaacaaatatttacaagctattgaagatggtttaaaacaagattctttggtaatagatgatgttaaaagagttgtaaatgaagtgaaaaatggaattctctctaaaaaagttgaacttgatactaaaaatgagtcattaaaagagttaaaaaatattttcaatcaaatgttagaacttttagcaaaaaaaatatctcctgatatgaatgagattcagcttggcttagataagttccaaaaacttgattttacctataggcttcctaaaattggtggtgaaactttaaatggattaaactctttatctgaaatcataaacgagatgctagtagagaataaatcaataggattaacactgcaagagagtgcagatatactattagagaatgtagaatcattaagtaactcaacaaatgaagcagcagcatcttt

SEQ ID NO: 4263 - DNA, 10080 bp, synthetic construct
  misc_feature 1..10080: note = Synthetic
  source 1..10080: mol_type = other DNA
catctatttttagatgtaaatagtgttaatttagatgattacaatattcaaaatgagataataacaaatttaaaaggtaaatttataaaaaatagacttcaatacaataataaatctataaaattatatgcaaaaaataaaaatatcttaccagctcaaaatagtgatattattattaaaaaagctcatctttcaaactatcaaggtaatattcaacttatcttatattcaaaagatgattatgaaatagttggtagccattgattattaaagcattttttaccaatagtataggaatacttacttcaagaatactaggctttataagagatttactaacagcatctattcttggagcaaatatatatagtgatatattttttgtggcatttaaactacccaatctttttagaactgtttttgctgagggtgcttttactcaagcttttataccagcatatgcaagagcttctaaaaaagctagattttctactataatatttattaactttttagggtttttactacttttatctatctttgtaacactttttgcatcacttattaccaagcttatagcaataggatttgatcaagatactatagatctagcagctcctcttgtagctattaacttttattatttgcctcttatttttatagttacttttatgggagctcttttacagtataaaaaccactttgcaacaacagccttttcaacagctttgttaaatatagctatgatagtagccctacttctagcaaaagatttagatcaatatgaaatagtttattatttaagttatggtgttatatgtggtgggatgctgcaagttattgttcatatcatagctctaaaaagaagacaacaacataaaaatataatcctttcatataaaaaactaaaaacctttacacataataaaacaaaagagttttatagtaagttttttcactctaccataggttcttcaactgctcaattatcagcttttattgatacttggttggcatcatttttagttagtggaagtattagttatttatactatgcaaatagactgtttcagcttcctttggctctttttgctatagctttatctgtagcactctttccttctatagctaaggaaatcaaaaaaaacaatacagatcgtgctttaaaacttcttaaaaaatcattttggatacttttggcacttcttggaatctcaactttaattggtatagcgttatcttatcaaatagtatggcttttatttgaaagaggagcttttagtagcgatgatactcaccatacatctcttgtattgatagcttatcttataggacttattccatttgggctaaataaaatcttttctttatggttatattctcatcaaaaacagctaattgcagctaagatttcggctaaatctttggtagctaatattatattttctcttatgctaatagtcccttttgaggcctttggactagctcttgcatcaactctaagtggctttattttactctatttaacactaaaagagtttggattaaaacttttttggcaaagaataatcaaaagttagataaaataccatatgaaagatttattaaaacaatatataccttattataaaaactatattagaaagtttatttatgcctttattggtatgactttagtagctcttggtactagtggaacagcatatgttattaagccagtacttgatgatatatttataaataaagatcttgatatgctctatcttctaccttggcttgtagtggctctttattttgccaaaggatttggtaagtatatacaagtttattatatctcatatataggacaagatatcataagaatagtaagagataagcttttagctcatattatctctttggatatatctttttttcactccaaacatggtggtgttttgataagtaggattacaaatgatataaaccgtatccaaaatgcaatatccaataatattgctgaactaataagagaatccctaacaattatagctttagtaggagttgtgatatatcaaagtcccaaactagctttttatgggcttgtagtcttacctttggctgcttatcctctttctattctagcaaaaaagatgaaaagactctctttttcatcacaagaaaagatagctgatattatgtctcatttaagtgagatttttaacaatatagagattattaaagcaaactctactcaaaaactagaagttgataaattttctaagctaaataaaaacttctttgacatcaatatgaaaggtgtaagaaccaacgaattaacctctcctcttatggagacacttggagctattgctgtagctgttgttattattgtaggtggacaagaagttattagtggtgagcttagcgtgggatcgtttttttcatttatgacggctttatttatgctctatacccctatcaaaaggatctcttcactttataactctatgcaagatgcagtagcagccaatgaaagagtaaatgagatcttagatattaaacatactatcaaagatggtactcttttgcttgatgaagatataaaatctataagctttgaaaatgtatctttaaaatatggcgataaagaagctcttaaaaatattaacttaatagcaaaaaagggtgaaaaaatagccctaataggtgatagtggtggtggcaaaagctcttttgtaaatcttattataaggttttatgatccatatagcggagaaataaagtttaataataccaatataaaagagtatgatatcaaaagtctaagggatcatatagctatagtaactcaaagaatatatattttcaacgatacaatagcaaacaatgtagcttatgggagtgaatttgatgaagatagagtaatagaagctttaaaactagcttatgcttacgattttgtatccaaaacacaagatggcatatatacaaccttagatgagtttggtaccaatctctcaggtggacaaagacaaagaatagctatagcaagggctttgtataaaaatcctcaaattattatatttgatgaggcaacttcagcacttgataatgaaagtgaatcaattataacagatgttattgatactattagcaaagaaaaaatagtttttgttatagctcatagactaagtaccataaaaactgctgattatttagctctttttaaagatggagaaatagtctcttttggtagtagtaaagagctacaaaataactctatagagtatcaaaagttacttcaaacctctttgtaaattttaattttttactttttaaatatttttttgctatactatataggatatttttacaatatccaaatcaaaccacactaaaatctaaggagttttatgtccccaacaagcttacaaatcattgccgcggttatctttgcacttgctattgtgcatgttttttctgttaaatattttgaaaatttagcaaacagaagtgaaaaacactctggactttttcatcttttgggtgaaattgaagttgtttttggtatctgggctatggttttagttttgtttatgtttattcttttaggtaaaaacgaaactatagagtatatgaatactagaagttatatagaaactatgttcgtctttgttattatggttatagctgcaactagacctattttgcaaacggttatatttttagtcaaaaaactatccaactctttaccacgtaaaggtgcaactggattttattttgttgttatgtgtattgttccaattcttggctcaatcatcacagaacctgctgctatgacactagctgcacttatactatctgataagcttttttctcaaggaatctcacaaaaactcaaatatatgaccttaggagctttatttatcaatgtctcaataggtggaactttgacaaactttgctgcaccccctattttgatggtagcaaatacttgggactggagtactagctttatgtttatgacatttggatggaaagctatgatagctatttttatcaatacaaatctaattattttgcttttttataaagaactatcatctatgaatattcgtacatctgtatcagaacgagaagagataccattttctatagtacttactcattttatatttttatttttagttgtattttttgggcactatcctgtgatatttatgaatatatttttactatttttgggtgttacttatgcatatcaacaatatcaagatagattgatgttaagagagggacttttggtttcatttttcttaggcggtttagtgatactaggcggacaacaagagtggtggctaaaagatctaatctcaagtatgtcaaatatagaggcttttgtaggtgctattacacttggagcttttacagataatgctgctattacatatctagcttcactagtagatggtttaagtgatgagtttaaatacttccttgttgctggtgctgttgctggtggtggcttgactgttatcgcaaatgctccaaatccagcaggtgttgctatacttaaaaatcactttgaagataacaccatagatcctagatatctatttttaggtgctttaatacctactattattgcagctttatgttttattattttataaataaactacaaataagtagaagagtaattatctcttctatttatataacgatataagaagcaatccacaccattaagtgttcacttattgattaatcaaaccaacgctacatcagaagattcaaaacagtatataaccttataagattgtaccatgtggagtttaaaaatgcaaattaactataatgaaagtaattattatatgatttggtagtttcaatatatcgtatgtgtcggttcaagagaaaaaaagaacatatagtaaaacaaacagaactatttcaatacatgagaccgttaaatatttcgtgctaccataatttctgatagataaatttctatcatagcctaatataaatcttaagttctagttctaatctagaatactctgtttttttctatattttcatactcataaaaactatttataatagtatttgcagttgaaattgatatataatattaagttatttataagtataatatttatactatatgatagagtaaggattatatacaatgaaaaagattttaggattggatttaggaacaaatagcataggttttgctttaaatcaagttgaagaaaaagatggagctattgtctttgaagaactaacttcaaatagtattatttttagtgaatatgttatggctactgatagaagagcttttagaagtggaagacgaagaaatgaaagagcaggtagaagaaaagaaaatattagaaagcttttttgttatttcaatctagcttcaaaagatattttagataacccaataaactactttaataatcttaccaaactgtacaaagagccatatcatctaagagaagaagctataaaaggtaaagaactatctaaagatgagtttgtttatgctctttatactattgttactagaagaggatatacaaacctttttgcaaaagaggaagatgacaaagaagccaaagagagtgaaagaataaatagtgctattttgacaaataaaaatctatataaaagtaataactatatactcccatcaaaagttttgactgtaaaaaaagataaacttgtaaaagatggttttataaatattgctataagaaataaaaaaaatgattacagcaattcacttgatagaaaactttggcaagaagagactgagctattactagagagtcaaaagaacaataaagaactttttgaaagtttaaaaacttatgaagattttaaaaataaacttctaaatggtatcaatgaaaactctatgggagcttttgagcaaagagatttaaaaagtgttgaagatatggttgggtattgctctttttataacttttattcaaatgaccctcaaaaaagagttattaatgcacatataaaagctattgagtttgttttaagacaaagaatagaaaactctattttaggaaatctaataataaacaaaaaaactggtgaatttgtacagctttcaaaagaagacattgaatctactattgatttttggctaaaaactccaaatgtacaaacaattacagctaaaaatatttttaaaaatgctggttttaaagatgtagagataaaaatatcagataaacaagatgatacagttcaagatatatctgtacataaatctattttagagatcattgactttgaaactattttcaaaaatgaagagttttatacaaaaatattggaagttctgcactattatgtaggaactaatcaaataaaagatgagattaaaaaactaaataaagaaaatattttaaatgatgaacaaatagaaaaaatatcaaatctaaacaaagctaaaagctcatatctctctttttccttaaagtttataaatcaaattttagataaaatgaaaaaaggaactttatatcatactgctcttgaagagttgggatactttaaaaggtacaccaagatggaagcttatgactatcttccaccactaaatccaagcaaagaagatataaaatggctagaaaaaaatattaaaaactttaaagcagatgagctattttatcaacctcttgttagtccaaatgtaaaaagagtaatctctattttaagaagattggtaaatgagctaatatctagatatgggaaaatagataaaatcatcatagaaactgcaagagagttaaactcaaaaaaagatgaagaaaaaataaaaaaatctcaagaacaaagtaaaaaagagataaaagatgcacaaaccttactaaaaagtgaaaataaagagctaaatggtaaaaatactttaagagcaagacttttgaaagaacaaaaggcaaaatgtctttatagtggtgaaactttgactcttgaagatgctttagatgagaatatcacagaagttgagcattttatacctagaagtaggatttggatagatagctataaaaataaaatattggtactaaaaaaatataatcaaaataaatcaaatcaacatccagtaagttttttaaaatctattggagagtgggaaaactttattggtcgcatagatgagtttttgtcaaataaagataaaaaatattggctaacaaatgaagaaaatatccaaagaatttgggataatgaaaaacttgaagatagatttttaaacgatacaagaagcactacaaaaatagtagcaaactatcttgaacactatctgtttccaaaacaaaatgagtatggaaaaggtgaaacaaatgataatgtaataagagttacaggaaaagctataaatgaacttaaaagactttgggggattcacgaagcacaaccaaccgatgatgatggcaaaaaagatagagatacaaactatcaccacacaatagatgctattgtaatatcacttttaaataattcatccaaaaaggctttaaatgacttttttaaacaaaaagagaataaatttaaaacaaaagctattttagagaacttaaaaactaaatttccagttacgaaagatggtaagcctttatttgaatttgtaaaaaataaagtagaaaaatatgagaacaatgaactatatgtttgtccttatatgaaaaaaagagagaatattcgtggttttaaagatggaaatatcaagttactttgggatgaagagctaaataactttgctcaaataaataaaatagagataagtaaaaatcttctttatgataattttggaaaagagttaaaagatgaagaagtttcaaaaagatttaatgatataaaagaaagattaaatcttccaaaacaaaacaatatcaaagaggcactagaagagtatgagcaaagattattaaaaacaaaagagagtataaacaatatcgttgtagatataaaaaatgagcaaagtaaacttccaagagataaaaaagctattgatacagctgaaattttggagataaaaagcaaaatagaaaaactagaacaaaataaaaaagagcttataaaagagttggagattccttgttttttctatacaaaagatggcaaaaaacagatagttagaaatttaaaactaaaatcaagttctgtaacaaaagcagatagtataataatcacagataaaaaacaaaaaaatagagtacaaagactagactttgaagtttatcaaaatctaaaagaaaataaaactccatttgtagcaaaactaaatgataatactttgagtgtagatctatacaatacccaaaaaggacaagtaataggactaaactatttttcttctataaaaaatgatattttgccgaaaattgatgaaggaaaaataaaattaatatcaaattatgatgataaaataactatttcaaaaaatgatattatagagataaatgatttcaaaaatggtacaaaaaattattatacttgtaatggtggtggagaaattggtaaaggaaaaaatgttattaaagttgataacataaataaaaaaaataaatcagtaattcctattcaaatagccaattatagaattgtaagaaaagttaatataaatttctttggggagattttttatgaagagtttaagaaaagttaagatacaattttatcatatcaaatggggatttgatagtttgcttaaaacaagggacgatttagtcccgcaaaaattttataaactctttttggggagtttataaaatgtctttccaaaaactctatataaaaaacaaagcctacttaagctacacaaataacctaatcaaaataaaaacagaagattgtgaaaatactgtttgttttgatgatatagatactattttaatagaaaactatcatactactatttcaactgcacttttagcacagctttcaaaagcagatattagtgtaatattttgtgatgaaaaatttatgccaagctctattttactgggaataaataaaaatagccgtactacaaaaatacaaaaagcacaaattgttttaactaaaccaaaactaaatcaaatatggcaaaaaatagtttactataaagtagaaaaccaatcaagtgtcttaaagatttttaataaaaatgaaaagtatctagatagcctactacctagagtaaaatcaaatgacaaagagtatatagaaagtactgctgctgcatattatttcaaagagttgtttggagatgattttactagaaagaaaataaatgatggaagaaatatagctttaaactttggttatactgtttttagaagttctatttgtaggtatatcatagcttatggattaaatcctgcttttgggatacatcatagtaatgagttaaatgcttttaatctagcagatgatttgctagagccttttcgtccaatagtagatttgtatgtaaaaagaaatataaaaaaagagacagagctaactagtgcaataaaagtagaacttttaaaactattagatgaaatagtaatatatgataatcaaagagttcaagtatcatattgtatgaagcaaatagttgcaaattatcaatcaatttgtttaggaaaaatggaagaattaaaactttttagtttatgaaaaagatagatgatataagtagatatagaaaaatggtactttttgcaatgtttgatatgcctactaacacaaaaggtgatattaaaaaatatacaaaatttagaaaaaaacttattgaaatgggttttataatgtttcaattttctatatatgtaagattttgcaatggacttgcaacagcacaaaaatatgaaagaaaaatcaaagaaactgcacctgtaaaaggctcaattagagtgttgaaagtaactgaaacacaatataaaaatatgattattatagaaaattatcgccaaaaacctgaagaaaagatcgaaaaacagactcaaacagtgattgttttttaaagcaaatctatcaccaaacccctgctgtacagggttttaggctactctattatatcaaatggggatttga

SEQ ID NO: 4264 - DNA, 5483 bp, synthetic construct
  misc_feature 1..5483: note = Synthetic
  source 1..5483: mol_type = other DNA
tgtgaggaatgaatgtgtaaagaattttatatctaggcagggttaataaaaatacttctaagaaatattttgaaggtatagattataaagaattaaacatttaaggtttatttaagtgttatggaacttttagtacctttatgcagaagtacccattaaagtcttagaacttaaactctcttttagctctttaatatattttattttattcatggctttttggcaaagtaggttatttgaataaaatgcacaattaggaaataaaaataaattcaaaccaaattataatttatataagttgactttaatagtcaacttatatattatttaaaatgaatatttagctgttacaaataaatttttttcatctttgtagatatctttgtcatccgaattaaacgaagcataaataagtgctaatttaatggcttgtccttctattttaataggtttacttactccaattgtgtaattacttcccatatcttcataatcaccatagctagtatctaagcttaagattttaaagtcgtaagatgctgttccttcaacataagatagtttatcaccacccttttcttgatacattgcttgtgaataagatgtacctaatattaaatctccaagagtataacctaatgcaagttttgcttcatcgaaatctgactcatcttttgaatcaggatacatatattttgtatatgataaatcatatgaaaaatcattaattgtattgctataaccagcatatccatctatttcaaaatttgcttgagttccaaaatcaacatttgaagcccaagtaccaacatataaaccattatattttaaatcagcaccaccattaacagacgatttatcttttgtttgagtcatacctctccaaatataatttgaagctgctccaatattaccactaacttccagttcattcgcttgaattgttgatataggactcaatatacctagagcaaacatagctactaaacttaattttttcataatttcccctcattttttgtgaatatctttatctcttaaaaacaaaaaaattataacattaattaaacaagtttataatacgcatattgtgtattaattatacaatgtgtctattaatcgttataataattagattataaaaatgtatttcatacttttatttgctaaaaataagaatattacaaatactgtataagagtataatagtaattcaacattttaatttatcctaaagtctgatttactataatataatttgaattgtaaaattagaagaacaagttttaatctactcataagtcccttttaacaaaatgtcagtttaaatccatttttttacaattcttaaattatttacaacatggtataaaatgattgtagaagctaatttattttttaaataaattgcgttaaatttttatagtattcccaaaaattcagcttttattatttaaaatatatcaattaatttagataatttggtattttataaaggtctttaatgaatataattagtaaaaaagttttaggtttaagaattactataaacagtataggtttttatttaaataaaatatttattgaaaatgaacaaacaatttttgaagaaatagcttcaaatagtattatctttagtgaatatatcaaagctgcggatagaaaaagttttagaagtgggcgacgaagaaatgaaagaaatagtagaaggaaagaaatcgttagaaaacttctttgtgattttaattttgctaataaatcaataattactcaacctatagaatatttcaataatttatctaaaaatcaaaatccttatatattgaaacaatcagcagttcaaggtaaaagtcttacaaaagatgaatttacatttgctctttatacaacaatatcaagaagaggttattcaaatcagtttaatacaaaagatacaaaaaatgatggagttataaatggtgctatatcaaaaaataaagctatctatttagaaaacaatttagctattccttcattagttttatggaataaaaaaatagaacttgaaaatgatggttttataaatgtatcaattagaaataaaaaagacaactataacaactctttagatagagaactttggcaagaagagttagaaaaattattagaaagtcaaaaaaacaatagtgaactttttgaagataaagaaaaatatgaaacttttaaaaataagcttttacatggtgtaaatgaaaactctttaggtatatttgaacaaagacctttaaaaagtatggaagatatggtgggatattgtagtttttacaatgcttatcatcaaaattcacaaaaaagagttgcaaaagcccacatttcaagtatagaatttacacttagacaaagaattgaaaactctattttaggtaatttaattttcaacgataaaacaggagatattttcactccaacaaaaaaagatattgaaaatacaatagaattttggcttaaaaacacacttactcaaactatcaatacaagaaatatttttgataaagctggactaaaaaacataaaaatcaaaattgcagataaacaagatgatacaattttagatataaaactacatacacaacttttagaaatatttagaaatgcaaatattgatatatttgaaaagcataaagctttatatacaaaaatcctagaaaaaatccattattttgtaaataaagagcaaatagtaaaagagataaaaaaagtagatattgaaaatattttagatgatgtaacagttgaaaaactatctaatgttaataaaggaaataaagggttttatgcttcattttctctgttttttatagatgagattttacaaaaattaagagcaggagaaagttatcaaaatagtttaacacaacttggatattttaaaaaatatttggatattacaccttatgattatcttcctccactaaatccctcaagtgatgatataaaatggcttgaaaaaaacgtaaaaaattttaaagtagaacatctattttatcaacctttgatttctccaaatgtaaaaagagtaatttctattttgagaaaacttataaatgacttgataaagaaatatggaaaaatagatgaaattatcatagaaacagcaagagaattaaacacaaaaacagaagaagaacaaattaaagattctcaagcaaatagtagaaaagagataaaagaagctgaaaaacttttagaagcttacaaatatgaatctacaaataaaaatatagaacgaaccatattatatattgaacaacgagcaaaatgtctttatagtggaaatcctatgactcttgaagaggctttagatgaaatccaaacagaagttgaacactttatcccacgaagtaaaatttggataaatttaaataaaaataaaatattagttttcaaaaaacataatcaaaacaaaatagataaacatccgataatttatttaaaatcaaaaactgcttgggaagatttccagcatagagtaaatgaacatatatcaaataaaagtaaagtgttttggctaacaaatgaagataatataaataaaaattgggaaaaaggaaatcttgaatataaatttttaaatgataataaaagtgcctcaaaaatcatagcaaattatcttgaacattatctcttcccaaaacaaaataaacatgggaaaggatgggagacaaactcaaatatcataagagttacagggaaagctattagtgagttaaaaagactttggggaattgataagattcagcccaaaaatgaagatgataaaaaagatagagatacaaactaccatcatacaatagacgctttagtaatttcacttttaaatcaatcatcaaaaaaagctttaaatgattttttcaaacaaaatgaaaatggttttaaaacaaaggctattttagaaaatctaagtgctagatttccaaaaacaaaagatggtatatctttagttgattttgtaaaagagaaggttagaaaatatgaaaatgatgagatttatatctgtcctatgatgaaaaaaagagataatatcgtaggttttaaagatggaaatataaaactttattttgataaaggaaaagatatattttgtcaaatagataaaaagccaatagataaaaatttattatttgaccaaaatggaaaagatgtaagtgatagtgaagtagaaaaaagagtagaagaacttataaatcttttggagttgccaaaacaaaacaatatcaaagaagcaattttaaactataaagaaaagctacttattactagaaaaagtataaaagatttagaacaacaaatcaaagatataaaaggtaacttaccaaataaaaaagattgtgttgaaactcctgaaactgaaaaaataaaagagcaaatagaagagttagaaaaaaagaaaaatattcaaaaaaatatcaaaaatgaaccttgttatttcacgacaaacaaaggacaaaaacagatagttaaaaatatcaaagtaaaatcaaaagatgcttcaaaagtagatagtgtaatcatcacggataaaacaaaaacaaatagagttcaaagactaacaaaagatatttatgatgatttaaaatcaaatcaaacaccatttgtagcaaaactaaatgatacaactttaaatgtagatttatataacacttcaaaaggtcaagtaataggacttaactatttttcatctattaaaaataatatcccatctaaaataaatgaatcaaaaattgaattaataaaagattcaaaagataaaatcacaattcaaaaaggtgatttattggaaatagaaaatctaaaagataatagtaagaaatattttatatttaatggcggaggaaatattgcaggaggaaataataaaattgaggttaaatcaataaataaaaaagatgaaaaaagattatttataactttaaataaagatactgttgctaaaaaagtatttattgattagagattcgtcgtgccaaattggtattatatggtttgtggcatctctgtcaacccatgagcaaattgttgtgcagagtttcaagtaggcctttgtacatccacctgaaagccctccagcgtaataatatcgaccttctccctctgggatataggcagtagaagcatctcttcgctcgtatgtaaattcggagttcggtttattgtagaatccagggtgcatagttcctagtaatccgttactatctgatggtggtagaatttctttgccaataggactggtgaataagagattggcattgaagaaaaatagatagtcggtttctcgctctaactgttccttgatacgaaggaatatatggaaacgttttaatgtgttgtcaggccatcctaaattcttttgtttgatccggtgaatatgctcattattctcttcgtcgtatagttgcggactatcagtaaatacataatactcgataatgaaagattggtcttgc

SEQ ID NO: 4265 - DNA, 13911 bp, synthetic construct
  source 1..13911: mol_type = other DNA
  misc_feature 1..13911: note = Synthetic
catcaactagtaaatagccggacctacgcgatgagatttttatgttaattgtgggactgttatttcccgccgctgcggtgttcgtcgcgcgccattccgggtgcgcggcggcatcgcaatggtgccctgtttttatagagatacggagagaaggttttgactgccgagccgggcggcagggttcaggttgcaagaggcagcgtgtgatccaagtccggattgggcggaaaattttggctataaagggccgagcaatggtgctgggtctctcggaagggaaggcgcttggagccgtcccgcccgatattggaggaactcattatggataaacctcgctggtattggcctgttcagcttggcctgctgctgctgatgcttctgtgcacagcgctcgtgatatggggcgatgacatgggcggactgcccatacccagctgggtgctttcgctgatcagctcgagtgcgctgatcctgatattgatcggcatgataaaaattgaccactctgtgcaaccccataacagggggacggtggtcaagattttgtggttcgtatttggcgcgtattgcgtcgtgatattttcattttttatttcacaacttttttaggaggtattaatcatgaaaaaactaactgttatttttctttctgcgctgctgccgatgtcgctggcattcgccggacaggagccgatcccggtcgatgacctggattacgcttttgccggtgaggtgctggcggccgagcctctgagcgaagctgaaatgctggagactcagggcgaggcggtcgtcgtcgcattggccgtgatcggccttgcgctgggggcttttcagatcggctacatgatgggctcggattttttctagaggtagcaaaaaacgccgaaatttttattcttatctaaacctgcccttggttatcggatgtcaagattgcgtgcggtttttatgttgattgtgggattttcatgtcccgccgctgcggtgtccgtcgcgcaagattccaaaagcgcgacggcatcgcaatggcgttccgccagcttccagacctggaaggatctgcgcaggcaccaggtggagctgcaaaacctggactactcctgcggctcggccgccctggccactctgctgcgggagttctacggcatcccgaccgacgaggccgaaatccttgagcgcatcgacagggagagcgcggcatcctttgccgacctgtcccgtgtggccggcagcttcgggttccgggccgtgggctaccgcatgtcgctgtccagcgtcctgaaactcagaataccggtgctgatttacgtgaagtaccgccagaacgaccacttctcggtgatcaggggcgtgcggccggacggcctcatcgccctggcggacccctcctggggcaatcgccggctgctgccgcaccagtttatggagctgtgggacacggagggttcgggcaagggcctggtgctggtggttgttccgaaggacaaaaaccatccggttcgccccgacttctttgaggcgcccagtgcaccgacggcggcctatgacgcgctgcactttgtcagccagcgccgggttttgtgaggatgaatcggctcgtgcagaaagtcttgaccggtgcggcgtgtgcgctgtgggcatgcggcgccttcgccgacgagggcttgccgctcatcctggacgggctgcaggtgccgcggggaagctccagccttgagcttcgcctcaaccatgtcgccgtgggcggggttggtgaggatgttctcggccagttcgacagggaagatcccgcgagagccggccacaccgattttctgctgggcaacctcggatatcgctacgggctcaatgcccgcaccgaggtctcgctgaacttaagcggcacctctgcggagcagcgcgccgccaactccagccgatacatcacaaaaaccaatgcgaagctcgacacgctcaatgccggcctgagctacagcctgtcccccgagaatgaaaccccggcagtattcggtcatatcgatctcacgctgttcgaaaaccgcgcatcagcggggcaggactggcacacgctgcccggcagcctgggcatcggcctgaccctgtaccgaacttacgacccggtggtgctgagtttttcctccggatatcgccatacgccccggcagcgatcgcaggcgggaagcaccgacaccggcgatgtgctctacatcagcccctcgctgacctttgcggtcaacaacagcgtcagcctctcgggcaacgccgatgtcagcatcgtgcagcggaatcaactcaatggacgcggggcgggcatccggcggacggtgatccgaagcggctttggcatcggcatctcgcccagtgcgcaattcaacctgtacttcaattacctgttcgccctcagcggttcggatgagacctcgctgggtctgaatgttcgctacaaaatggcgccccgccaggctggcgggggcgaagcccagccgctggagaccgcagaggagcaaggggacgagcagcggcggggcgcgccccgggcccggtctccggcccgcaccgcaaccctcagccctgaaccgggcgcacggtgatgccggcctggccgaggcggtccttggcgtcctggatcgtgtgctcgccgaagtgaaagatgctcgccgccagcactgcgctggcgccgcccctgacgatgccctcgaccaggtgatcgagcgcaccgacgccgccggaggcgatgaccgggatttccagtgcgccgctgatggcgctcgtcagcggcaggtcaaagccctcgcgcgtcccgtcccgatccatgctggtcagcaggatttcgcccgccccccgccgctgcagctcaagcgcccactcgacggcatcgagctcggtcggcttgcgcccgccgtgcgtgtagacccgccaggaatcgccgtcccgacgcgcatcgaccgccgccacgatgcactgcgaaccgaagcgctcggcggcgcgtgaaatcagatccggatcggccacggcagcggtgttgatgctgaccttgtcggcacccgcgcacagcatgtcgcggatgtcccgcagcgagccgatgccgccgccgatggtcagcgggatgaagacctcgccggcgacctgctcaaccaattgcgttgtgcggcgctgctcatggctggcggtgatgtccagaaacaccagctcgtcggcgccctcggcgtcgtagcgccgcgccacggcgaccggatcgccagcgtcgcgcagcccgacgaaattgacccccttgacgatgcgcccgcccgcgacgtccaggcagggaatgacgcgcgcggcgacctggctcacgcgcaggcccgcagcgcctcggccaaatccagccggccctcgtagagcgccttgccggcgatgacgcccgtgatcagcgcctcgccgcagtcgcgcagtgcgaggacgtcgtcgagtccggccagcccgcccgaggcgaacaccggtatgccggcggtgcgggcgaccgacacgctggctgcgacattgaccccctgcagcatgccgtctcgggcaatgtcggtgtggatgatggagcagacgccggcctcggccaggcgcttggcgaccgcctcggcgctcagctctgcctcgctctcgagccagcccgaggtcgccactttgcccgagcgggcgtcgaccccggcgatgatgctgtcggggtgggcgctgcacagcgcctcggcgaactcgggatcctgcacggcgcgggtgcccaggatgacccagcgcactccggcgtccagataggccgccgccgcctcggcggtgcggatgccgccgccgacctgaacctgcatgtccggcagcgcccgaacgatgcgctcaatcgcctggccgttgaccggcgcccctgagaaggccccgtccagatcgaccacgtgcagccggcgcgccccggcatcgcaccagcgctgcgccatctcgagggggtcggttgaataggtcgtcgcctcctcgctgcggccctgcaccagccgaacgcagcagccgtccttgatgtcgatggcggggatgacgagcatcaggtcaactccggtcagccccagcggatgaagttgcgcagcagccgcagccccacggcctggcttttctccgggtgaaactgcaccgcaaaaatgcggctctcgccggcggcggcgacgaattctccgccgtagtcgcagcgaccctgcgcgctggggctggccgcgacgcggtagctgtggacgaagtaaaaccagggttcctgcgggaggccgtcccacagcgggtgagcgtcggtgcggacgcggttccagccgatgtgcgggatgcagaggtcctccgccgaggcgaagcgcgagacgcgcccgggaagcatgcccagcccctgggtgccgccgttttcctcgctgtgctcgaacagcagctgcatgccgacgcagaccgccagcaggggcttgtcggacagcgcgagcgcctcgtcaaacccccgctcgcacagcggatcgatgcaggcgcggatgccgccgacccccggcaggaatatgcggtcgcagtttttgagctggtcgggggtttcggccaagaccacgcgcgccccggcgcactcaagggccttgcccgccgagtgaatgttgcccatgccgtagtcgattagcgcgacctttgccgccgtcgtcacagcacgcctttggttgaaggcacgcccggtgcgagcggatcgacggcgaccgcctggcgcagcgcgcgcgcgaacgccttgaacaggctctcgacctgatggtgcgcgttgctgcccttgagcacatccagatgcaccgtgatcatcgcgtggttgaccagcccctgaaaaaactcgacgaccagatcgagatcgaaatcgccgacccgctggcggacgtactcggcgcggtagaacagccccggccggccggagagatccaccaccgcgcgggagagcgactcgtccagcggcacggtcatgcagccgtagcggacgatgccgctgctgtcggcgagcgcccggcgcagcgccccgcccagcacgatgccgacatcctcgacggtgtggtgggcgtcgacctcgagatcgcccttggcctgaatggacagatcgatgcgggcgtgcttggcgagctgctcgagcatgtgctcgaagaagggaatgcccagatccaggtgcgcctcgccggagccgtccaggttgagggagagcttgatctgcgtctcgcgcgtgctgcgctcaagcgaggcgctgcgttcgatcaaggcgctgcgggcgggagattcagccatcagacgacgccctgttccacagcgggcggcattatagggagtgggtggggccgggatgctgaggggatgcggggttgggtgggtttcggcgttgagaaaatttttgaaatcggcagaattttttggtttacccacactagaaattcaggctaaaacaattgcaattgcttgggtcttccatcgttttcttcactgaccttctgtgcatagaagcggcgcatgttgccgaactggcggtcggtcacagtgagtatgtcgaccttgccaccaggcggcagcctcaactgaatctggtcacccaccgcctcggctttctcggttgatggacagtacttctggtagaccgagaactgcgacatctcaaagcccagatccagtagatcgttgcgaaaagtggttgccatcttgcgctcttttttggttcctaccggcagatcgaacattacgaaaacccacatgatccggtatggactcagatgttcacgatggctcaccccgcaatagcctgtagagggtagggcagttccggcagtgcaacctcattggtttcgtcttgatagtagcgagccacctgacggcacattttgactaccgacagcgagagcggagactcttcggtgccttgcggaatcggtagagttgtcaatgcggccagctcggctttcatgtctggtgtcagctttttgcccagtttgcccgcccgcagtaccaaaaaatagtcggcaataggcctgtaaggttccatcagatcgtcgaccaagttgatcggattttgtggatgcttgtggtgcaaactgaaacaggggtgtagacccgtgctgctgacacctcgtgcaacgcacgaacgcacgatggcataagaatagttgagagcggaattaatggggtcgacattttcctgtttgcggcgaaaacccttgccgaacagcttgcgccaataatctctggcggcttgggcttcggcattgcctgcatcaccggagcgaacgctggctgccaagcgcagcaagcgttgattgctttctccgatgcggtcaattaccgccgcttggttttggatcttgctgcgcacgatcttctgccacaggcgtttgcgccggggttcgctcatattgacctgtgcctgcataacgtgcagttggcgtccgtaaccggccactggcagcgtaatgctggtcggcaggtagttgctgccgcacatgactatggggatattgagttcggccagtgcattaaccagcttggtggatatggaacagcccaaaaccgagatgaccaccgaggcgatatcgtccagcgacacgcgcccaagcattacaccatcttcgctgatttccatgaatccgcgaaatttgcgcagtgagcatccttgttttgtgatctcgacaatctgaccgaccatagcgaataacctagatgggttgttttcagagcctatataattttacgcaaccgcaggttttcacagatagaagaggacctgaggataaatctcatagttccttttcaaaattgtttagcaggagggagcagttttggccagcaaagaacgacgcaaatggatactcggtattgacggcggaaccaattcgctcggttgggccgcagtcggacgcaacgaaagatcgcagccatcagacatcatcagagccggtgttcagatattcgctgatccattggttgataagggggagccgtctgcgcgggaacgttcggcagctcgtcggatgcggcgattggtcggtcgccgccaagcacggcgcgacgagttgcggacaaagctacgggcactcggcctgttgcccgatacacatgacaatgagttaagcagtcgcgggctggagtttcgcgcaaagctgattgatgagaccgctgaggaagttgcaggtggacgctttaatccgggctgggttgtcggctatgcgttatgtagcctgaatgttcgccgtgggttcaaaagcactcgaaaagagcgcagcgcaggagccggtaagtccaagagtaacgatgatgccggtaaggttctggaggctataaagagcacacgcgaagttcgaggagggctaacgcacggacagcacctttaccagcggctgctggatgaaaagactacacgttcgcgccccggctcggacggctacaacgaaacattccccaatcgtgatgacattgcttctgagtttgaccaaatcatggaggcagtcaaaagcgaatttaagaacatcacagacgatgatattgctgcaatgcgctcgctcattttggatcagcggcagggagttgcaccacctcgcggaatttgctcattcatgccagccgaacagcggggctataaggccagcccaattatcgagcgatttcggatgatgcaagaggttggcaatatcagttggatcgacagcatgggcgaagttcagcgaatggttgagtatgtcgatgtccgcgatgaactaatctcacatctgagaaccaagaagtcgatgacggtcggggcactcggcaaatttattgacaagcgcgtgcccgattttgttgaactcaacaccggggacatccgagacaaattcgttggatgtttgaccgatattgagatgatcaaggcaatcgatgacagatggcctcagatgccgctagaaaagcaggacgcgatggttgaattgctgctcagcctcgcctcggatgagtccgtgctggatagactgcaaaacgaatttggactgtcgcacaatgaagctggtgcagtgctggatgtcaaactcgttcgaggtacggccagtgtcagtaatcaagccgcactgctgttggtcgggcagatggagcgcgggctggatttcactcaggccgtcaatgcgctggtttcagagcgtaacgactttacagacggtttgccggtggttcgtggattgaaaaagcgactaccgaactatgaggtgcattttgctgggacttcgcatgtcgatgcaatcaccgggcgtttcaccaatccaacgcttgaccgcttctttcggattctgaggactgtagtcaatcgtttgattcgcgagcacggtcgtccagatgaggcagtcgttgagttggtgcgtgaaatagcgcagggtgaagttaaacgtaaagagcatagcaagaggcagaaagcggcgcagaaagaaaacgagaggcgggccaaaaaattggaggaagagggggtggcagtcactcgcgaaaacttgcggctgttgcggctatgggaagatcagaatgaagagtgcatatatacaggtaagataattgcccgaaccgaactgtttgatggatcgtgcgacattgatcacatcgtgccgcgcatcaaatccagcaccgacaaccgactgttgaatgtggtgctttgtactgctggggccaatcgttataagcgtgatagaactccgcacgaagcttatggtcagagtcttgacggctatgattggggggcgatcacggagcgcatcaaatggctgcgcaaagaaaggaaaatcagcagggaaaaggttgagcggtttggtgaagacgctcgcaaactatacgaccctgaaaatggattgcccattcgcttgttgaccgaaactgcttacatcgccaagttaatgagggcgtatctgtcaagcatcatcccagctgagcacatacatgcgattgctggtaatgtcacagctaaacagcgcaaagaatggggcttaaacaatatcgttggcacttcggaagaggatggtaaaaaagctcgagatgatcatcgtcatcatgcagttgatgccattaccatcgcttgctgcactccggcatcacttgccaaatgtgcggcgaccgactctactccatggccgaccatcagatgcgatgttaaagtcgtagttgacaacatcatcgcagtgcatcgagtggataggcatgaagagggcacattgcatgaggacactttttacagtatgaaacatgatcggccagcaagccgcaatgtggcgagttggttcactgctgaaaagacatcagagaaatgcagggcacggattgagaaagttgttgatttggggctacggtcttcaatgctccgtatctttgacaacgcagggatcgatgacaaggcagtgctgcaggagtggctcgcgcatcccaagcgcagaatacgcggcattagaacatttcaagacagccgagggcagcctgttgaaatcggtcgttcacatccgcgttgggtattcactggcggcaactgggcggttgaggtgcgcggtgtcgatggcggcaattggatcgccaaggtggttgatcggctcaccgccaacgcatcgaaccgcgcgggagtggacgggcggctggtgatgcggctgcaccgcaatgatctagtttggctgggtgataagataatgagaatcaaagaaatcagcggtggacaagagccgcttatccggctggctgatccgaacttgatcgatggtcgaccggtcacggttacgctgtcagtcctgaaaaaacgaggagtcagacttgcaaaaccatctccgctgggcacatttccgcaggaatgatcatgatattctccagttaatacaggtagttacggtgcagcagattataaaaaacaaatttgtggtgatggcaaaactgcggggctgctatgccccctgcggggctggattataaaaaacaaatttgtggtgatggcaaaacgagccgcagactctatagttttttgaatccgattataaaaaacaaatttgtggtgatggcaaaacaatgttgattggccggcgcagctggtgaaagattataaaaaacaaatttgtggtgatggcaaaactgctgcgcctcacctgcgccccctgcgggggattataaaaaacaaatttgtggtgatggcaaaacgtcgttcgcctggacacgtacagccaagaggattataaaaaacaaatttgtggtgatggcaaaacgagttcgaggttatcgatccgttcaccgttgattataaaaaacaaatttgtggtgatggcaaaaccaaagcgataaccgcaaaaacaggaatatcgattataaaaaacaaatttgtggtgatggcaaaacccgcctgcgcctcaccctgccctgcccctggattataaaaaacaaatttgtggtgatggcaaaactggagttgaacggtggatcaagatagatcagattataaaaaacaaatttgtggtgatggcaaaacccggttcgctggcggtctgccggcattccggattataaaaaacaaatttgtggtgatggcaaaacaagctgcggacggagttttaagatgactaagattataaaaaacaaatttgtggtgatggcaaaaccagcctgcgggacatattggtgagtgggtcgattataaaaaacaaatttgtggtgatggcaaaactggtataccaaaaacggatcgcggcttttagattataaaaaacaaatttgtggtgatggcaaaaccgccaggagttgcaggttcagtgggaggttgattataaaaaacaaatttgtggtgatggcaaaacaagcgtcagattgcccctcccaagaatcaggattataaaaaacaaatttgtggtgatggcaaaactgcatgccgatctcctgcggcgaccagttggattataaaaaacaaatttgtggtgatggcaaaacggagacggccatttccgcctccaaatgaaggattataaaaaacaaatttgtggtgatggcaaaacacggcctgagttttcatttcagcggttgtggattataaaaaacaaatttgtggtgatggcaaaactcgcccggcagcgttctcataaggtaatttgattataaaaaacaaatttgtggtgatggcaaaactgatcgaggatcggtgtcgcgtcgcccggagattataaaaaacaaatttgtggtgatggcaaaacggtgatgcaagtgccacccactcggcagccgattataaaaaacaaatttgtggtgatggcaaaacgacgggggcaaatcactgatgcggagcgaggattataaaaaacaaatttgtggtgatggcaaaactagggagatcggggaaaagctcggatacaagattataaaaaacaaatttgtggtgatggcaaaacacatttagagatgagttatcggcgcagattgattataaaaaacaaatttgtggtgatggcaaaactgcctattcggtgctgattcagccgatgctgattataaaaaacaaatttgtggtgatggcaaaactcggtaagcgatgcgccgcgcgtcatggaggattataaaaaacaaatttgtggtgatggcaaaactctatattacacgataggcttgccgtattggattataaaaaacaaatttgtggtgatggcaaaaccagggttgctcagggttgctcaggggggtggattataaaaaacaaatttgtggtgatggcaaaactattagaacgttgttaaaaaatcatcaccggattataaaaaacaaatttgtggtgatggcaaaacatgctttccatggtggtgtctccttttttggattataaaaaacaaatttgtggtgatggcaaaaccgatgtcgtctatgtattgaatcgcattaagattataaaaaacaaatttgtggtgatggcaaaacccgcgcgccgtcactgctatcttgcctgcggattataaaaaacaaatttgtggtgatggcaaaactgcggcgtccgggtcaatgcgggcaagctggattataaaaaacaaatttgtggtgatggcaaaacgcagtcgcagcctcagatcgcacagatcaggattataaaaaacaaatttgtggtgatggcaaaacgggtgcggggttcggatcggcgcggccattgattataaaaaacaaatttgtggtgatggcaaaacccctggtctgtttaggcataacaggcagcgggattataaaaaacaaatttgtggtgatggcaaaactggcgtgacggaatgacaaggtgcccggtcgattataaaaaacaaatttgtggtgatggcaaaaccaaccttatcgagtcggtgaggcagctgctgattataaaaaacaaatttgtggtgatggcaaaacggcaacctggttgcggagtcgagaaattgggattataaaaaacaaatttgtggtgatggcaaaacccgcgcggcattctggcgcggcacttcccagattataaaaaacaaatttgtggtgatggcaaaaccagtcttagctacagccccccggacgctgggattataaaaaacaaatttgtggtgatggcaaaaccttgcgtcaacctgcgcatcataacactatgattataaaaaacaaatttgtggtgatggcaaaacatgcagctgatacttgagcctccgcgcaaggattataaaaaacaaatttgtggtgatggcaaaacctggactcgttgcggcagctttccgattttgattataaaaaacaaatttgtggtgatggcaaaacagtgcgggccgcgtccctaatcgagcaggcgattataaaaaacaaatttgtggtgatggcaaaaccagggcggggtggtgggttctgtatctctcgattataaaaaacaaatttgtggtgatggcaaaacctcgaatggatctacgagcagggcgcaggggattataaaaaacaaatttgtggtgatggcaaaaccagttgagccagcggtcagagctggacggggattataaaaaacaaatttgtggtgatggcaaaactgccctcctcctcgacatactcctcgttcggattataaaaaacaaatttgtggtgatggcaaaacttgtgcgaattgtggcacctgctgaaggaggattataaaaaacaaatttgtggtgatggcaaaacccaagcagaccatcgccagcattcgcggacagattataaaaaacaaatttgtggtgatggcaaaacagtcctcggcatttatggggcagtactcgagattataaaaaacaaatttgtggtgatggcaaaacgtgcaggatgacgacggcggcggcgggctggattataaaaaacaaatttgtggtgatggcaaaacaggcgctatttcttcaatgcggtctaccgcgattataaaaaacaaatttgtggtgatggcaaaacaggtgagggttggcgctcacgggcagtcctgattataaaaaacaaatttgtggtgatggcaaaacagctggccgagtatggtcagtccctcctcggattataaaaaacaaatttgtggtgatggcaaaacctcctcgtcctgccggaactcgtccagcgtgattataaaaaacaaatttgtggtgatggcaaaacacccgggcgatgttgtgcttgatccgttcggattataaaaaacaaatttgtggtgatggcaaaacagtccagactttatagttccgtctttttttgattataaaaaacaaatttgtggtgatggcaaaacatctgggtgctctgggtgcagctgcataaagattataaaaaacaaatttgtggtgatggcaaaacgatgaacaggttgccgtcggcatcgccggcgattataaaaaacaaatttgtggtgatggcaaaactcagggtagctggtgcatcagcggggcgatg

SEQ ID NO: 4266 - DNA, 23327 bp, synthetic construct
  source 1..23327: mol_type = other DNA
  misc_feature 1..23327: note = Synthetic
ctattccaaggttcgatacttatatgtgggactaactgttccaagagttagaaccggcgaacatggcaatcattaccgccattcgtctccttgttcagcttatcttcgtgataccaacaagatgattgccattcccattgcaagtctgcatccaatcgccggagccgggagcataatgggcaccctgaacgctctgtccgttaacccgataggtggagccgttcatgatgaacgtctgacccgcttgcagattgttaatccatgcgccacccgtattgttgtgttgcgcatacacgtggccgttgccatagttcaagtccacgatgccaccgccgtcaaccgcgccttggcagtggtctgcggcagaagtcaaattgcaggacatggaactgtagtagccgcgcggagtggactgggttgaagtgtaggaaccatagttggaacgggtagtcgcatagtttccgttcgtagtgtcggacgcctgagaataggacgccgccactacgctctgctgacgttcctgtccgatacgggactgacgtgcgttcatatcgtcggacaccttgttaatcagcttgtccaattcggacacgtccacgctcatggttttcacgtccgtggattccatcaaatccttggccttctccaacaggttagacagtttatcgcgattgttttcatcgtccacgttgccgttggatgattccaaaattctcttacccttatcaaccatatcggcaagcttcttcctcatatcattaagcttgtgggaggcgatggcggtatccacagatttggccgtccggttgatggaacggataagagagtgaatgcgattattggactcgaccgtcttgtcggtcagggatgaaacggtgaagacagtagccttctctttttgcgacatgtggattttagtcgcttccgttaattgggattgcaatgcctcacgggcaatacgggtagcgttatcatcgtcacgagtgacaatggtcttgttttgaatgttttccgtatcctgtttcaaacgtgcggtcagaatggtggcatggttcagtgccgtctcgtattctttccgattctgcatgaactcattggcggtagccgtgttggcgggaataagaaccattgcgatagccagtgagaggaacatgatggttctcatggtcttggtgttggttttcaattttttgctttctttttctttttgatttggtttcttttttgtggaatatgtttttaaggctttaacctaggaaggccatttcgtcggctagttcgtcttcgcctttttctctgagtaggtttgccacaccgtatcgttgattccagcaacgcactatggtgtccgcttttatgttgggcgctccccagacggttggtaggatggaacattcgtccggcttgtggctgatgccgtagcatgttccgtttacggtattgtcatagacgagtcgaaccggcttaccgcagaatgggcatggggctagatggaaactcaaagaagctctcctaatatctcttcgattgggatgtcttcttccacatcgatagtcttatacaaggaatgtagaaataaggcagtattccaatttaggtttctttcgtgtggacacttctagtataacacgtctttggtttagttttaccacacctagttccactctgccgttgcatgtcgattagtcgaaatacttcctcctcatccaaatcgacccaacgcccgtcgaacggactctgatagaactcgttttgcggcagtggacgaatctcaccatctttcaaacgttttcctcctcctgtttccgacattcgcggaagacgcgcagaagaatccgcgtagccgcctgttccggagtcaaacccttcaagtccaataccggaatactggtggaaccaacattcacgtgcagtccatcgagaatgctgtaacagtagtcattataggttcttaattcggcgtggactccacggtacggcatggaaatgttttccacgtccccgttgcaaccccagtgggacccgccatgccgttccaccaaatccaacaatgcgtctttgacctgcgagccgaacgtggaagccgaatatgtgattttaggcgtcacatagttcatgcatccgcagttcggacaaggatacgactgctgttgcccgattgttccaccgtacagccgggtgataggagtggaacagtatccgcaatccagcctgccgttgataaccatattgctactaactcctctattcggttccatatttttttgacggcttcactcggcggcattcccgcatattcgaatacaggaagctcctcatggttgacgttcacatgcaatccgtcagtccttcttatgtaatctttttgcacgtcgttcttcgggagtgccgaaacgcttgtagtagcattccttggagcagatgtcgtaggctttcatgccggaatagtaggggtattttcgaccgcattcggcacatgttctggtggccgtagccatcatgtttttagcgaaggcgatgccctccggagttccagttgcgatatacttgtcaccgcgcttgacgtaggtgacgcacccgtagtggcggagccgttccatgctggctttggctgtgggctgggagacgtagttccagccgtatcctttgcgggagatttcctcaaggatgttgaacatgtcgtattggaggtacttgcgttcaggcttgtactgtccgacatgtgtttcaacgaactcgctgatagcatccatgtcggggatgaaccagtctccgatggtggagtagtgttcgattcttccgaagtctttccggactagggattcgaggattttcttggtttgctccaagaggattcgactgttgtcttcccgcttgtcgcgggatgaaatgaattccaagagactgtattcgtctgctgtgatgttgttcatgttcgtctcctttatgaaagattttgtgtgaacagttccagtatagtgcatgttggctgaaatgcaaaaaacaaaaagccccaaccctcctatcaggaaggtcagggcttctaatctcaaagagatatcagtcgtcgttgcggcggacagaacgcttcactccaatgaaaccgacacccatcattcacagccttcgccgccgccaatcgtcttatcgacacacgcacgaacgcttttacagggcgagtatggtgacgcgcggatacggccttgccttcaacacggcgcggtcgcccgcgttgaaccgtttcatcatctccccgtaccggtcggacagcgcacccctcaccggcatgtccacatgctcaagggcaacgcagttggagaacatggtcggcgtgccatcgtccatcttcacgtcaggaggaagctccagattggagatgtctaacttgcgaagccgctcgcagaacgtgaacatgcggttgatgtctttggcttgcggcaaccgtagttccgacaaatccagttcggtaatccgattccaagttccgaacatctcgcgggcaacctccgcgccactcacatccaaaccgggcaccttcaggctcgtcacgtcggggccaagtcggaacagacgctcgcagtccctcgcgttcggagccttcaggttgacgatttcaacgtccccggtccccgcattgttgaacatccatgccagactgacggtcttcgacatgtccagattcgtgaagtccacccggcgcaatgcccacatgtcctcgaagaagacgctcatgtcctccggtgccttggaacccggcacgaagcggattccctcaatcctgttacggttgcctatgtccgcccatttcggattgtgggcaagcgtgcgcggttcggggcatccgtcgcgccagtcgaaggtaagcacgtaggtaagagcacccggacgatagttcagcttccagccgtccccttgggctatgagactgttgtcacgataatggttgacgaaccctccgggaagagtgctcccctttgtcttcgtgttctcgaagaacatgctccccgccccgtaggcttgaccgaaatccactcgacggacattgctattacgggaacggagactctgcacgctcgctccgcttactgtcgcgtcggacatcaccgtcttgttcaggaatgccttgtccatcgtcgcgccggtcagattcaccttccgcaggtcgatgcctcccatgttggctccggtcaaatcggctccggcaaggttcacgcgctccatgttcgtgcattcgaagacggcgtttcgtagtatcgcatccgacatgtctgccccgttgaattggaaccagcttaccttggcacggctgaagtcggcttcgcgcaggtcggcgttctccagatagacgggacgccccgctttcagcatcccaaggaacctcatgcgccgcatgtcggcgtcgcggaaaacggtgtggcctagaggggtgcctgagtcgattagcgaacccctcaaatcagcccccgacatgtctacgtcgcaaaggtcaacgccggagaagtcgaggtatcgcaggtcaagcccactcaggtcacggccgcgaagaacgttccccaagcggtaaagctcggtttccacgacgacgcccggactcggcctgccgacgcgcatgtatcgcgtcagcctgatgtcgtccggcaggccgcgtccatcgtcccggatgtcgggtgcgtacaggcggataccaagccccagctttgtcccatcggggatgcggccaatgaccttgtcggcgttctttccgtcgttcgcaaaaagttccaccagacgttgtgccgtccgtcgcacgttttccacgatgccgggggtttccgcccattcgaccagcgaaggcagtgtttggtcggtgatttccctgtcggagaggtctccgtattccctcacggagacttccatcgtctccgttccgtctgtgattctcatgttctctccttttaacgtttctctagcacgtccggtaagccgtccgagcaggatgggtttgccgactgattgattttgtgtagacaatcccagtatagatgtttttggaagaatcgtcaaaaactataacgccaagcagactacagatacagaaaccccggccaaccaatcaaaagaaaggaaggccggggtctctaaggtcaaaagcccatcaggcgtcattccgactgatggaacgctccactccaacgaagccgacgcccatcatcagagcgacgatggacactgcggcgatacccgccacatccacgccggtggtggcaagattatcctcgccagtggccgtgacggtcttgttgtcggcgtccaccttatatgtggtggtcttatgagtcttcttagtggagacggtagtggccgtcagtgaagagctgtcatccttggtggcgtcggtcttgccggtatctcccttggaggttccggtggagttcgagtcgctcggcttgcccgaatcgtccggagtagacggggtatccggagtagacggcttggaggaatcgtcatcgactgagaaaccggggtcgatgatatcaccctcgcccggcttcgtggcgatgccgtcaagagcgttcttcgcatccgtcagagcggcctcggtctgcttcttgtcagccttggccttgtccagcttcgcgttcgcatcggccagcgtcttgtcggcgtcagccttagcggccttagccttgcccaagttggcttgagcggtcttctgctcgtcctgcgccttggacaacgtcttctccgcttccgccagcttcttctgagcttcggccagcttcgcgttcgcgtcggtgtagccgtccagcttggcttgggcttccttgacctgcttcttggcttcgtccactgcgtcctgagccttgtccacgttcgactgagcggtcttcacctgctggttcgcctcatcgaactcgttctgagccttcttggtcgcggcctgcttcttctcgtaggcggtctgcttcgcgtcggcctcgtccttcgcctgagcgtaggtgctgtcggcggtctgaccggccttgactgcggcattgtatgcgtcgagagccttctggtaggcttcgtccttggctttggcggtcttggccgcttcgtcggcggtctgctgtgcggactgcgcacgttcctgtagttcggcaagctcctgctgggcctgttgtgcggccttcttcgcctcgttcgccttgtcgagagccttctgatacacatcggcggcggagtccagcgcgttcttgtaggagagaatctgctgacggtactcgtccacggaaacgccactggtgtacaggtatttctggctgaagttctgtgcggcggtcagcgaacctgtgattgcgaaaccggtggtgtcgcaattcgggtcgatgatgttcagatagtgtccggtctgctcgtagatgtccggatacttcatgtagatttccacggcggtcatgttgcgcagttccggattcttctccgcatactggtcgaacagagccttctcttccgtataccagccgtcgtaggggttatcgtaaccccaagcgaggttctgggaggttccggtgaacacgtgtcccatattcggggaatacgtattgtagtcggcggcaagctgcgcgtcggcggtgtccgcatcgttgaccgtccactccggcagtccgaggctacgacgaatctcattgcccttgtcaatcatgtcgagagcatcgagcatgttctgcaagctggttgcggagttttcctcaccaatcttcacccaatcctcgttctgatacttgacaagctggtcgagggcaaactgggtgtcctcgttcttatagctggaggcaagcttccactggtagaagccgatggaaccggacgcgagctgcttgtccgcgttgtcggcggcggctttcttcgaatccgcgtcggcctgagccgtgttggcggcgtcgtccttcgcgtccgcgtccttctgcttcgcgtcgatgccgtccttcgcgtccgaagcgttcttgtcggcagtggtcttcgcattgtcggcgtcgttcttcgcagccaaagcggcttccagttcggccttgagctggctgatggtcttctgggattcgtcggccttcttcttggcgtccgaagcgttcttgtcggccttgtccttgtcggacttggcggcggcttcgttgttcttggcggcggtcagactatctgccttcttctgggcttcctgctgggcattcttgacctgttggttggcggattccaactgcttggtggtctggtcgagctgctggctggcgtcggagagcgcctgttgggctttcttctggttttccggattggtggcttcgccggcgttctgctgtgcctgattcagattcgtctgagcctgattgacggtggtctgcgcgttctgaacctgttggttggcggcgtccagagtggtctgggcgttgtccacctgagtctgagtctgattgacggtggtctgcgcgctgtcaacgttggtctgtgcctgattcagattcgtctgtgcctgattgtcgttggcttgggcctcgtccaccttggcctgtccgtcggacacggggtctgactgtgcgggggtcgtggtgaccgtaatggtattatccggcgtagtggcggtctgggaggttgcctgtgtagcctgtgccacggtgtcctgagtctgggataccgcgttctgcgcctgttcgatagcgccgttcacgtccggctggatattgttgccgtcatccgcgaacgcggtggccggtgcggcgagtgtcgcaaccgccacggtcgtggcgatgagcgtcttcttgacgtttgccaagattatctcctttgtttggtttcttttccacgtgtggggtggactttatattattttatattatcccccttattgagggttcatccaactcgcaaggaaaacccaaacgagaggaaaagcgccgtgacattctcccccgcctgtagaggcgggggcttcctgctcaagaaccccaatgggttcagtatcaacaggctatccccacatgccctgtggttcgcacgatttatgagtcgtgctactcgatgattctcattgcctcatcccgaatattccgggcggcgttcacgtcacggtcatgcaacactccgcatgatgggcacgcccattcgcggatacttaaatccttgaccagaggattcttgcaaccgcagtcgtggcatagttggctggatggataccatttgtccacatgaaccaactgtttgccttgacgggcgagcttgtattccaacatggtgcagaacatgccatacccgttgtccaacgtgcttttagccaaaccttttctggctttgcgaccattggggagataatgtcccggatgttcgtagtctggtttcggcttgggtttcttcatcatgcttttcatgttcagagtctccacgccgaccatatcgtatgatgcgacaatcctgttggctttcttatgctggtagtcgcgtctctgattggaggtcttctcatacagtcggccgacccgcttgcactgtttacgccagttggcggaacctttaaccatatgggagagcttgcgttgctctctggcgagcctgtcctgcattttccgatagtagcccggatattcggcgtgctccccgtcactggaaacatacaggccatgagacgcgtagtccaatccgacagtcttcaccggcttcactttttcgggtatttgggtttcgtactcgaaaagaattgtcgcggtgtatcttccggaagggcaatgctccacggtgacggatttcagtttccaatcgtcggggatgtgcttgtgttggcgtaccgccaaccatccgagcttgggtagtttcaacctccttgccttgtcatccaatctgatgttgccgtgggacagattcgtcgtgtatgtcttcctgccccgacgtttcgacttgtacttcggaaaacctgttttcctgtcctcgaagaacctcttgtacgccttctccaaggcgagttgggcgttgcacaatgccatgctgtccacctcgcgcaggaacgggtacgtgtccttgtacagggcgggcgtggggcggcatgattcccatgtggtctggtagtgggcgatgcgggtttcgagcatgaggttgtatacgaagcgtgcgcagccgatggtacggtctatcagccgcgcctgttcttcggtgggataggcgcggaatctgaccgccgtatgggctttcatacttatgccagtcctttctcgctttggctttcagaagatatcctcaaccaaagaagtcaacgactcgctcgtctggttcaactcccagaagccacgttcaaatttctcggccaattccatgacctgttcgaccttgtcgagaagtatcttggcggacttgtcaacagccttgaaagtggtgataggcacaccatcccgatacatggggattcgggcagtctccgtggggattccagccgcgcttccattgtctccagcgtattgcagtgagagaccgtaagtgagagagaaagtagcctccttgacgtatccttcttcgccccacatgcataaggtcatcttccaagagcgagagaaggaacgttcgggattgcagacatggcttttcgtccaaacgtacttgccttccttggtgttcctttgaaggtaggaaaggttttcggtcattcctttttcgaactcttcgagagtggtctgcttgttcatgggtttgctcctttttgattttctgtttttgtgtgaacgattccagtataccatataaaaagacaacaggaaagagtcgtgtcgcagggtctgaatattggtatatactggtcatgtccacaaataaaaaaaccaaagcgctgttcaagaaacggaaacgacacgccggggttgccagaagaacactgtgtgttatagtgggaaccacggcatatagtttaaacaagtccggtaacagaccggaattgaccgtagagcggcgataggacgcaagtcccaatcgccgctttttttcatgcagtgcggaaagagaacaacagaccttgaccgcaaaaaccaatatccactaccgcgtaggagccgacgtaggactcaacagcctaggattctccgcaatccaactcgacaccaacggcaacccgacagcactgctcaaaaccctcagctacatccacgacggcggagtagacccgacccaaaacaagtccggaaccacccgcaaagccgtggctggaatcgcacggcgaacccgcaacatgcgcaagcgccgcagccaccgtctcagccagctcgaccgtcagctctaccaactggggtatccggtggacgaagtgccggaaaccgaacacggactctacgaatactggaacgtgcgttccgcattggcgacagcctacgttcccgacaaggacaggcgtgaccggatgatggtcatggcagtccgccatatcgcacgccatcgcggttggcgcaactcctacagtcgggtcgaaaccctgttcgaggacgtggaaccgtccgaccagtacaaggatttgaaacagcgtgtggagacccgtcttggagtgaaactggacgatgacatgaccccggcgcagctcgtcgcattgacgctcaacgaacgcgacaagaacttcatgagggttcgcaccagcaccaaatacggtgagggcattctgccgaaccgtctcatgcagtccgacaatgcgcgtgaactccgacgcatcttcaccgtccagcagatacccgaagatgtttggaaacccatcctgcgtaccgtgttccactgcgcatcccccaagggttccgcagagaagcatgtcggaacagacccgctcgaccaaacccagaagagggcgttgaaagccagcatcgccttccagaagtaccgtatcctcaacgtcatcaccaacctgcgtatccgacgcaaaagcgaagcatcccgaccgttgaccgtcagcgagaaacaggatgtgtacgaactgctcaccaccgccaaagaagacgtggaatggttggacgtgtgcgccgtgctcgacatcgaacgcaacgaactcaaaggcgtcggcaccctcacccatgacggggaggaacgcatcggcaacaagccgccggtattggacaccgtaatccgactccacggaatcaaaaacaccaaactccgcaagatgatggacgcatggtggaacgccgccaccgaggatgaacaggccgcgatgattcgactcctgtccaacacggttgacttggacaaggtgcgcgacctcatcgaatacgcctcccccatcgaattcatcgacgggttggacgaagacctgctcaccccattggactccatcagccttccagtcggacgtgccgcctactccgaaaagaccctcgaccgactgtccaaacgcatgttggaaacggaagacgatttgcattatgcgattcgccacgaattcgacgtgccagccgactggaaacctccggttccacccgttcaggagccgaccggcaatcccgccgttgaccgagtgttgaaagcgttcaaccgtttcctcagccaatgcgaacaagagtacggcattccggaaagcatcgccattgaaaccacgaaggaatcgttctcttccgtcgcgttcggacgcacgctcgactatgagcgccgtcaacgtcgggacaaggacaatcagacacgtgccgcaatccgtgaggatatgaggaagcaactgtccaacggcggaagcttcaaagtccacgactacgacattcgccgttgggaaatcgtccaatcgcagaacaacacatgcctgtactgtggtgcgaccagcccacgattcagtttcgataagtcggaactcgaccatatcgttccccgtcgtggcgtcggctcggacagcaaacgcaccaacatggctgcggtatgccccgaatgcaacgccagcaagtcgaacgttccgttcgccgtatgggtgcattccgactatgcgaaagcacatggcatcaccatgaatgatgtcatcgcacgagtgaaccagttgatgttcccgccgtccatgaaccgcaagcaggtcggtcaggtgaagaaaagcatcatcagccgactcaagcagaccgaacaggacgagccgttggacaatcgttcaatcgaatccgtgggctggatggccgacgaactccaccgccgtctcgacggacgatactccaacaagacggtgaaagtgttcacgttccccggctctatcacctatgaggcgcgtcgagcttccggtatcgatggtcaaatccatttcatcggcgcacagtggaagacccgactcgaccgccgacatcatgcggttgatgcttcggtcatcgccatgatgaaccagagtgtcgccctccgtcttgccgaacgccattacctacgcgaatcgcaacgcctgtgcggaaccccgttcggacaagcggattggaaacagtatccaaacaagaacacccccggctacgtccggtaccagcaatggattgaacagatgaaaagtctgctcaacctgttgaacaagggtttgaacgaggataccattccggtcgttcggagccgccgcctccgcttgggcaacagtaccgcgcatgatgcgacggtgaaaccgttgcaatacgtgcgactgggagacgcgctctcccccacgctcatcgaccatgccatcaccccgcaggtatggaaggcgttgacccgactgccggactataatcctcagaccggtctgccagccaatccgaaccgtgtcatcaccgcattgggcgaagtatgccatgcgaaggacgaaatcggcttcctacccggcaacaacgcgcaactgtacgtcaacggtggtgccgccgacattggaggaaccatccatcatgcccgcatctaccgttgcgaacaggtgttgaagaacggaaaacgcaagacgttctatggcatggtgcgcgtgttccaatgcgatttgatgaaacgcaggaagaacaccgacctgttccgaaccccgttgcatccggctgacgtgtccatccgttacgcggacggcaaagtcagggacgccatccgacagggacacgcaacctgcatcgcacgactcaccatcaacgatgaaatccagctgacatctgagatgatgatggacatgtgccccgaatatgcgaacatgttccacacggattccggcgtcgaacgacgattcatcgtggccggtttcccctcccctatccagttcagactggttccctccgtcattgcagaagaaggactgggtaagatggttgaacaaggtttggaggttcccgccaaggttgagaagatgttcaaactgcacaccttcgttccagtagtcaataagattggacatgttttagagcagtaaccaccgcttctaatcgtttctaaaaaggaaagggtctaccaaaaaccatctaaggttatcggtagaccctttcctttttaggaggttgatatggcaaaagggtggcgagtcatcgactgcaccgcaatgaccggcaaactgacttacaagcgcggacaactcgtcgtgaaacaccacaatatggagacgcggataccgttggccgatacggcggtactgctgctcggcatacaaacaaccgtctccacagcactattgcagcagttggctgtcttcgacgtggaagttctcatatgccagtggaacgaaatcccaatagccgcattgcaaccatggaacaaaccaaacacccgttccgccgcacgacaaaccgcccaacaggaaatgagcattcccgcgagaaaagcagcatggaaacagataatacaagcgaaaattctcggacaatcgcacgtactggacatgctcgaattggacggtggacagctccttcgaagcctagccacacaggtgcgctcaggagacccgaacaacatcgagggacaggcggcacgggaatactggcatcgcatgttccctgaagaacaattccgccgattccccggatatggcgaggggcgcaacgctcaactcgattacgcgtacacgatactgcggggattcctgattaagtccatctgcacggcgggactctcccccaccatcggcatacatcaccattcagccagcaactatttctgtctggcagacgacctgatagaaccgttccgaccggccatcgactacgggataagccaactaccggacggaccgttggattcggaagtgaaacagcagatagtgctgtccgtcaacagccaattcaacccgaaaggactgaccatcccatcactggtggacgaattctgcggacaatacgcacaatactgcgaaggctggttggacaaactacccgtccccgtcttcggaaaaaggcgctgaaaaatgaagaaagataaggataacggcatgtggacgctggtcatgtacgacctgcctattacaacgagagaggacgctggagccgcgaacagattcaaccatctactctctgatttaggcttcgttcgagtacaatattccgtctatgcaagatacacccctacccaatcaggcggtcgttctgcgttaaagtatattaaagccggactacctccccacggcaacgtgcgagtactctgtgtaacggacaatcaatggtctgattcactgaaatacatcgacaaaaaacagcaaaacacgacagaacaaccggggttactgacgctttttgacgacgaagaatagtttaaaaacgttgatatgaagccttttggtcaaacatagagtttgaccaaaaggtaatacgacatatattcaaacaccgcgcctgttaagccgctatatatggagtttgaccaaaaggtaatacgacatatattcaaaccaaaacggaaacaggcgtcgaatggtgaagtttgagcaaaaggcaatacgacatatattcaaacacggcagcagaccaagaaatgtcgtaagagtttgagcaaaaggcaatacgacatatattcaaaccttgattccctcatgtttcagtttgagtaaaaggtaatgcgacatacattcaaaccagtagctccagatgacctcgcggcagaagttcaagtaaaaggtaatacgacatatattcaaactgtccagtgatttccctctcctcaccggagtttgagcaaaaggtaatacacatatattcaaacaggaaaatacggtatatattcaaacattcaacaaaattcccaacaaagaataagccggtgtttcgccactcccaccggcgaggagctgttcacacaaagacgcggagcaggagaagggtggagagaaaaacacccgtagactccgcttttttgtttggcgttgacatggcttggttgtttcccatcagtgagttcatgtcgtgaacactggcatgtatgcgtgagtcaagagggtgcaaggcatacggcttgctgacagtccttcatggatttcaggattgtcgtccatcgcgcatgtgagagtcatgccatggattgtcccacgagctttaggggataaaaagtgtgggactttgtgcgggagacgagattcgaactcgcaatacttgcttggaaggcaggtgtgatgaccttttcactactcccgcagtaagaggaatagaattgtgattgtttacgggaaagcactacatacacgagatgtttttattacgaccgttccaaacttttcggaacggaaggctcgcaaccgcaacccattccccagcggagtcggagggattcgaaccctcgaaccgtatgaaacggttaacaccttagcagggtgcccctatcggccactcaggcacgactccgaagtttcgacacgccaaaaacagccggtcgaaacttagctccccatgatggactcgaaccacctctaaaggttccaaagacccgtgtgctgccattacactaatggggaatgtgcagaccgttttgacggcccgcgaataattatttggattttgaaatcagcttgtcaatgtccgcgcccaactgccttaactgggcgaaagagttggcgacgttgttttgcgccgtttcctctctctgctgagcggcttccatcagcttcttgctgttcgcatccaattcggcggcatgctgttcagctttcttggttcggaggtcgatttcctgtgacgccttgtccaaacggttgactgcgtcagcttccgccttgctgataatctgttcggcttgtttcttggccgcgtccaactggttggcaaccttatcgtcggtttcctttttcagtttggcgcattcctgttcaagcttctgcttcttatcgtgtgcggcggtcatcatctgtttggtggtttccgtcgcggagtcgagccgcttctgtgattcatccttggcctgttggagaatctgttcggcttgcgtgcgggcctgttccagctcctcacgtttcttcgactcgtaagtgtttttcaacgtttggaattctttgccgaggctggtgcctaattcctgcatcgggttttccgacgcttgacgggcgtcctgcaagtcggcgttcaaccgtccaatctgctggcggagggattcaacttcctgctcccgtttgccgagttcggattgacgcttgtccaagaccatgtttttttccgtcaactggcgttgcagattccaaatctgtgtttccaacccgttcacgtactgttcaacggaatccttgcgataaccgttgaatccggtggggaggttgagtggttgtacctgtggctgggtcattccttccacggtgagagcgtgggaggagatgacccgtgtttcatcagacatggtcattttgagttccttcttttctggttgaaaaacacgagggggtcgtgcgggaggcgaacccgcttcttcaaacgtccaagttttctaatcgaagtggcaccgtcgattagaaactgtgtccgtgtgaagaatcctgtcttcgacccatggcctactatttgaacattccaacgcccgtaggccgaaacgttggaatactttcccgcctgtgtagtgtgtgatgggaaaattttcctgcttgcagtgtgcccaatgcgtcagtattggtacaaaatatcgcgtgaattgaatttattacgcaagcaggaaaattcgagcctagagtaggaatcgaacctacgacctgcgttttacaagaacgccgctctaaccaactgagctatttaggcattgacataggtttcaagatttgagttttgaaaacccatgtctgaactaaggaagaaccaattacggttcgtgctttgagagggaatcgaaccctcacgtcctttcggacagttgcttttgaggcaaccgcgtataccaattccgccaccaaagcaaagcaaagcaagagccgccgcaacggctcaggcaacggttcctactactgggtaggtcagctgaaaactagaaccgcccataagaacggttccgacgccttctcaaacaacctgtaagagaagtagcacggcatgttggacttgaaccaacatcgacggttttggagaccgtaatgctaccggttgcaccaatgccatatgtggatggtcacacccatgaagcgtgaccatccaccgagtcgccgttaacggaagcgtccgccgctttcatctccagacaagccaacaccagcggtaggcgcttgccttcgggggtagtactacttccccaacgcggaatgtgaaggattcgaacctccggcacctcacagtgcgactgctttcgagacagttgcattaaaccactctgccaacattccaaaccggctgtagttaacgtccaagtcggctacgcagaaagacgttcggcatggcggactggattttaccgccaacggcaaggtcgtgggctgttaagtaccccgtttcaccgttcttccccttcggtcatcagccgcctgattagggcagggaaactcttatcctccacaagaccatgtaggattattcgagcaatgccatcggtttcacggacagctacctccgtgaaacctagtacccaaggttggaatcgaaccaacgacgcccggtttaggaaaccggcgctctatccgctgagatacaagggcgtatgccgtctcgtcgcggggacgtcgcaactcgtcttccgattcgacggcattcacatcagcttttcgctagttgccatggcgttgcgattgccatggctttcgcatactgggatgatggtgtttagcgcgcgttccacgcgaccgttttaatttatgtactcgaccctcagaacagaagttctgacagccagttggagtctcaccaaccttcccgcagcccggcgactgtagaggtgccccccgtgggattcgaacccacaacccaaggtttaaaagacccttgctctaaccattgagctagaggggcttgctaggaggtgaaggaacgaaagaatccacctcctagagttgattggattgacggaaactgttttttgtttgcaaagttttacctgagttatagagtctgtaccgcacggtcgcttagcacgcatattcagtttccgtgtggcgagcatcttgcggacgctcgtcacgtcgtggagccggagggaattgaaccctcgtccttgaaaacgttgatgatgttttctacatgtttagccatctcgtttatatatgttgaaagttccagtcgaagaggcaccccggaacagttttgcaactcagtcatgaaacgatggacagttgccgttcaccgagtttttgctgtcctttctttttcagaatcgccttacagcaaatcagcgaccctgttcttccttcaaaccgtttttcaggcggcgagctggaagttacgcgaagaattagtcttggcgtttattgtttgacatggattgatgacggttgtccacgtcagcctccgacatgcttacattaccttgattttcaagtcgaaacctgtcggccccaaaatgccgtcttccttccggttttccgtccgagcttcccataggtgtggttcagaaccaatagaatggttggctgggatttccagtcggaaggttgacagcggttttgcctgtcatggttttgtcttcaagcgttttcatgcttttcctcgtgtgtttgagtgaacaggtgaggataggtgtgatagttcttgaagattcaaccatgatgggcaagtcttcatatcgaacatgattcgacgggctttaagtcctatcgaccatgtttccttatctctattcatttttcaaacgggcggcaacattcggggagtgttccttactgggtaaggtctttaccccggttgccttggtgactgttccagtagcgggctggatatgagaagcgttcttctcgcagtctgttcacgcgtgatgtttttgaacctcgttttgtgtgaacactgccagtatagcagttctaggaaacatgtcaaatcacagaacgaaaacaatgttttccaaggcgtgtcggacattgccaaccttcaccaacagcattggatacttggacaatactgtcgcccacaggttacactcccctacatgcagtccaagcagatacaagaagcggccaccgtcgcatacatagaagaccagttcaagtcggaagaccccatgctcatacagtccgccgccggaaacctcgccagactgtacggcatgaccacgctctcccagttgacggggttggcgagaccgtccctctaccggagcctgtgcgagaacgggaacccgtccttccagaccatgtgccgaatattggacgctatgggctacacggtgtcggttcgccgcaaggagcagaagccgaatgagtgacatacgagttgagcaggatgttctcgaccttggttcgacgggcatggagttggatgttcgacgggtcaacctgttggatgatatagaagcccgcgagccgaacagtatggaaatatggtatgggcattccattctcaccgccacactgtttccaccagcccaaccgtccgatgatgtggatttcgtcagcaagtcgaacggacggttggaatacatgcttgaagctggcgtgacgggtgatggggatgataggaaacgccggttcccgttcggcaaatatccgagactgttgatggcttggatggctaagcagattcgtgcggcgaaaggccataagacgaggaatgttgacccggagacgaagaccatcaccattccaagcatctaccagttgtgtgaggaaatgggattgccgcatggcgggcgtaccgcgaagagcgtgcaggaacagttggaactgttgttggcttgccgtatcagtattcgcgcgtccggcacgggcaaggggttgaatgtgagggatacggcttatctgcctatcgttcaggccgtgcgcatcatcaacgatgagaagaacgtgggctattccggtgccacgttccgtctgaccgatgaagtgtatgaacggttgagtcgtgagtcggctccgttcgatacgagagtgtccacttaccttttgaaaggcaggtcggtcatgccttacgacatttacatttggctgactggcagtatgaagaatcttcgccgtgaccttccggtgagttgggattggctgtatgaacggttcggagaccagattgcggtcaagaagtcttttcggcgcatgttccgtcaatcgttggagaaggtcaagaaagtgtatccggggttgaatgttgagtgccccacgtatgaggattacattattctgcatccgagtcccacgtcggttcctacccgtgctgtccgtgaggttgaggtgggtgctaatggggatgtgttcgaggtggctttgcattcgttgcaatcggttcaacggaaaggtgtacgaaaggccacgtcagattgagttgaccgtggcttttcaaacaccttggagggtattggtgtctgaaaggccacgtgtgggcgggtgtctgcgtggcttttcggacacctttcgcatggcttttcaaacacctcccaacgggctgaacggtttctcgacgtggcctttcacgcaccctcgtatacgctacggattgcactcgcttttccagctttaatttatccactggtttttcgttggaatttcaaccattccacacgcttatccacatttccacaggcggaacgtagaacgttccgtggactaacaggcacctttagtggcgtttcaaacaccatgacggttatgaatcatgccggacatggactatcaaacaccatcagtatggactatcgaacacctttttatggggtttccgacacctttccgtggactaacaggcacctcgcatggtaggaaaaccgttacgggagtaaggctcaaccggcatggttatatattatatgctcatagtttcttatagttccggttttccgagccgaggaatcaaccagtgcgaaatactggagttatgaaactcctatacaaaatcacaggcatatatcgcaaggcacgctggctcatgtggctgggtggaatcctgaccaccacgcttattcccatgatgggctacggaatgcacgctttgaacattgcgaaggacaagcaggaattagccacggacaatccggaactcgcttcggaggtgacggctggctcattgttcgattggataaccggtgaaaacgtgggaagaatcattggaatcattacggttcttggcattgttttcatcctattgctagttgtgttgcaaatcttctcgttcattggtgcccgaacgtcagtatccggaacagaccatgataccgccactaaggaggccaaccgtaggcaagcagacttggacgaaatggacgtggaaccagaggatggagacgtggcctttcaaacacctccccaaccgaaacccgtcaggaaaagcaagccgaaaccagttcccgccactgatagtgacgaggatgactggttcatcgactaaaaggaaaggtgctcgaaaagccacgcgccgaccggctcgtgcggactattttcccagttcgctgagcttggtcggcgctttcttatgtttgagcggcaacggtttcccgtccgtctgattataaatgcagtagttgccgttgtcggttttgtggattaccacgttgacctgccggttgtccttcgtgtagacagagcattcggcgttcacaccgttctcgatatccttcatcgaatccacggtgtattcgccccgtctcgcggaatgtattatccctttggttgttgggatactactgtctgtatcggagtactccttgtgtgtgcagtcgatactggatagtccgtacacgtattccaagctttgactgagggacggggccttcggcattctcaccgtggtcgctgtgacgaacgaaaagaagaacacgagaacggaaacaatcgaaaccagtatccgacccttgttcacagcgaaagcgccgacaacaagagcaatgacactgatgataatgagagaactgatgacgaaatcgcccgtgctcgcttggtcggcaacctcccgccaagcggagaaatccgccgtcacttccgaaccttttccaaccggatggacagttccgccaatccgtcgatgattctattctcctccacggttttcctcccaccggattgaccgtcacggaagcgtttctcgcactcgcccatgcccctgcggatatcctcattggtgatgccataggcgatagcgaacgttcccaacgcttccaccacgtcgcaatactcttcgaccagccgactgtaaatccgcttgtcagaagtgccgtcggcaacccagtccattcccactgcggcgagttcagcagactcctccaacagtttccgccactgccggtcggatggttccgcatattccggagcgaatgttctgacggtgccaagactagccaacccgtgttcagtcatttccacgccacgcccgatgaacttgtagccgggattctgttcgcaatagtcgcgcacgtcacgcaaccattggatagcgttggggatactcccccagcgaatgacttcaccatccttgtcgaggaagtatttctgctccaactcgtggatggaatgttttccaatttcatccaacgcctcgttgacgatgtccttgaccacgatggcggacttgccgtgcaggtcggtggttggccgcacatggaacgcttggaagaagttcgaatagttgaaagtcggattgcaggaagtgccgaccatatccaaatattccagtccacggtcttgccagtcacaagcgaccatgaacgccatatcgtccggaatgtcggaacggattatcgcaatatcgtaactcaaatcgcacctattctttcaaaaagtgcccaacagaacatgatgaaaaggattgtcgccatgatgatgaacgccaccatcagggcgacggccaaatgataaaggaaccgccagccgtagattcgtactcccagccaacgtttctgcc

SEQ ID NO: 4267 - DNA, 19610 bp, synthetic construct
  misc_feature 1..19610: note = Synthetic
  source 1..19610: mol_type = other DNA
tccaatcctccttgccgtttattagaatcttcaataactgctataagtgtagcatactattgaaaagagaaaggcgattccttcccacccacaagaggtggggtatcctcgccaaaaaaatcatgaacatgatggttctcatggtcttggtgttagttttcaattttttgctctctttttctctttgattattggtttctttttgtggaatatgtttttaaggctttaacctaggaaggccatttcgtcggctagttcgtcttcgcctttttctctgagtaggtttgccacaccgtatcgttgattccaacaacgcactatggtatccgcttttatgttgggctctccccagacggttggcaggatggaacattcgtccggcttgtggctgatgccgtagcatgttccgtttacggtattgtcatagacgagtcgaaccggcttaccgcagaatgggcatggggctagatggaaactcaaagaagctctcctaatatctcttcgattgggatgtcttcttccacatcgatagtcttatacaaggaacgtagaaataaggcagtattccaatttaggttttctttgtgtgaatactcctagtataacacgtttttggtttgggtttaccgcgcatattctcaccccgccgttgcatgtcgattagtcggaacacttcctcctcgtccaaatcgacccaacgcccgtcgaacggactctgatagaactcgttttgcggcagtggacgaatctcaccatctttcaaacggattcctccctctgttttcgacattcacggaaaacacgaagaagaatccgcgtagccgcctgttcgggtgtcaaatctttcaagtccaataccggaatactggtggaaccaacattcacgtgcagtccatcgagaatgccgtaacagtagtcattataggttcttaattcggcgtggactccacggtacggcatggaaatgttttccacgtccccgttgcaatcccagtgggacccgccatgccgttccaccaaatccaacaatgcgtctttgacctgcgagcctaacgtggaagccgaatacgtgattttaggcgtcacatagttcatgcatccgcagttcggacaaggatacgactgccgttgcccgattgttccaccgtacagccgggtgataggagtggaacagtatccgcaatccagcctgccgttgataaccatattgctactaactcctctattcggttccatatttttttggcggcttcactcggcggcattcccgcatattcgaatacaggaagctcctcatggttgacgttcacatacaatccgtcaaccctgtcataggaaggttcatcatgaactaccgtgacggcttaagcctcacggtagttcatttttcttctcgaccatgattgtcagttcttcttctgcaatctttttgcacgtcgttcttcgggagtgccgaaacgcttgtagtagcattccttggagcagatgtcgtagctttcatgccggaatagtaggggtattttcgaccgcattcggcacatgttctggtggccgtagccatcatgtttttggcgaaggcgatgccctccggagttccagttgcgatatacctgtcaccgcgcttgacgtaggtgacgcacccgtagtggcggagccgttccatgctggctttggctgtgggctgggaaacgtagttccagccgtatcctttgcgggagatttcctcaagaatgttgaacatgtcgtagtggagatacttgcgttcgagcttgtactgtccgacatgtgtttcaacgaactcgctgatagcgtccatgtcggggatgaaccagtctccgatggcggagtagtgttcgattcttccgaagcctttccggacgagggatttgaggattttcttggtttgttccaagaggattcgactgttgtcttcctgcttgtcgcgggatgaaatgaattccaagagactgtattcgtctgctgtgatgttgctcatgtctggctccttgtttgcttgaactatctttatgtgaacagtgccagtatagcatagattgaatgtttagccaatctcgccaaacgtcactcagcgcaagccacggcggcatgaaagactttgtgtgaacaattccattatgacttatgtggcctgaaatgcaaaaaacaaaaagccccgaccctccttatatcaggaaggtcagggcttccaatctcaaacagacatcagtcgttgcggcggacagaacgctccaccccaacgaagccaacacccatcatcagggcgacgatggatactgcggcgatacccgccacatccacgccggtggcggcaagattatcctcaccagtggccgtgacggtcttgttgtcggcgtccaccttatatgtggtggtcttgtcgttcttcttgtcagcggtgttcatgcccttgttgacggacgtggaattgccgttgttgccgttggaggaaccgttggcaccattggaaccggtggtattgccaccgttgccggtattgccggtgtcttcctcgttggacggaatcgtgtaaccggggtcgatgtcgtccttctcgcccggcttcgtggcgatgccgtcaagagcgttcttcgcgtccgtcagagcggcctcggtctgcttcttgtcggccttggccttgtccagcttcgcgttcgcgtcggtcagcgtcttgtcggccttggccttagcggacttggccttgtccaagttggcttgggcggtcttctgctcgtcctgcgccttggacaacgtcttctccgcttccgccagcttcttccgggcttcggccagcttcgcgttcgcgtcggtgtagccgtccagcttggcttgggcttccttgacctgcttcttggcttcgtctactgcggcctgagccttgtccacgttcgactgggagtcttcacctgctggttcgcctcatcgaactcgttctgggctttcttggttgcggactgcttctgctcgtacacggtctgcttcgcgtcggcctcgtccttcgcctgagcgtaggtgctgtcggcggtctgaccggccttgactgcggcattgtatgcgtcgagggccttctggtaggcttcgttcttagccttggcggtcttggccgcttcatcggcggtctgctgtgcggactgcgcgcgttcctgtagttcggcaagctcctgctgggcatgttgcgcggccttcttcgcctcgttcgccttgtcaagagccttctgatacacgtcggcggcggagtccaatgcgttcttgtaggagagaatctgctgacggtactcgtccacggaaacgccgctagagtacaggtatttctggctgaagttctgcgcggcggtcagcgaacctgtgattgcgaaaccggtagtgtcgcaatccgggtcgatgatgttcagatagtgtccggtctgctcgtagatgtccggatacttcatgtagatttccacggcggtcatgttgcgcagttcaggattcttctccgcatacctgtcgaacacggccttctcttccgtataccagccatcgtaggggttatcgtaaccccaagcgaggttctgggcggttccggtgaacacgtgtcccatattcggggaatacgtattgtagtcggcggcaagctgcgcgtcggcggtatctgcatcgttgaccgtccactccggcagtccgaggttacggcgaatctcattgcccttgtcaatcatgtcgagagcgtcgagcatgttctgcaagctggttgcggagttttcctcaccaatcttcacccaatcctcgttctgatacttgacgagctggtcgagggcgaactgggtgtcctcgttcttatagctggaggcaagcttccactggtagaagccgatggaaccggatgccagctgcttgtccgcgttgtcggcggcggctttcttggaatccgcgtcggcctgcgcggtgttggcggccgtgttcttcgcgtccgcgtccttctgcttctcgctgatgccgttcttcgcgtccgccgcgttcttgtcggcggtggtcttcgcggtgtcggcgtcgttcttcgcggccaacgcggcttcgagttcggccttgagctggctgatggtcttctgggattcgtcggacttggccttggcgtccgaagcgttcttgtcggccttgtccttgtcggatttggcggcggcttcgttgttcttggcggcggtcagactatcggccttcttctgggcttcctgctgggccttcttaacctgctggttggcggattccaactgcttggtggtctggtcgagttggctgttcgcatcggagagcgcctgttgagccttctgctggttttccggattggtggcttcgctggcgttctgctgtgcctgattcagattcgtctgagcctgattgacggtggtctgtgcgttctgaacctgttggttggcggcgtccagagtggtctgggcgttgttcacctgagtctgggtctggttgacggtggtctgtgcgcggtcaacgttggtctgtgcctgattcagattcgtctgtgcctgattgtcgttggcttgggcttcgtccaccttggcctgtccgtcggccacggggtctgactgtgcggggggcgtggtggtcgtagtggtattgtccggcgtggtggcggtctggggggttgactgtgtggcctgtgcacggtgtcctgagtctgggatactgcggtctgcgcctgttcgatagcgccgttcacgtccggctggatattgttggcgtcatccgcgaacgcggtggccggtgcggcgagtgtcgcaaccgccacggtcgtggcgatgagcgtcttcttgacgtttgccaagattatctcctttgtttggtttcttttccacgtgtggggtggagtcttttacattatacccccttgttagaaggtttccagctcgcgcaagggaaccccgaacgagaggaaaacgccttggatgggattcgaacccacgaccatccgcttagagggcggacgccctatccactgggctaccaaggcaaagccccattgtggggacattggattcagaagatgttctcctccaaagaagtcaacgacttgctcgtctgattcaactcccagaatccacgctcgaacttctccgccaatcccaagacctgttcgaccttgtcgagaagtatcttggcggacttgtcaacacccttgaagtggtgataggcacaccatcccgatacatggggattcgggcagtctccgtggggattccagccgcgcttccattgtctccagcgtattgcagtgagaggtcgtaagtgagagagaaagtagcctccttgacgtatccttcttcgccccacatgcataaggtcatcttccaagagcgagagaaggaacgttcgggattgcagacatggcttttcgtccaaacgtacttgccttccttggtgttcctttgaaggtaggaaaggttttcggtcattcctttttcgaactcttcgagagtggtctgcttgtccattttttgctccttttggttttctgtttttgtgtgaacaaattcaatataacacaaatattggggcaaatcaacccaacgaagccaactccacctcaatcccagccaactcctccaacaaacgcttacgacgagccaccagtagactcttcctacgagcacccgagaacacaggatgccccgaaacaacatcatgagcgttcaccatattcttccccgtcggacttccatcacgattattgcccaacatggtcaaatcagccgtattcaacgaaccatcccgaaaacggaacccgttctcgaacatgacccgctccaaatgggcgatattcaacgctccaaactggggaaccgtgaccccactggaatagtggagacggcgggactcccgcagtcgggccagataatgcaggaattgagccaaggatattttagacagtttcgccaatgagccgacaccaatcgaatacaggcggatacggaaatcggagtcatccaccccctcacgatataaagcggaatcctccaccgagcggaaatccaaaccgttttttctcaaacggttcccaacgactcgcatataatccgagccaaaaagtccagtgaactgttcggcggtcatcgcggtgatatccccgaccgtgccaagtctcattttcagcttgcgcaaccggaattggtcggagatttgtccgcgagtgttgacgaacagtttttctatcgggtctaccggagtcactgtggacattctataatccccttttcttaacagccttcgccgtggatggcgttgcggtaggctcccccataaccgtcttcctcctcatcctcgacggcggtcggaacgtaatcctcgacgtaatcgacggaaccaaggggatgctcacgcggttggtggcggaaaggaacgcctgtatccgttcagggttcgccaccctgtattcggtgcggcgaatcggcggacggtaggtcattgggtagaacacgttttccaatagttcaccgctgatggcgtggagtgcgatgctggtttcgtggtcgagcacgttggctgtgatgacgggtttcgtcaggtctatgttgtcttccgttatgagcgtatggccgctgttgaggtggattatcttccacatttttacgttccttctttttacttcagcttgattgtgtgaacgattccagtataccttataaaaagacaacaggaaagagttgtgtcgcaaggtctgaatattgagatatactggacacgtccgcaaataaaaaaccaaagcgctgttcgaaaaaacggaaacgacacgccggggttgccagaaaaacactgtgtgttatagtggaaatcacggcatatagtctaaacaagtccggtgacagaccggaattgaccgtagagcggcgataggacgcaagtcccaatcgccgcttttttcatgcagtgcggaaagagaacaacagaccttgaccgcaaaaaccaatatccgctatcgcgtgggagccgacgtaggactcaacagtctaggattctcggcaatccaactcgacgccaacggcaacccgacagcattgctcaaaaccctcaactacattcacgacggcggagtagacccgacccaaaacaagtccggcaccacccgcaaagccatggccggaatcgcccgacgaacccgcaacatgcgcaaacgccgccgccatcgtctcaaccaactcgaccgtcagctctaccaactgggttatccggtagacgacgtgccggaaagcgagcatggactctacgaatactggaacgtccgctccgcattggcaaccgcctacgtccccgacaaggacaagcgtgaccggatgatggtcatggctatccgacatatcgcacgccatcgcggttggcgcaactcctatagtcgtgtcgaaaccctgttcgaggatgtggagccgtccgaccagtacaaggatttgaaacagcgtgtggagacccgtcttggaatgaaactggacgatgatatgactccggcgcaactcgtcgcattgacgctttccgaccgtgatgagaatttcatgaggttcgtaccagcacaaaatacggtgagggtgttctgccaagccgtctcatgcagtccgacaatgcgcgtgaactccgacgtatcttcaccgtccagcaggttcccgaggatgtttggaaacccatcctgcgtaccgtgttccactgcgcatcccccaaaggttccgcagagaagcatgtcggaacagacccgctcgactcgacccagaagagagcattgaaagccagtatcgccttccagaagtatcgtatcctcaacgtcatcaccaacctgcgtatccgccgtaaaggcgaggaaccacgtccgttgaccgtcagcgagaaacaggatgtgtacgaactgcttaccaccgccaaggaagacgtggaatggttggacgtgtgcgccgtgcttgacatcgaacgcaacgaactcaaaggcgttggtaccctcacccatgacggggaggaaagaatcggcaacaagccgccggtattggacaccgtaatccgactccacggcatcaagaacaccaaactccgcaagatgatggacgcatggtgggatgtcgccaccgagggcgaacgggccgcgatgattcgactcctctccaacactattgacttggacaaggtgcgcgacctcatcgaatacgcctcccccatcgaattcatcgacggattggacgaagacctgctcaccccgttggactccatcagtcttcccgtgggacgtgccgcctactccgaaaagaccctcacacgactgtccaaacgcatgttggaaacggaagacgatttgcattatgccatccgccacgagttcaacgtgccagccgactggaagcccccggttccacctgttcaggaaccgaccggcaatcctgccgtggaccgagtgttgaaagcgttcaaccgttttctcagccaatgcgaacaacagtatggcattccggaaagcgtgtccatcgaaacaacgaaggaatcgttctcgtccatcgcgttcggacgcacgctcgactatgagcgccgtcaacgtcgtgacaaggacaatcagatgagagcagcaatccgtgaggatatgaagaaacaactgtccaacggtggaagcttcaaagtccacgattacgatatccgccgttgggaaatcgtccaatcgcagaacaacacatgcctatactgtggtgcgaccagtccacgattcagtttcgacaagtccgaactcgaccatatcgtaccccgtcgtggcgtcggttcggacagcaaacgcaccaacatggctgcggtctgccccgaatgcaatgccagcaagtcgaacgttccgttcgccgtttgggtgcgttccgactatgcgcgggagcatggcatcaccatgaatgatgtcatcgcacgagtgaaccagttgatgttcccgccgtccatgaaccgcaagcaggtcggtcaggtgaagaaaagcatcatcagccgactcaagcagaccgaacaggacgagccgttggacaatcgttccatcgattccgtgggttggatggccgacgaactccaccgccgactcgacggacgatacgccaacaaaacggtgaaagtgtccacgttccccggctccatcacctatgaggcacgtcgagcttccggcatcgacgggcaaatccatttcatcggcgcacagtggaagacccgactcgaccgccgtcatcatgcggttgacgcttcggtcatcgccatgatgaaccagagtgtcgccctccgtcttgcagaacgccattacctacgcgaatcgcaacgcctgtgcggaaccccgttcgggcaagcggattggaaacagtatccaaacaagaacacccccggctacgtccggtaccagcaatggattgaacagatgaaaagtctgctccacctgttgaacaagggcttggacgaggataccattccggtcgttcggagcctccgactccgcttgggcaacagtaccgcgcatgatgcgacggtgaaaccgttgcaatacgtgcgactgggagacgcgctctcccccacgctcatcgaccatgccatcacaccgcaggtatggaagcgttgacccgactgccggactataatcctcagaccggtctgcccgccaatccgaaccgtgtcatcacagccttgggcgaggtatgccatgcgcaggacgaaatcggattcctacccggcaacaacgcgcaactgtacgtcaacggtggtgccgccgacattggcggaaccatccaccacgcccgcatctaccgttgcgaacaggtgttgaagaacggaaaacgcaagacgttctatggcatggtgcgcgtgttccaatgcgatttgatgaaacgcaggaagaataccgacctgttccgcactccgttgcgtccggctgacgtatcactccgttatgcggatggcaaggtcagggaggccatcgcacttggaaatgcgacctgcatcgcacaacttaccgttaacgatgaaatcagactgactccggaagtcatggaagacacttgcccggaatactcgcgcatattccatactgattcgggagtggaacgaaggttcacggtcttaggtttcccaacctctactaaaatccgtctggctccttccgtcatttcggaagaggggttagacaagttgaaggaacaaggagtggaaataccggtcaaggttgaaaaaatgttcaaactacacacttatactccagcaatcagtaaaatcgggccgcttttggagtgctgaacacactgctttcaaccacccctctaaatagaaagggtctaccgaaaaccatataaggttatcggtagacccttttttaggaggtttattatgacaaaaggatggaggatagtggactgcaccgccatgactgggatactccgttataagcgtggacagcttgttatcgaacaccacgatttggaaacatgtattcctttagcggatacagccgtactgcttttaggtgttcaaacgaccgtgtccacggcactattgcaacagttggcgttcttcgatgtggaagtactcatatgccaatggaacgaaattccaatagccgcaatgcaatcatgggctaaaaccaacactcgttccgccgcacgccaaaacgcgcaacagacaatgagtctaccatctagaaaatccgcttggggaagaatcatacatgcgaagatattaggccagtctcatacgctggacctgcttggactggaaggagggcagtttttaagaagtctagcttcgaaagttcgttccggagacccaaacaatatcgaaggacaggcggcacgtgaatattggcatcgcatgtttcccgatgagaatttccgtcgtttccccggctccggtgaaggaagaaatagtcaattagactacgcttacacaatactacggggttttcttatcaagtcgatttgctcagcgggactctccccaacaattggaatacaccatcattccgctaataattatttttgtctagccgacgatttggtagaacctttccgaccagccatagactatcagataagtcagctgcccaacgagcctttagacacggaattgaaacaacagatagttctagcagtcaacagtcagttctctccaaaaggattgaccattccctcactggttgacgagttctgcgggcaatacgcgcaatactgcgaaggctggttggacaaactacccgttccagtcttcgggaaaaggaaacaaaaatgaaaagagacaaggataaaggcatgtggacgctagtcatgtatgatttacccatcaaaacaaaagaggacgtgggagccgctaacagattcaatcatcttttagcgacttaggtttcgtccgagtgcaatactccgtatacgcaagatatactccaacacaatcgggaggaaggtcggcactaacctatataaaagctggactacctccccacggaagcgtgagagtactatgcgtgacagacacgcaatgggcggattcgttgagattcatcgataaaaaacagcaaaatacaccggaacaaccgggtctactgactcttttcgatgatggcgaatagtcggaaaacgttgatatgaaggctcttattcgggactagagtttgaataagagttaatacggcatatatccaaactgacattacttgctctacttcagctcagtttgaataagagttaatacggcatatatccaaacgtctttctggtttggctggattacacgcagtttgaataagagttaatacggcatatatccaaacaaggggtacgattccaacacattctcgaagtttgaataagagttaatacggcatatatccaaaccaatacgctcaagggccttcttcccaagagtttgaataagagttaatacggcatatatccaaaccctggtcgattcggacgaatatccggaggagtttgaataagagttaatacggcatatatccaaaccgaatggaatcagaagcgttacgaccagagtttgaataagagttaatacggcatatatccaaactcagcattccggccaatcggcatacgagtctggataagagttaatacgacatatatccaaagaaagttcaatttaaacaacaaagaataagccggtgtttcgccactcccaccggcgaggagctgttcacacaaagacgcggagcaggagaagggtggagagaaaaacacccgtagactccgctttttgtttggcgttgacatggcttggttgtttcccatcagtgagttcatgtcgtgaacactggcatgtatgcgtgagtcaagagggtgcaaggcatacggcttgctgacagtccttcatggatttcaggattgtcgtccatcgcgcatgtgagagtcatgccatggattgtcccacgagctttaggggataaaaagtgtgggactttgtgcgggagacgagattcgaactcgcaatacttgcttggaaggcaggtgtgatgaccttttcactactcccgcagtaagaggaatagaattgtgattgtttacgggaaagcactacatacacgagatgtttttattacgaccgttccaaacttttcggaacggaaggctcgcaaccgcaacccattccccagcggagtcggagggattcgaaccctcgaaccgtatgaaacggttaacaccttagcagggtgcccctatcggccactcaggcacgactccgaagtttcgacacgccaaaaacagccggtcgaaacttagctccccatgatggactcgaaccacctctaaaggttccaaagacccgtgtgctgccattacactaatggggaatgtgcagaccgttttgacggcccgcgaataattatttggattttgaaatcagcttgtcaatgtccgcgcccaactgccttaactgggcgaaagagttggcgacgttgttttgcgccgtttcctctctctgctgagcggcttccatcagcttcttgctgttcgcatccaattcggcggcatgctgttcagctttcttggttcggaggtcgatttcctgtgacgccttgtccaaacggttgactgcgtcagcttccgccttgctgataatctgttcggcttgtttcttggccgcgtccaactggttgcaaccttatcgtcggtttcctttttcagtttggcgcattcctgttcaagcttctgcttcttatcgtgtgcggcggtcatcatctgtttggtggtttccgtcgcggagtcgagccgcttctgtgattcatccttggcctgttggagaatctgttcggcttgcgtgcgggcctgttccagctcctcacgtttcttcgactcgtaagtgtttttcaacgtttggaattctttgccgaggctggtgcctaattcctgcatcgggttttccgacgcttgacgggcgtcctgcaagtcggcgttcaaccgtccaatctgctggcggagggattcaacttcctgctcccgtttgccgagttcggattgacgcttgtccaagaccatgtttttttccgtcaactggcgttgcagattccaaatctgtgtttccaacccgttcacgtactgttcaacggaatccttgcgataaccgttgaatccggtggggaggttgagtggttgtacctgtggctgggtcattccttccacggtgagagcgtgggaggagatgacccgtgtttcatcagacatggtcattttgagttccttcttttctggttgaaaaacacgagggggtcgtgcgggagtcgaacccgcttcttcaaacgtccaagttttctaatcgaagtggcaccgtcgattagaaactgtgtccgtgtgaagaatcctgtcttcgacccatggcctactatttgaacattccaacgcccgtaggccgaaacgttggaatactttcccgcctgtgtagtgtgtgatgggaaaattttctgcttgcagtgtgcccaatgcgtcagtattggtacaaaatatcgcgtgaattgaatttattacgcaagcaggaaaattcgagcctagagtaggaatcgaacctacgacctgcgttttacaagaacgccgctctaaccaactgagctatttaggcattgacataggtttcaagatttgagttttgaaacccatgtctgaactaaggaagaaccaattacggttcgtgctttgagagggaatcgaaccctcacgtcctttcggacagttgcttttgaggcaaccgcgtataccaattccgccaccaaagcaaagcaaagcaagagccgccgcaacggctcaggcaacggttcctactactgggtaggtcagctgaaaactagaaccgcccataagaacggttccgacgccttctcaaacaacctgtaagagaagtagcacggcatgttggacttgaaccaacatcgacggttttggagaccgtaatgctaccggttgcaccaatgccatatgtggatggtcacacccatgaagcgtgaccatccaccgagtcgccgttaacggaagcgtccgccgctttcatctccagacaagccaacaccagcggtaggcgcttgccttcgggggtagtactacttccccaacgcggaatgtgaaggattcgaacctccggcacctcacagtgcgactgctttcgagacagttgcattaaaccactctgccaacattccaaaccggctgtagttaacgtccaagtcggctacgcagaaagacgttcggcatggcggactggattttaccgccaacggcaaggtcgtgggctgttaagtaccccgtttcaccgttcttccccttcggtcatcagccgcctgattaggcagggaaactcttatcctccacaagaccatgtaggattattcgagcaatgccatcggtttcacggacagctacctccgtgaaacctagtacccaaggttggaatcgaaccaacgacgcccggtttaggaaaccggcgctctatccgctgagctacaagggcgtatgccgtctcgtcgcggggacgtcgcaactcgtcttccgattcgacggcattcacatcagcttttcgctagttgccatggcgttgcgattgccatggctttcgcatactgggatgatggtgtttagcgcgcgttccacgcgaccgttttaatttatgtactcgaccctcagaacagaagttctgacagccagttggagtctcaccaaccttcccgcagcccggcgactgtagaggtgccccccgtgggattcgaacccacaacccaaggtttaaaagacccttgctctaaccattgagctagaggggcttgctaggaggtgaaggaacgaaagaatccacctcctagagttgattggattgacggaaactgttttttgtttgcaaagttttacctgagttatagagtctgtaccgcacggtcgcttagcacgcatattcagtttccgtgtggcgagcatcttgcggacgctcgtcacgtcgtggagccggagggaattgaaccctcgtccttgaaaacgttgatgatgttttctacatgtttagccatctcgtttatatatgttgaaagttccagtcgaagaggcaccccggaacagttttgcaactcagtcatgaaacgatggacagttgccgttcaccgagtttttgctgtcctttctttttcagaatcgccttacagcaaatcagcgaccctgttcttccttcaaaccgtttttcaggcggcgagctggaagttacgcgaagaattagtcttggcgtttattgtttgacatggattgatgacggttgtccacgtcagcctccgacatgcttacattaccttgattttcaagtcgaaacctgtcggccccaaaatgccgtcttccttccggttttccgtccgagcttcccataggtgtggttcagaaccaatagaatggttggctgggatttccagtcggaaggttgacagcggttttgcctgtcatggttttgtcttcaagcgttttcatgcttttcctcgtgtgtttgagtgaacaggtgaggataggtgtgatagttcttgaagattcaaccatgatgggcaagtcttcatatcgaacatgattcgacgggctttaagtcctatcgaccatgtttccttatctctattcatttttcaaacgggcggcaacattcggggagtgttccttactgggtaaggtctttaccccggttgccttggtgactgttccagtagcgggctggatatgagaagcgttcttctcgcagtctgttcacgcgtgatgtttttgaacctcgttttgtgtgaacactgccagtatagcagttctaggaaacatgtcaaatcacagaacgaaaacaatgttttccaaggcgtgtcggacattgccaaccttcaccaacagcattggatacttggacaatactgtcgcccacaggttacactcccctacatgcagtccaagcagatacaagaagcggccaccgtcgcatacatagaagaccagttcaagtcggaagaccccatgctcatacagtccgccgccggaaacctcgccagactgtacggcatgaccacgctctcccagttgacggggttggcgagaccgtccctctaccggagcctgtgcgagaacgggaacccgtccttccagaccatgtgccgaatattggacgctatggctacacggtgtcggttcgccgcaaggagcagaagccgaatgagtgacatacgagttgagcaggatgttctcgaccttggttcgacgggcatggagttggatgttcgacgggtcaacctgttggatgatatagaagcccgcgagccgaacagtatggaaatatggtatgggcattccattctcaccgccacactgtttccaccagcccaaccgtccgatgatgtggatttcgtcagcaagtcgaacggacggttggaatacatgcttgaagctggcgtgacgggtgatgggatgataggaaacgccggttcccgttcggcaaatatccgagactgttgatggcttggatggctaagcagattcgtgcggcgaaaggccataagacgaggaatgttgacccggagacgaagaccatcaccattccaagcatctaccagttgtgtgaggaaatgggattgccgcatggcgggcgtaccgcgaagagcgtgcaggaacagttggaactgttgttggcttgccgtatcagtattcgcgcgtccggcacgggcaaggggttgaatgtgagggatacggcttatctgcctatcgttcaggccgtgcgcattatcaatgatgagaagaatgtgggctattccggtgctacgttccgtctgaccgatgaagtgtatgaacggttgagtcgtgagtcggctccgttcgatacgagagtgtccacttaccttttgaaaggcaggtcggtcatgccttacgacatttacatttggctgactggcagtatgaagaatcttcgccgtgaccttccggtgagttgggattggctgtatgaacggttcggagaccagattgcggtcaagaagtcttttcggcgcatgttccgtcaatcgttggagaaggtcaagaaggtgtatccggggttgaatgttgagtgtccaacgtatgaggattacattattctgcatccgagtcccacgtcggttcctacccgtgctgtccgtgaggttgaggtgggtgctaatggggatgtgttcgaggtggctttgcattcgttgcaatcggttcaacggaaaggtgtacgaaaggccacgtcagattgagttgaccgtggcctttcggacaccttggagagtattggtgtctgaaaggccatgtgtgggcgggtgtctgcgtggcttttcggacacctttcgcatggcttttcaaacacctcccaacgggttgaacggtttctcgacgtggcctttcacgcaccctcgtatacgctacggattgcacgcgcctttccagctttaatttatccactagtttttcgttggaatttcaaccattccacacgcttatccacatttccacaggcagaacgtcaaacattccgtggactaacaggcacctttagtggcgtttcaaacaccatgacgattatgaatcatgccggacatggactatcaaacaccatcagcatggactatcgaacacccttttatggggtttccgacacctttccgtggactaacaggcacctcgcatggtagaaaaaacgttacgggagtaaggctcaaccggcatggttatatattatatgctcatagtttcttatagtttcttatcaggggaccctcgaaccgccgaagcgacacttcggtaggcggggaacaagtcccttcaggaaacccttgccgcgagacaagggaatcccccggcttcggccgtggggaggaagtcaaagttccgattttccgagccaaggaatcaaccggtgcgaaatactggaaacatgagactcctatacaaaatcacaagcttatatcgcaaagcccgttggctcatgtggctggctggaatgttgcccaccacgctcattcccctgctgggttacggaatgcacgctttgaacatcgcaaaggacaggcaggagttggcgacagataatccggagcttgcttcggaggagacgactggctccctatttgattggatgaccggcgagacggtgggaagaatcattggaatcattacgattcttggcattattttcatcctactgttgattatattgcaaatcttctcgttcattggtgcccgaacgtcagtatccggaacagaccatgacacggccaccaaggaggccaaccgtaggcaagcagacttgggcgaaatggacgtggagccgaatgatggggacgtggcctttcaaacaccttcccaatcgaagccaaaaaggaaaggcaagccgaaaccggctcccgccactgagggcaacgaggatgactggttcatcgactagtctgaatggtgtttaaaaagccacgcgcgaccggctcgtgcggactattttcctagttcgctgagcttggtcggcgctttcttatgtttgagcggcaacggtttcccgtccgtctgattatagacgcagtagttgccgttgtcggttttgtggattaccacgttgacctgccggttgtccttcgtgtagacggagcattcggcgtccacaccgttctcgatgtccttcattgagtccacggtgtattcgccccgtctcgcggaatgtattatccctttggttgttgggatactactgtctgtatcggagtactccttgtgtgtgcagttgatgctggacagtccgtacacgtattccaagctttggttgagggacggggctttcggcattttcaccgtggtcgcggtgacgaacgagaggaagaacacgagagcggaaacagtcgaaaccagtgtccgacccttgttcacagcgaaagcgccgacaacaagagcaatgacactaacgataatgagagaactgataataaaatcgcccgtactcgcttggtcggcaacctcctgccaagcggagaaatccgctgtcacttctgaaccttttccagtcgggtggacagttccgccaatccgtcgatgattttattctcctccacggttttcctcccaccggctcga

SEQ ID NO: 4268 - DNA, 6987 bp, synthetic construct
  source 1..6987: mol_type = other DNA
  misc_feature 1..6987: note = Synthetic
cgcccggtgccggtaagacctatgtcttgaacgagttcatccgccaggctcgggccgacggcgccagtgtagcagtcaccgcgtccacaggcatcgcctccacgcatatcaacggccaaaccattcattcgtggagcggcgtcggcgtggccaccgccctgagcgccagcctgctcaaactcatcaaatcccggcgcaaacgcaagattcaggccacggacatcctcgtcattgacgaggtttccatgctgcacgcttggctgttcgacatggtcgaccaagtctgccgcgaagtacgccgtgatccacgcccgttcggtggcatccaggttgtcttgtccggcgacttcttccagctgccgccggtttcggtgtccgggcgcaaccgcgacctcatcgcccccacgcccgaattcatcgccagtcgcgaacggtatgcccgtgccggcttgaaccccgaagcttcatcaccgaatcgctggtatggcccgaactcaacccggtgatctgctatctgaccgaacagcaccgtcaggataccggcgaactgctgaccgtgctcaccgacattcgcgaaggcgacgtgacccagtccgaccgtgacgtgctcgtcactcgtctgggcaaactgcccgagcccggccaggtcgccgtccacctgttcccggtgaaccggcaggccgacaatctcaacgacatgcgcttgaaccagatcatgcttgatccacacgagttccacgccgagacagcaggccctgccaacctggtcgaccgactcaaaaagaacatgttggcccccgagcgattgatactcaaggaaggcgcggctgtcatggccctgcgcaacgacaccgatcgccagtacgtcaacggctcgctcggcaccgtgcgtggcttcgcacaggagaacaagggcggctggccgatcgtggaattcgagaacggcaacatcgtcaccatgaaacaggccacatgggagatgatggacggcgacaccgtgctcgcctccgtcttccaggtgccgttgcgctgcgcgtggggcatcaccatccacaagtcgcaaggcatgacgcttgaccgtgcggtcatggacctgaagcgcaccttcgcgccaggcatgggatatgtggcgctgtcccgagtcgaatcgctgggcggctctatttggccggcgtcaacgaacgcatgttcctcgtctcgcccgatgcgtggtgctcgacggcgacctgcgcgaagcctcggccgcggcctccgaccagttggccgatgaaggtgcaagcgcgttcaaacctgctgagccggacgaattcggtgccaatcccgacgatgacttcgcccaagacgcgttattctgacatgattcatgttgtgtcgctaagaggatttgcgctatactgatacagctaattctcagtaagagtggacctgatagccactttgaatgctcagcaggcaactgctaggggcgagccatttggctcgccctgtttcgtacagttacaatgttcaagacaatgatgtgcattgtagctacggtgaaaggtgttttatgcgggggaagcgttaccggataggaattgacgtcggtttgaattctgtgggccttgccgcagtagaagtgtccgatgagaacagtccagtgcgtctgttgaatgcgcaaagcgtaatccacgatggtggtgtggatcctcagaagaataaggaagcgattacgcgaaagaatatgtcgggtgtcgctcgtcgcacgcggcgtatgagcgtcggaagcgtgagcgcttgcacaagctcgatatgctcctcggcaaatttggataccccgttattgagccggagtccttggataagccctttgaagaatggcatgtaagggctgagctggctacacgatacatcgaagatgatgaacttcgccgtgagagtatttctatcgcattgagacatatggcaaggcatcgcggatggcgcaatccttatcgtcaggtggactcgctgatcagcgacaatccatattcgaagcaatatggcgaactgaaggaaaaagcgaaggcgtacaacgatgacgcaactgctgcggaagaagagagcactcccgcgcagttagtggtggcgatgttggatgctggatatgcggaagctcctcgactgcgttggcgtaccggttctaaaaaaccggatgcggaaggctatttgccggtacgtttgatgcaggaagataatgctaacgagctgaagcaaatattcagggtccagagagtgcccgcggatgagtggaagccgctgttccgtagtgtgttttatgcggtgtctcctaaaggttcggcagagcagcgtgtcggtcaggatcctctggctcctgaacaggctagggcattaaaggcttctttggcttttcaggagtatcgtatcgcgaatgtgattacgaacctaagaatcaaggatgcttccgcagaacttcgcaaacttactgttgatgagaagcaaagcatttatgaccaactcgtgtcaccttcttcggaagatatcacatggtctgatttatgcgatttcctcggcttcaagcggagccagttgaaaggcgtgggtagcttgaccgaggatggagaagaacgtatatccagccgtccgcctcgattgacttcagtccagcgtatttacgagtcggacaacaagattcgtaaaccgttggtggcctggtggaaatccgcgtctgacaatgagcatgaggcaatgattcgcctgctgtctaatacggtggatatcgataaggtgcgtgaagacgtggcgtatgcttctgcgattgaatttatcgatggattagatgatgatgcgttaaccaaacttgactccgttgatctcccctccggtcgtgctgcatacagtgttgaaactttgcaaaaactcactcgtcagatgctgactactgatgatgatttgcacgaagcacgtaaaacgctgttcaacgttacggatagttggcgtccgccggcagatccaattggggagcctctgggtaatccatcggtcgaccgtgtgctgaaaaacgtcaaccgatatctcatgaattgtcagcagcgctggggtaatcccgtctcagtgaacattgaacatgtgcgctcttcgttctcgtcggttgcctttgcccgcaaagacaagcgtgaatatgaaaagaacaatgagaagcgttcgatattccgcagctcgttgagtgaacagcttcgcgcggatgagcagatggaaaaagtgcgtgaatccgatttacggagattggaagccattcagcgtcaaaatggacagtgcctgtattgcggccgtacgattacattccgtacgtgcgaaatggatcatatcgttccccggaaaggcgtcggctctacgaacacgaggaccaatttcgctgcggtatgtgccgaatgcaatcgtatgaaatcgaacactccatttgcgatttgggcaaggagcgaggatgcccaaactcgaggggtaagccttgctgaagctaaaaagcgtgtgacaatgtttactttcaatcccaagtcatatgctcctcgggaagtgaaagcgttcaagcaagcggtaatcgcaaggcttcagcaaacggaagatgatgctgccatcgataatcgttccatcgaatcagtggcttggatggctgatgaactccaccgccgtatcgattggtatttcaatgcgaagcagtatgtgaattctgcttcaatcgatgatgctgaagccgagacaatgaaaaccacggtgtcggtgttccaaggccgtgtcacggcatctgcaagacgtgcagctggcattgaagaagatacactttattggccagcaatcaaagactcgtctggatcgtcgtcatcatgcggtggacgcttccgttatcgcgatgatgaacacggctgctgcgcagacgttgatggaacgtgaatcattgagagaatcgcagcgtttgattggtctcatgccaggcgaacgttcatggaaggaatacccctatgaggcacttcacgctatgaatcgttccatctttggttggataatatggacgttttgcttgagctgcttaatgatgcgttggacaatgatcgaattgctgtcatgcaatcgcagcgttatgtccttggtaattccatagcacatgatgccacaattcatccgctcgaaaaagtgccgttgggctcggcgatgagcgcggatcttattcgacgtgcttctacaccggccttgtggtgtgctttgacgcgtttgccggattatgatgaaaaagagggtttgccggaagattcacatcgtgaaatacgagtgcatgatactcggtattccgctgacgatgagatgggattcttcgcgtcgcaagctgcgcagattgctgtgcaggaagggtctgcagatatcggttcggcgattcatcatgcccgcgtgtaccggtgctggaagacgaatgccaagggagttcgtaaatatttctatggcatgattcgcgtattccaaactgatctgctacgcgcttgccatgatgatttatttaccgtgccgttgcccccgcagtctatttcgatgcggtatggcgagcctagggtggtgcaggcgctgcaaagcggtaatgctcagtacttggggtcgttggttgtcggtgatgaaatcgagatggatttttccagtctcgatgttgatggtcagattggcgagtatttacaattcttctcgcagtttagtggagggaaccttgcatggaaacattgggttgttgatggattctttaaccagacgcagttgaggataagacctcgataccttgctgcggaaggattggcaaaagcgttttctgacgatgttgttccagatggggtccagaaaattgtgacaaaacaaggatggctacctccggttaatacagcaagtaagactgcggttcgtatcgtaagacgcaatgcttttggcgaaccgagattatcgtcggcacaccatatgccgtgctcatggcagtggaggcatgagtgaatcatgcaaaaccagtggcgtgtaatcgactgtaccgatcttgacggctccatctcctatgaacggggaaggatgcgagtcgtcaagaacgatacaggggagtgcgtggatgtgccacttgctcagattgcggtagtgctactgggattgcatgtgcgatgttcggctgcggtattacatgagatggcacggtatggcgtgtcagtcatgctctgcgattggcgtggtgttcctgacgctgcgctgcatgcatggactgacatgcctaccacagttaccacgcggcaattggcgcagtcgaacatgtctcttcctcgcaagaaaagtgcgtgggcgcgtattgtacagatgaagattcgtggacaagctgcttgcctcgattcatcaaaactcgaaggtggaggcttgctacgaggtattgcagcctctgttcgttcgggtgatccttccaattgcgaaggtcatgctgcacgtgaatattggaggcgaatgtttcctcaagatgagaaattcagaaggattccggggcagggttatggtcggaatgcgcagttggattatgcctatatggtgctgtgaggattcgcggttaaagcggtgatagcagcaggattaattccatctttaggcgtgaatcatcacgggcgcggcaattatttctgtcttgcagatgatctgttggaggtatataggccggcagtggattacagagtctcactgctgaatgatgaagactcgttgcaggagaaggcagtaaagaagcatttggtagatgctgtgaatcaacaattcaacggttccggtttgactataccgagctcattgaatgattttgcgcagcaatttggtttatattgcgaaggcaaaatcgacaggttgcaggttcccgaatatgtaggcgagtcatgaaacgcgatgaggacagtggcggcatgtggtgcttggtgatgtttgatttgccggtcaagacaaaacggcaacggcatgctgcaactgtctttagaaatatgttgctcgacatgggatatggaatggtgcagtattccgtatatgtgcggtatacgcctacgcaatcgggtaatagggcgacggtcaaaatgattaaagacaatctgccagctaatggcttagttagaattttgcatattagcgatcatcagtggtccacggcggcccgattttcttctggaaaacgtgagattgaggaagaaacgcctgactttctcacgctttttttgaacgtaggagagtctgaaaagattgaaaatagcccttcttgataggctatccaagcttatcaagaagggtgaatgctaattcccagcgtactgaacgccctgcgtctgtgcaaggcaagcttatcaagaagggtgaatgctaattcccagctcaacaaagcaaaccaacttttgacaggcaagcttatcaagaagggtgaatgctaattcccagcgtgtcctgcaacgcccacgcgaggtaaccaagcttatcaagaagggtgaatgctaattcccagctcagcgacagcgtcaaggccatcggcctcaagcttatcaagaagggtgaatgctaattcccagcactatggatatcgacatgaaaatcctccaagcttatcaagaagggtgaatgctaattcccagccttcgaggttccggtaatggctgggcttcaagcttatcaagaagggtgaatgctaattcccagcagcgtgaacgcaaggccatcgcatatgtcaagcttatcaagaagggtgaatgctaattcccagccagtgttgccgctttttcgggggtgtcgcaagcttatcaagaagggtgaatgctaatttgtttgtgttcaattagttgttgcgggttgggggtggtgccgttttcttggactgtgatccgaggaggagacggccatggcgaagtacacgagggaacagcggcaacgcgcggtcgagttgtatgtgaaatacgagggctgcgcggcggatgtgat

SEQ ID NO: 4269 - DNA, 5735 bp, synthetic construct
  misc_feature 1..5735: note = Synthetic
  source 1..5735: mol_type = other DNA
ccatcagagcgcggcaggtggtctgactggccccgcagagcgccgcatgggtgcagaacagttcggtgcggcaatccgccatgcgggaatgggtgttcataatgccacccgccagcttgaccagcttgccgatgtgccccaccagcaatacctctgcaaactgctccgcagcggccatatccagcgcatcccccataaagttggagcacttgaccaccgggatgctgctgtattccggcaggttttgggccagatagtccagcccatagttgccgggggccaggatcagccgcttggggctttgctcccgcagggcggcctggtggatctccagctgcacggtatccaggacggcctgctggctcatgggctccacaatgccgctggtgcccaggacggaaagcaaactcccagaaaccacgctcgaacttctcagccaattccatgacctgttcgaccttctcgaaaagaatgtcagaggattcgcgcacttcattgactgaggttataagcatcccatccctatacatggggattcgtgcggcttccgtagggattccagtcgcgttcccattgtcggacgcgtattgcagtgagaggtcgtaggtgagagtgaaggtcgcttccttgacgtatccttcctcgcccctcatgttgacggtcatcagccaagagcgggagaaggagcgttcggggttgatgatatcacccttgacccattcgtacttgccgtccttgctgttgtcagtgaagtcgggaagttctgccatggcgtttttgaattcttcgatggtggtctgcttgtccatttttgctccttttggttttctgtttttgtgtgaacggtttcagtatagcataaaaccttgaagcaaatcaacccaaagaagccaactccacctcaatcccagccaactcatccaacaaacgcttacgacgagccatcaacagtcgtttcctgcggacgccatcgaaaacaggctgaccggaagcaatatcatgggagttcaccatattcctgccggtgggactcccatctcgattgttccccaacatggtcaaatcagccatagtcagcgaaccattccgaaaactgaacccgttctcgaacatcacatgttcaagccgtgcgatgttcaacgccccgaactggggcaccgtggttccactaccgtatttgatacgacgggattcacgcagtcgggcaagataatgcagaaactgggccaaagtcagtttggtcagtttagtcaacgagccgacgccaatcgaatacagtcgaatacggaaatcagcatccactactccctcacgatataagacggaatcctccaccggtcgaaaatccattccgttcttccgtagacggtttccgacgatacgggcgctgtcggagccaaaggaaccgacgaactgctcttcggtcaacgaggtaatatccccgatgatgcggagttttcttttcatcttgttgactcggaacttgtcgcagatttgaccccgcgcgttggtgaagagtttttctattgggtctaggacggttaactcgctcatggttcttcttctctcgttttttacatgcggtagagggttccaagcttgcggccggaaccctctttaatatcacagattcacactgtcgatgttgtcggcaaggcaatcagacaatcgggcgtttccgccttgggtcagacgataatgcttgaggaatctgattgcatcgttgaccgttaccagttgagatggctttgcgtagtccttgtccagcgtgcgttccagttcgcaggtcttgcattctcctgcatctccaaggcagtccttgcagagtgtgctaccacaggtgtcgcacgtgtgcctacaggttttgtcgatgtatttgccgcagtgttcgcaacgtttccagcagtgggcgcattccaaggtgccctcgcagtcttcgcagcttgcggcgtcatcgtcgcagcagtatgcgccgcacttgtcgcaggagttcaggcagtctttgcagaacgtgttgccgcagatgttgcatcgttccgcgcatttgtcgcagacgatgttgtcgcacttgtagcacaggtggcagtggtcgcaggagccgttggctgttggattgttgagggcgcagtaggtgcattcgcagttgctcattttttctccttgttgggtgtggggtgtcaacccttgtttgtgtgaacgattccagtataccatataacaagacaacaggaaagagtcgtgtcgcaaggtctgaatattgagatatactggtcacgtccacaaataaaaaaccaaagcgctgctcaagaaacggaaacgacacgccggggttgccagaaaaacactttgtgttatagtgggaaccacggcaagtttcaatcaagtccggtgacagaccggaattgaccgtagagcggcgataggacgcaagtcccaatcgccgcttttttaatgcagtgcggaaagagaacaacagaccttgaccgcaaaaaccaatatccgctatcgcgtgggagctgacgtaggactcaacagcctaggattctccgcaatccaactcgacgccaacggcaacccaatcacactactcaaaaccctcagctacattcacgacggcggagtagacccaacccaaaacaagtccggcaccacccgcaaggccatggctggaatcgcacggcgaacccgcaacatgcgcaaacgccgccgccatcgtctcgaccagctcgaccgtcagctctaccaactgggctatccagtagatgaagtgccagactgcgagcaagacctttacgaagactggaacacccgttccgctttggctaccacatatattgccgacaaaaacaagcgtgaccggatgattgtcatggcagtccgacatatcgcacgccatcgcggttggcgcaactcctacagtcgtgtcgaaaccctgttcgaggacgtggaaccgtccgaccagtacaaggatttgaaacagcgcgtggagacccgtctcggagtgaaactggacgaggatatgaccccggcgcagctcgtcgcattgacgctttccgaacgtaacggcaaactggttcgactccgcaccagcactaaatacggtgagggcattctgccgaaccgtctcatgcagtccgacaatgcgcgtgaactccgacgcatcttcaccgtacagcaggttcccaaggatgtttggaaacccatcctgcgtaccgtgttccattgcgcgtcccccaagggttccgccgaaaaacgcgtgggaacagacccgctcgaccaaacccagaagagagcgttgaaggccagcatcgccttccagaagtatcgtatcctcaatgtcatcaccaacctgcgtatccgacgcaaaggcgaggaaccacgtccgttgaccgtcggagagaagcagaacgtgtacgaactgctcacgaccgccaaggaagacttggaatggttggacgtgtgcgccgtgcttgacatcgaacgcaacgaactcaaaggcgtcggcaccctcacccatgacggggaggaaagaatcggcaacaagccaccggtcttggacactgtcatcagactccacggcatcaaaaacaccaagctccgcaagatgatggacgcatggtggaactcttccacagaggatgaacaggctgcgatggttcgactcctgtccaacacggttgacttggacaaggtgcgcgacctcatcgaatacgcctcccccatcgaattcatcgacgggttggacgaagacctgctcaccccgttggactccatcagtcttccagtcggacgtgccgcctactccgaaaagacactcgaccgactgcccaaacgcatgttggaaacggaagacgatttgcattatgcgattcgccacgagttcaacgtgcccgcagactggaaacctccggttccacctgttcaggagccgaccggcaatcctgccgttgaccgagtgttgaaagcgttcaaccgttttctcagccaatgcgaacaacagtatggcattccggaaagcatcgccatcgaaaccacgaaggaatcgttctcgtccatcgcgttcggacgcacgctcgactatgagcgccgtcaacgtcgggacaaggacaatcagacgcgtgccgcaatccgtgaggatatgaggaagcaactgtccaacggcggaagcttcaaagtccacgactacgacattcgccgttgggaaatcgtccaatcgcagaacaacacatgcctgtactgtggtgcgaccagtccacgattcagtttcgacaagtcggaactcgaccatatcgttccccgtcgtggtgtcggttcggacagcaaacgcaccaacatggctgcggtctgccccgaatgcaacgccagcaagtcgaacgttccgttcgccgtatgggtgcattccgactatgcgaaagcgcatggcatcaccatgaatgatgtcatcgcacgagtgaaccagttgatgttcccaccatccatgaaccgcaagcaggtcggtcaggtgaagaaaagcataatcagccgactcaagcagaccgaacaggagctgatcgccgccaaggggctgcgtcaggccgtgtcggagatcacgtcgatccccgcgaccgatcccgtcatcgaggagatcgccgccgctacggccgaggtcgaaaaacgaatccgttaagtcggctgcaatcctatgaagagacctttcatcgcagtgaccgcgctgacgcttgcgactgcaatctcgtttacttccgtcgcggaggagcgtcccgcgtcggagaaacggcttcacaccgttcagatcaatagtcttgaagacctcaaagcctatttccgctacgaccccaagcgggacattatcgtcagcggccatcgcggcggcatgatgcccggctatcccgaaaactgcatcgagtcgtgcgagaaaaccttgtcgatgatgccgacctttttcgagatcgatttcagcttcacgaaggacagcgtgatggtgctcatgcacgacctgacgatcgaccgcacgaccaacggcaaggggcgcgtggccgactacacctacgaggagttgcagggattccggctggtcgaccgcgacggcaaactgacgccttatcgcattccccgtctgaaagacatgttggaatggggcaaggacaaggtggtgttcaacttcgacaacaagtacatcaacaccaagggcgtgagcgacgaggtgcgcaaggcgagcctcgactactacatccgtcagctgcgccccggcggcgactggtcgatgtaccacaacatcatgctcagcgtccgttcgctggacgaggcgatgtactattggaacgccggcatccgcaacgtgatgttctgctgcgagatcagctcgcgcgagatgttcgacgcctacgacgcctgcccgattccgtgggactacatcatggcctatatccggctgtcggtcgatccccggttgcaggaagtctacgatctgctgcatgagcgcggcgtctcgacgatgacctccattaccggttcgtccgacaaggtgaagaatccgcgcgaccggagggtctgctacctgcgcgacctggtgtcggaacccgatctgatcgagaccgactacccgtcggagttcgtcgatctgccccgctcgcgcgccgaaatccatgccttgcaggatcgcgccatcgagggcaaccggtcggtcaaggccgataaggcgaagaagaaccgtcggaaatagcccgtccgctgcc

SEQ ID NO: 4270 - DNA, 5319 bp, synthetic construct
  misc_feature 1..5319: note = Synthetic
  source 1..5319: mol_type = other DNA
cgcgaagcctcggccgcggcctccgaccagttggccgatgaaggtgcaaacgcgttcaaacccgccgagccggacgaattcggtgccaatcccgacgatgacttcgccaggacgcgttattctgacatgattcatgttgtgtcgctaagaggatttgcgctatactgatacagctaattctcagtaagagtggacctgatagccactttgaatgctcagcaggcaactgctaggggcgagccatttggctcgccctgtttcgtacagttacaatgttcaagacaatgatgtgcattgtagctacggtgaaaggtgttttatgcgggggaagcgttaccggataggaattgacgtcggtttgaattctgtgggccttgccgcagtagaagtgtccgatgagaacagtccagtgcgtctgttgaatgcgcaaagcgtaatccacgatggtggtgtggatcctcagaagaataaggaagcgattacgcgaaagaatatgtcgggtgtcgctcgtcgcacgcggcgtatgaggcgtcggaagcgtgagcgctttcacaagctcgatatgctcctcggcaaatttggataccccgttattgagccggagtccttggataagccctttgaagaatggcatgtaagggctgagctggctacacgatacatcgaagatgatgaacttcgccgtgagagtatttctatcgcattgagacatatggcaaggcatcgcggatggcgcaatccttatcgtcaggtggactcgctgatcagcgacaatccatattcgaagcaatatggcgaactgaaggaaaagcgaaggcgtacaacgatgacgcaactgctgcggaagaagagagcactcccgcgcagttagtggtggcgatgttggatgctggatatgcggaagctcctcgactgcgttggcgtaaccggttctaaaaaaccggatgcggaagctatttgccggtacgtttgatgcaggaagataatgctaacgagctgaagcaaatattcagggtccagagagtgcccgcggatgagtggaagccgctgttccgtagtgtgttttatgcggtgtctcctaaaggttcggcagagcagcgtgtcggtcaggatcctctggctcctgaacaggctagggcattaaaggcttctttggcttttcaggagtatcgtatcgcgaatgtgattacgaacctaagaatcaaggatgcttccgcagaacttcgcaaacttactgttgatgagaagcaaagcatttatgaccaactcgtgtcaccttcttcggaagatatcacatggtctgatttatgcgatttcctcggcttcaagcggagccagttgaaaggcgtgggtagcttgaccgaggatggagaagaacgtatatccagccgtccgcctcgattgacttcagtccagcgtatttacgagtcggacaacaagattcgtaaaccgttggtggcctggtggaaatccgcgtctgacaatgagcatgaggcaatgattcgcctgctgtctaatacggtggatatcgataaggtgcgtgaagacgtggcgtatgcttctgcgattgaatttatcgatggattagatgatgatgcgttaaccaaacttgactccgttgatctcccctccggtcgtgctgcatacagtgttgaaactttgcaaaaactcactcgtcagatgctgactactgatgatgatttgcacgaagcacgtaaaacgctgttcaacgttacggatagttggcgtccgccggcagatccaattggggagcctctgggtaatccatcggtcgaccgtgtgctgaaaaacgtcaaccgatatctcatgaattgtcagcagcgctggggtaatcccgtctcagtgaacattgaacatgtgcgctcttcgttctcgtcggttgcctttgcccgcaaagacaagcgtgaatatgaaaagaacaatgagaagcgttcgatattccgcagctcgttgagtgaacagcttcgcgcggatgagcagatggaaaaagtgcgtgaatccgatttacggagattggaagccattcagcgtcaaaatggacagtgcctgtattgcggccgtacgattacattccgtacgtgcgaaatggatcatatcgttccccggaaaggcgtcggctctacgaacacgaggaccaatttcgctgcggtatgtgccgaatgcaatcgtatgaaatcgaacactccatttgcgatttgggcaaggagcgaggatgcccaaactcgaggggtaagccttgctgaagctaaaaagcgtgtgacaatgtttactttcaatcccaagtcatatgctcctcgggaagtgaaagcgttcaagcaagcggtaatcgcaaggcttcagcaaacggaagatgatgctgccatcgataatcgttccatcgaatcagtggcttggatggctgatgaactccaccgccgtatcgattggtatttcaatgcgaagcagtatgtgaattctgcttcaatcgatgatgctgaagccgagacaatgaaaaccacggtgtcggtgttccaaggccgtgtcacggcatctgcaagacgtgcagctggcattgaagggaagatacactttattggccagcaatcaaagactcgtctggatcgtcgtcatcatgcggtggacgcttccgttatcgcgatgatgaacacggctgctgcgcagacgttgatggaacgtgaatcattgagagaatcgcagcgtttgattggtctcatgccaggcgaacgttcatggaaggaatacccctatgaggcacttcacgctatgaatcgttccatctttggttggataatatggacgttttgcttgagctgcttaatgatgcgttggacaatgatcgaattgctgtcatgcaatcgcagcgttatgtccttggtaattccatagcacatgatgccacaattcatccgctcgaaaaagtgccgttgggctcggcgatgagcgcggatcttattcgacgtgcttctacaccggccttgtggtgtgctttgacgcgtttgccggattatgatgaaaagagggtttgccggaagattcacatcgtgaaatacgagtgcatgatactcggtattccgctgacgatgagatgggattcttcgcgtcgcaagctgcgcagattgctgtgcaggaagggtctgcagatatcggttcggcgattcatcatgcccgcgtgtaccggtgctggaagacgaatgccaagggagttcgtaaatatttctatggcatgattcgcgtattccaaactgatctgctacgcgcttgccatgatgatttatttaccgtgccgttgcccccgcagtctatttcgatgcggtatggcgagcctagggtggtgcaggcgctgcaaagcggtaatgctcagtacttggggtcgttggttgtcggtgatgaatcgagatggatttttccagtctcgatgttgatggtcagattggcgagtatttacaattcttctcgcagtttagtggagggaaccttgcatggaaacattgggttgttgatggaattctttaaccagacgcagttgaggataagacctcgataccttgctgcggaaggattggcaaaagcgttttctgacgatgttgttccagatggggtccagaaaattgtgacaaaacaaggatggctacctccggttaatacagcaagtaagactgcggttcgtatcgtaagacgcaatgcttttggcgaaccgagattatcgtcggcacaccatatgccgtgctcatggcagtggaggcatgagtgaatcatgcaaaaccagtggcgtgtaatcgactgtaccgatcttgacggctccatctcctatgaacggggaaggatgcgagtcgtcaagaacgatacaggggagtgcgtggatgtgccacttgctcatattgcggtagtgctactgggattgcatgtgcgatgttcggctgcggtattacatgagatggcacggtatggcgtgtcagtcatgctctgcgattggcgtggtgttcctgacgctgcgctgcatgcatggactgacatgcctaccacagttaccacgcggcaattggcgcagtcgaacatgtctcttcctcgcaagaaaagtgcgtgggcgcgtattgtacagatgaagattcgtggacaagctgcttgcctcgattcatcaaaactcgaaggtggaggcttgctacgaggtattgcagcctctgttcgttcgggtgatccttccaattgcgaaggtcatgctgcacgtgaatattggaggcgaatgtttcctcaagatgagaaattcagaaggattccggggcagggttatggtcggaatgcgcagttggattatgcctatatggtgctgcgaggattcgcggttaaagcggtgatagcagcaggattaattccatctttaggcgtgaatcatcacgggcgcggcaattatttctgtcttgcagatgatctgttggaggtatataggccggcagtggattacagagtctcactgctgaatgatgaagactcgttgcaggagaaggcagtaaagaagcatttggtagatgctgtgaatcaacaattcaacggttccggtttgactataccgagctcattgaatgattttgcgcagcaatttggtttatattgcgaaggcaaaatcgacaggttgcaggttcccgaatatgtaggcgagtcatgaaacgcgatgaggacagtggcggcatgtggtgcttggtgatgtttgatttgccggtcaagacaaaacggcaacggcatgctgcaactgtctttagaaatatgttgctcgacatgggatatggaatggtgcagtattccgtatatgtgcggtatacgcctacgcaatcgggtaatagggcgacggtcaaaatgattaaagacaatctgccagctaatggcttagttagaattttgcatattagcgatcatcagtggtccacggcggcccgattttcttctggaaaacgtgagattgaggaagaaacgcctgactttctcacgcttttttgaacgtaggagagtctgaaaagattgaaaaatagcccttcttgataggctatcaagcttatcagaagggtgaatgctaattcccagcaagcaacgcgcatggacgaggcaatctacaagcttatcaagaagggtgaatgctaattcccagctgcattatgcaacattttctgtttctttcaagcttatcaagaagggtgaagataacgcccgagattttgcgcaatggttgagggctgagatagagacatggcccgtgtcctgtgtacgattttctgtcgccaaacaaaacaaaccgcgattggaaacgag

SEQ ID NO: 4271 - DNA, 16317 bp, synthetic construct
  misc_feature 1..16317: note = Synthetic
  source 1..16317: mol_type = other DNA
gtcgggcgtgccctcggggtagcccgtgagaatccagcactcgctctgcagagtcgtcatcgcgctctcctctcggtcggtccggccttcgctccacgcgcaggatagcgaagatcgccggcccgagaggacgtgacgcgggacccggccaggaggtgcgacgtcgcgggcccggagggaaagcccgggcatcggcccaggggaggtgtgctagcctcgagcggaatcaagaggcgcctgggcggagggaatccgccgacgggagacgtacgatgagcgctccggccgcgagcccgcaggaccccgcggtgaggtcgaggggacaatcggcgacccaactccttcgccggcgaatcggggacgcacggctgggcgagctgctcggccgggtgacgttgacggcggagccccacgccacggcgccgctcgaggcgcccttttccggagagcccgtcttcgacgtcccactgggcacggcggccgacatcgaggaggcggcgacgcgggcgcggcgggcgcaggtcgcgtgggcggcgacgccgttccgggcgcgcgcgaggatcttccggcgctaccacgacctcgtcctcgagcggcaagccgaggtgctcgacctcatccagctggagaccggcaaggcccgacgccacgcggtggaggaagacctggacgtcgcgatcaactgccgccactacgtctatcacggcgggcgcgagttgcgcccgcaccgccgccgcggcgccctgccgttcctcaccgcctcctgggagctgcaccctcccctgggcgtcatcggcttcatcactccgtggaactacccgctggcgctcggcatctcggacgccatgccggccctgctcgccggcaacgccgtcatcctgaagcccgaccagcagacgcccttcacggcgctttggggcgtggacctgctgctccaggccggattgccgcccgacctgtttcaggtcgtcaccggacgcggccgcgagctgggcgggccgctcatccgccgcgtcgatttcatctgcttcaccggcagcacctcgacggggcggatcatcgccgcccaggcgggggagcggctcatcggctgctccctcgagctcggcgggaagaaccccctcatcgtcctcggggacgcccacctcgacgccgccctcgagggcgccgtccgcgcctgcttcgccagcagcggccagctgtgcatctccaccgagcggctatacgtcgagaagcgcatctaccggccgttcatggagcggttcgcggcgcgcgtgcgcagcatgaagctgggcgccgacgacagcttcgacaccgagatggggtcgctgacctcgaaagaccaggccgacaagatgcagtcccacgtcgaggacgcggtcggcaagggggccacggtggtcgccggggggcggcgccgggccgatctgggcccgtacttcgtcgagcccacgctgctcgagaacgtgacgcccgcgatgaaggtcttcgccgaggaaaccttcgggccgctggtgtcggcctacgccttcgacagcgacgacgacctggtcgagcgggccaacgactcctgctacggcctgaacgccagcatctggacgcgggacacgggtcggggccgccgcatcgcggcgaggctccggacgggcaccgtcaacgtcaacgagggctacaaggcggcgtgggggtcggtcgacgcgccgatgggcggcttcaaagactcggggctggggcgccgccatggcgtctacggcctgctcaagtacaccgaggcccagaccgttgcggtgcagcgcttcatgccgatcgcgcccccggcgggcatgaccgaggagcgcttcgcccgcgtcctgaccttcatggtgggaatgctgcgccggatccccggcatccgctaggacgccccacagacggtgaaccaaagtgaacgtacgccctcggattcaaattagcggacgtaaatgtggtgccgctttgctccttgttcctcgacgtgaggaacagcaggctcgcgtgcaagtgacataagtcttgcgggcagagtttggcaggcttcggttgcggcgcagtgtcgcggtcgggctaatggtctgcttggtggttgagctggccttcgtcgccggtgatcagcgcctccgcgggcgcgttgcacgcgaggcgaccgaaatggtccaccgttctagtgtgcccgaaggctgccactcgtgggacgtccgtgagatgccaccaacatcggcgccgcgctcgcccacgccaggcgagagatcgagcgcgcgaaccccgagaccccccaccgcgtgttcggcgcggccgactggggcaatcggaaaattctaagcgatgaaaacctcaaggacctcagcgaagggttgtcgcagatctccctcggtaacaaggcggttctctccgacatcctcggcggcgtctacgagtatgtgtgtgaaggacatcaccaagacgctgctgggagccctggccaagtggtgtttcgccgggaacgagacgaggctcgaggagcctcgggtgtctcagggtcactctccgttcacggttggcaccgtagccggcgccgctggcttcgcgcgccaagtgcggtatacggcgatggcgccgacgacgacgagcgcggcgagcacaccgcaccacatgatgccgatcgtttccccgaccgcgagcccgacgacggtcgaggtgctaggtcctacgggcgagaatcccggaggaacgtcagagtagtccttggggtggtagcgcatgccccggctgacggcgtcgaggacgctgtacccgaagctgatcccgatgtcccacccgatgaaaaccttgatgccatgcttggtcatatcacttgtcccttctcaggttctcactagtgccgcgtatcaccatcccacgatcacctgcagccgttgccaatgccggcctacaacgcgattcggtaacacagtcgtgacatcgtgatacgcggtacccatttcttgatttagcgcaagggcactggcccagtaacgcagaaccccccggatctctccgaggggtcaagggcgccccgtggggcgttgcctgcgtgacgaaagtccttactgtaaccagcagggcaatcgccgctcaagtacactgggtgtagtatccacgttggatctggcctgtcaagttcgtctcatgtaggaactcttttgggaggcgacatggttaggaagcagacagctgctggacagccggcattcgactacatccttggcttggaccttggggcgagttcgattgggtgggccgtgatcaagacgtccagtggcaccccgatcggcctggcgagagcaggagtccgagtcttcgaggccggcctcgcgggcgatttggagagtggacgagcagaaccccggaacgtcaagcggcggctggctcgccaggcgcgtcgtcagaccgatcgtcgccggcgccgccttcggcgggtgtaccgcatcctgcagcgcgccggtttgttgccggcaggtgagtcgggagatgtgatcccggccctggacggccagctctttgaggtccacgccgccgccaccaagagcgaggcggagcgccaccgacttgcgcaggtcatgccgctttggctgcgcgcccgggcgctcgatcacaagctggagcggcaggagcttgggcgggccctgtttcacctggcgcagcgacgggggttcctcagcaaccggaagtctgcgccgaaagaggacgaggacgaagggaagctcaagcattcgataagcgagctcgccgaggaggttacgggttccggcgctcgtaccctcggcgaatacctttctcggctcgaccccgaagaggcgcgtatccgcacccgcccgacctctcgggtgatgtacgagagcgagttcgaggcgatctgggagacgcaagccaggtacgcccctcaactcctcaccgaggcgctgaggatcgagttgcgggaggcgatcttctatcaacgaccccttaagagtgcggcagggttgattggcgcctgcgagctcgagccggaccggcatcgcgcgccatgggccctactggacgcgcagcgcttccgcctcctgcagatggcgaataacacccggctcatcgacctagaaaccggtgaggagcggccgttggccgggagcgagcgcgagcgactcgtatccgccctggagcgtcaagctcagatgaccttccctgccgcaaagaagctattggggttcaagccgaagcaggtgcggttcaacctcgaagtgggcggcgaggcaaggttcctcggcaaccggagtgctgccgccatcgcagagatcttcggggagcaatggtggaacatgtcccaaggccaacgcgaggccgtggttgaggacgtcctcacgatagagtccgaggatgcgctggctcaccgcggatttcatcattggaaactgagtcggcgggctgcggacgccctggcggtcgtgcggctgcagccggggtactgctcgttctctcgcgtcgcgctcaccaagctgcttccccatttggagcaaggactctcggtggctgaagcgtgcgacctcgcctaccctgatcggcgggcgagcgcggtgccgcacgacgaactggcccgcctagaggaggccctcccctcgctgcggaacccggttgtgggccgggtactgaccgagctccgcaaagtcgtgaacgcgatcgtccgagcatacggcaagccgtcggtcgtccgcattgagcttgcgcgcgaggtcaaacggagccggcgggggagggaagaagcggcacgccgtatgcggcagcaggaacagcgccgtaaggtggccgccgcgctcttactgcaggacgcaggcatcgagcacccaacccgcgacgacatcgaaagggttcttctttggcaggaatgcgggggccagtgcccctacacggggaagccaatctcgttcgggaagctcttcgggccgcaccccgagttcgatgtcgagcacatcctcccgttctcgcgatcgtttgacaatagcttcgtcaacaagacgctgtgccacgcggaggagaaccgccgcatcaagaccaacaggactccgtacgaggcctatcacgacaccccgcggtacgacgagatcctcggtcgcgtgcgcgccttttccggggataaggctcgcgaaaagctgcgccggttccaggccgcagagatcgaggggcttgacgagtttacgagccgcgaactgaacgacacccgctgggccagccgtctggcggccgactacctcgggacgttgttcggcgggcgcgttgacgccaatggcacgctgcgagtgcaggtgtcctccggccagctgacctccttccttcgtggtgcatgggaactcaaccgcgtgttgtccagtaacggtgcaaagagtcgcgaggatcaccggcaccacgcgatcgacgcagtgacgattgcgctcacggccccaggcgcggtcaaggcgctttcggattcctccgagaaggcctgggcgcagcggcggcgcctcttctcgcacctcgcgacgccgtggccgaacttcgatcccgaagtcagagatgtcatcgggggactcaatgtttcacaccgggccgatcggcgagtgagtggggcccttcacgacgagaccctgtacggcatagcccctgagaagggagcggtcgtcgtccggaagccagtccatgccctcaccgagagggaggcccatgggatcgtcgacgaggcggtgcggacggcggtgcaagagaagaggcgccttctcggcgatttcaagaagttggaacaagatccgccaaccctgatctcgcgtgctggaaagcgtgtaccgattcggagggtgcggattcgcaagcacgagcgggtcgtgcgggtcggcaaggggccgcggcagcgccaggttattgagggctccaatcaccacatcgagatcgttgccgaagtggatgccgaggggcgggagacccgatggatcggacgagtcgtctcgatgctccaggcatctgtgcggcttgcttcgcacccgcccgtgcccgtcgttgaccgaacggttgggggcgaggagcgcttcaagttttcgctctgtcgtggggatggggtgctccttggtgatgaagagaatgcgaagctctggatcgtccagaagctctcggctaaccaaacaggcgcaaccacgatcgtgctaaagcctcccgccgatgctcgcaaggtcaatgagatcccgacccagggacgcatccactcccccaacaccttgcggaaggctggcgctcgcaaggtggtggttgatccggtcggaaccgttcgagatgctcgcgactgaacgcgtcgttgagatcgctgagggcggcacgcggttgtctgtttcgagcggcgcgcttgaggtgacacgcgatggtcttcaattggcggcgatccccctctcggacatcgctgttgttttggtttcccacccggccgtcactctcacccaggccgtcctgactggtcttgccgagtccggcgcagcgttcgtcgcgtgcgacgagcggcgccatccagccgcgatgctgctgccgctgcacggacattacgtgcagggcgagcgcatcgcgttgcaggtcgaggccccgaaaccccgcctcaaccggatctggcagcaggtggtgcgcgccaagatccgggcccaggcaagactcctcagtgatctccatggctctgaccaggggcttggcactctcgtcgcccgtgttaagtcggctgaccgtgcgaatgtcgaagcccaggccgcgcggcgctactggccgcttctcttcgacaatccagatttccgccgcgagcgtgacgcggccgaccaaaatcggctgcttaactacgggtacgcggtactccgttcggtcgtcgcccgtgggatttgcgcggccgggctccacccgtcgatcggcatccaccatcacaaccgctacgatgcctttcgtctggccgacgacctcatggagccgctgcggcccaaagtggacagggaggtcgcgatcatagtggccgagcatggcggcggcgtcgaaatgggcggttctgccaaggccaggctggtcgaggcagcgctgggggaggtcgtcctcgatggcgacacacggtcgatgccggacgccgtgagtcgcatgagcacttcgctggtggatgtgcttgcgggggagcgacgtgccatcgcaatccccgaagtctgatggggcgaaagccgcgtccggcgatgtcggagtacgcaagcgtgtggttgatcgccatgttcgatcttccggtcaaagaacgggatgagaggagagaataccgccagtttcacgacctcctcgtcagcgaagggttccttcggctccagttttccgtttacgcccgttacttccaatcggaagaggcaagcgaggcgcgccggcgccgcctgtgcgtcagcctgcccccgggcggccaggtgcgcttgctgtccgttaccgatcaccaatttggcaagatggaggtgttccacggaaaactgcgggctgagcccgagcgaaggcccgaacaattgtcgcttttctgaggcgaggagagagcgaaccaccggcgttgcagcatcttgccggtggtccagtgtacttgagcggcgactccctgccggccacagcgctctcgccgctgttgccgtaggcgatggcagtgtacttgagcggcgactccctgccggccacagcctgagcgaggtaaacaagcgcagtgccgagagtgtacttgagcggcgactccctgccggccacagccagtcctcgcccgacgtcgaggccctggtgagtgtacttgagcggcgactccctgccggccacagctcaagttccatcgcggtcgggaaggcaccgagtgtacttgagcggcgactccctgccggccacagcccttacctgtcgtgtacaacgtttccaagcagtgtacttgagcggcgactccctgccggccacagccggcgccacatcggccagccgccggcgacgagtgtacttgagcggcgactccctgccggccacagctcgagtgccttgacgcctccggcggtgtcaagtgtacttgagcggcgactccctgccggccacagcgtgcacgcgcacgtcggcgacccggtcatgagtgtacttgagcggcgactccctgccggccacagctcgttgaacggagaccccacctaccagcggagtgtacttgagcggcgactccctgccggccacagcctgcagcgtgtcgaccacgataggcgggagagtgtacttgagaggcgactccctgccggccacagcgttgtgagcggcggtactggccttgcgtcaagtgtacttgagcggcgactccctgccggccacagcgagtcgtcagtgtgggccgaggattccgacagtgtacttgagcggcgactccctgccggccacagccgcctgcccgatggcgagggcgacgatgccagtgtacttgagcggcgactccctgccggccacagccgcagagctcgaggggtggcgccagctctgagtgtacttgagcggcgactccctgccggccacagctggggcatgggatgggtcgcgcgcgggaaagtgtacttgagcggcgactccctgccggccacagctcggacggcgatgacccccaccagtcctcgagtgtacttgagcggcgactccctgccggccacagcttccgggagacctgggcgcgcatcttccggagtgtacttgagcggcgactccctgccggccacagctcgtcgggagttgcggtggcgtcggccttgagtgtacttgagcggcgactccctgccggccacagctcggtcggcgtcgcgtatgccggggagaaaagtgtacttgagcggcgactccctgccggccacagccgcggcgacgcgcactggtacgtccggttcagtgtacttgagcggcgactccctgccggccacagccgccacctgcgcggccttcaccgcgagcgaagtgtacttgagcggcgactccctgccggccacagcaccgccagccgcaactgcttgcgctcctcgagtgtacttgagcggcgactccctgccggccacagcgacccagcgaacattgaacactacgccggtagtgtacttgagcggcgactccctgccggccacagctcactcacccggctcaggccgagaacgtgaagtgtacttgagcggcgactccctgccggccacagcacttcgagcaggatcttgcccacctagagcagtgtacttgagcggcgactccctgccggccacagctgatcgccctcgtcctaatctacctgctgcagtggacttgagcggcgactccctgccggccacagctggacctacacgcaggggttgaccctcttagtgtacttgagcggcgactccctgccggccacagcgcaccggcatggaacgcctcaaacttgttgagtgtacttgagcggcgactccctgccggccacagcgcgggctgcacgcactgtcaaccgtgcccagtgtacttgagcggcgactccctgccggccacagccggtcatcggggactcccggctgggacgtaagtgtacttgagcggcgactccctgccggccacagcttgacatcgaggtagtaggtgggcgccattagtgtacttgagcggcgaccccctgccggccacagcgccgttgtcgcggggcgacactccccgagcggctatgtagagttgattgcgggaagggaggctacgaccgtgccaacccgacgccgcaagaagaagatcgacccgttcgaccagcacgtctggcaccacctcgccgtcctcgagtggcatgcgtcgtacagcgggccgacgtgggagaagcgcaaggaaccctacacggattggcgggacagcaaggagaagatccgcatcgagtacgacctcgatcacgaggacgacctctcgctggagatgcgggtctttgcctacaagggccccgtgctggtccgcaagcgggagttcaggaagttcgagttttgtatctacagctgcaccgacgtggggggcggcctgttccagctttgccccgatggcgagctgcgcggctgggcgcgctacccgattgctggcgtgcaggcgctgctcacgctgctcagcgccggacgggccgttaagcttgtcgttcacgcctccgagttctggcgaggtcaggcgcgaattcacaccaacggcggctggtgcacggccggccatccgagcttggaggaagaagagatccccgaggagacatcgtagagggaggtgtggcggcggtacgacccaggtacgacccacgaagtcactgagacaattcgcaggcgaacatggctgtgttaagttgatatagcgtaaggtgttacgaatggctggggagcagggattcgaaccccaataccgtggtccagagccacgtgtcctgccgttggacgactccccagcaccgctgggacgccaattgtaggccaaccctgaccggtgtcaacttcggcgggccggcgcccccgacgctcgcaggccgctttcccggcgcggccggcccgcgtcacgcgcccgggcggcgactggtagactcgcgttgccgggccggatgtcccggcgcgagcaaaggtggacacccgacgatggccaacgtggtgagaacgcgaatcgctcccagcccgaccggcgacccgcacgtcggcacggcgtacgtggcgctgttcaactacgcctgggcgaagaagaacggcggccagttcatcctgcgcatcgaggacaccgatcgcgagcgctcgaaccggacctcggagcggatgatcttcgagtcgctgcgctggctgggcttgagctgggacgaggggccggacgtcggcggtccgttcgggccgtaccgccagagcgaacggttcgcgatctaccgcgaccacgcggagcagctcgtcgccaggggcgcggcgtacccgtgcttctgcaccagggagcgcctcgagggactgcgcgaggagcagcgccggcagaaggtcgcgcacgcgctcggctacgacggccactgccgcgcgctcgcgcccgccgaggcggcgaggcgccgcgccgcgggggagccgcacgtgatccgcctggcgatgccgcgcgagggcgagaccgccgtcgccgacctattgcgcggcgagatccggatcgacaaccgcctggtggacgaccaggtgctgctcaagagcgacggcttccccacgtaccacctcgccaacgtcgtagacgaccacctgatggggatcacccacgtgatccgcgccgaggagtggatctcgtccctgccgaagcacgcccagctataccgcgcgttcggctgggaggaaccggtgttctgccacctgccgctgctgcgcaacgccgacaagtcgaagatctcgaagcgcaagaacccggtgtcgctcaacttctaccgccgcgccggctacctccccgaggcgatgctcaattacctcgccctgatgggctgggcgatctcggccgaccgcgaggagttctcgcttcctgagttcatcgcgagcttcgagatcgaggacatcaccctgggggggccggtgttcgacgtcgagaagctcacctggatgaacggcaagtacattcgcgcccttgcggtgcccgacctcctcgccaagttgcgcgccgacatcctgagcgacgaccacctcaccagggtgctcgcgctcgcccacgagcgcgtcgagaagctcgaggatttcgtcgagtacgcgcgtttcttcttcgtcggcgagatcgaatacgacgccgaggcgcgggtcaagctcgtcggcaagaagcgcacggcggccgaaaccgccgaagccctctcgcggctgctcgaggagcgcctcgaccctctcctcgactgggaggcggcgcgcctggaggccgagatgcgcgcgttcgccgaagcggcgggttggaagagcggcgacctgttcatgccggtgcgcatcgccgtcaccgggaaggccgcgacgccgccgctgttcgagacgatggaggtgctcgggcgcgagctgtgccggcgccgcctgcgccgggcggtcgagacgctccggagcatgaacgccgacccggggcgcgggcccgcgccggaaggggtgtaagcccatggatctcaccgagtcccccgcgccgctcgacttcatccgcgagatcgtcgccgcagacctcgccagcggcaagcacggcacggtcgtcacgcgcttcccgccggagccgaacggctacctgcacatcggtcacgccaagtcgatctgcctcaacttcggcatcgccgcccagttcggcgggcgctgccacctgcgctacgacgacaccaacccgacgaaggaggagcaggagtacatcgagtcgatcgagcgcgacgtgcgctggctcgggttcgactggggaacgcacctctacttcgcctcggattacttcgagcggatgtacgcgtggggcgagaggctgatcgggaagggaaaggcgtacgtctgcgactgctcggcggaggaggtgcggcaacggcgcggcacgctcaccgagcctgggcgcgcctgcggccaccgcgagcgcccggccgccgagagcctcgacctgttccgccggatgcgctcgggcgagttccccgacggcgcgcgcacgctgcgggcgaagatcgacatggggtcgggcaacatcaacatgcgcgacccggtgctctaccgcatcctgcacgcgccgcacccgcacgccggcgcggcgtggtgcatctacccgatgtacgactacgcccacccgctcgaggacgcgatcgaggggatcacgcactcggtctgcacgctggagttcgaggaccaccggccgttctacgactgggtgatcgacgagtgcgagctgcccgagccgcacccgcgccagatcgagttcgcgaggctgaacctgacctacacggtgatgtcgaagcgcaagctgctgcagctcgtgcaggagggcgtggtctcggggtgggacgacccgcgcatgccgacgatctccgggctgcgccggcgcggcttcaccccggaggcgatccgcgatttcgccgaccgcatcggcgtcgccaagcgcgacagcgtcgtcgacgtgcagctcctcgagcactgcttgcgcgaggacctgaaccgccgcgcgccgcgcaagttcgcggtgctgcggccgctcaagctcgtgatcgagaactaccccgaggggcaggtggaggcgttcgacgtgcccaacaaccccgaggacccggccgcgggcacgcgggccgtgcccttctcgcgggtgctctggatcgagcaggacgacttccgcgagacgccgccgcccaaatacttccgcctcttcccgggcaacgaggtgcgcctgcgctccgcgtacctcgtgcgctgcaccggcgtcgtcaaggacgccgcgggcaacgtcgtcgaggtgcgggccgcctacgaccccgcgacgcgcggcggcgcgacgcccgacggccgcaaggtcaaggcgacgctgcactggctctcggccgcacacgccgtcccggccgaggtccgcctgtacgaccggttgctcaccaagcccgacgccggcgacgtcgaggaggggcgggactggaagtccaacctcaacgccgactcgctcgaggccctcggcgactgctgggtcgagccctcgctcgccggcgccgcgcccggggagcgcgtccagttcgagcgcctcggctacttctgcctcgaccccgactcggcggcgggcaagctggttttcaaccgcacggtcacgctccgcgacacctgggcgaagatcgaggagaagcagagaggctgagaagggcgtggtccgtggaccgtggtccgtggtccgataaagaccgtggatcgtgggtcgagtgaccactttgaccccacgacgccccgaagtcggtgccgcgcaaccgtgagcggaggctacggctcggcgtgtccctcgcccgtcgtcgtgcgctcgacgccgtagaactccagtcgttccgagtcggcccaggcatcgatggcatctgccgtcgcgccgaggtggaggagcgcctgccgcgtggtctcgaggccggcctcgaacccgggctgtacgaccgcgaacacgccggcgctccgcagctgctcgacgtggtccgcgctggcggctcgggccacgatgtggacgagctcgttgagcgctcgcgcctggacgatgatcgatcgggaaaccacgatacctgggaccgtgaccaggaccagcctcgcggtcgcgatccgggccgcctcgaggacgaccgactgtgccgcgtccccgaacacgaccgggattcccgccgcgttggcctggtcgatccggtgctggtccagctcgacgatcacgcacgggagcccgcgccggtgcaggacctccgccacatgaaggccgccacggcccccaccggcgatgacggcgtggcctgcgagcccctcgcgagggaaattgatcgtctccagcggttcgtgccgaaacctccgccgcttcagggcgtacaggcgcgccgtctggccggagacgagcggggtgaggaccatgctcacgacggcgacgctgaggacgaggagtgggcgtggcgtggctgaggttgggtggccggaacggtggggagcggtttggcggagagggggggattgcgggcgcgcggcgctcgggtcgggtggcgcaggcgccacacactgaagatcgcgcgtggtcgaggcgctcaacccgggtcgcttcacatcgtgctgtctcggaccccggtctttgattggcggagagggggggattcgaacccccggtccgggtttaccccggacaactgcttagcaggcagccctgatcggccactccagcacctctccgcagtggccgcgagagtctactccgcggtccaggggtgcgcaagcaaccccggcggcgcccatcggctacgatgggccgccatggcaggcggggcgcagcgggcggtgctggtcaccggggcgacggggtacatcggcggacgcctggtcccgcgcctgctcgagcgcgggtttcgggtgcgctgcctggtgcggtcggcgcccaagctggcgacgcggccgtggagcggcggtccgggcgtcgagatcgtccagggcgacgccggcgaccgtggggcgttggcggacgcgatgcgcgggtgtgaagccgcgtactacctggtccactcgatgattgtcgccggccgggcgtacgaggagcgcgacaaactgctcgcgcgtcgtttcggcgaggccgtggccggcgccggcgtcgggcggatcgtgtacctcggcggcctcggcgaggagggcgcgggcctttcccgccacctggcgtcgcggcgcgaggtggaggcggcgctcgccgcgggcggcgtcccggtgacggcgctgcgggccgcgatgatcgtcggctccggctcggcgtcgttcgagatcctgcgctacctcgtcgagcgcctccccgtaatggtgaccccgcgctgggtggacacgccgtgccagccgatcgcggtgcgcgacgtgctgcactacctggtcgcctgcctcgacgcgccggccacggtcgggatgacgctcgacatcggcggcccggacgtgctcccctaccgggagctgatgcagatcatggccgcggccctcgggctccggcggcggatcatcgtgccggttccggtcctgaccccgcgcctgtcgtcgctctggatccacctcgtgacgccggtcgggaaggagatcgcccggccgctcgccgaggggttgcgcaacccggtcgtatgccgcgacgaccgggcgcgcgagctgatgccgtgcgacccgatgccggtgcgcgaggcgatcgtcgcggcgctcgggagggcggagcagcacgaggtggagacgtcgtggctggacgccgggccgatcccaggcgacccggactgggcgggcgggacggtgttcgaaaaccggcgcgccgcggagatctcagcgccgccggcggtcgtgttcgcgagcgtgtgccggatcggcggcggccacggttggtacgcggccgacctgttgtggcggctgcgggggctgctggaccgcctggccggcggcccggggttgcggcgggggcgccgtgacccggaacgggtcggttttggggacgccctcgatttctggcgtgtcgtcggcatcgtccccgaccggacgctccggttgcgggccgagatgaagctgcccggcgtcgccgagctcgagttcgacgtcgagccgcctcaggcctcgggggcgggctgccggctcgcccaggtcgcgcgcttcatgccgcgcggcc

SEQ ID NO: 4272 - DNA, 23144 bp, synthetic construct
  misc_feature 1..23144: note = Synthetic
  source 1..23144: mol_type = other DNA
ctgccaggcgcgccagctcccccgcgcgttcgcccacgcgttcctccagcagggcgtgggcccgggccagtctggccgcctcccggccgcgccgggccaggagcaggcagagggcggcgatcagggcggtctccagggccaccacggcagcgacgatcgccgtctcaccggggtagcgcctgtggaggggcggttcatcgaacaggatgcgcgacccggcggggagcgcgctggccggaatgccccagcggtccagggcgcggcggtcgaaggtcgggggatcgggcaccgagggcagggccgggggggcgccccgggccgcggagagggcctcgtccacggccagggaggccatcatgcgggggctgacgaggtagccccccgcgatgccccggcccaggaacgtttcgctgaaggcgaagaccggggcgctcgatgccgccgccacgcgctccagggcgtcgccggggccgtcggacggggggagcgcgtagagcacggccgaatggggcgcaaggccagcgacgcgcccggccatctccgactcggagagcccggcggccacctccacctccaggcgcggcttgcgggccgtcagggcctcttgggccaggtcgagcgccgcgcgtccccggccctggtcgtcccccaggacgagcacgcgcccggtccggggggccacggccaggatcaggcgtgccgtggcctgtatccagggggcgtcgtcgatggcggagcggaagttgggcaggccggagccctgcccccggctggcgaggagcaccaccggcgcgtccccgaagatgtcccggccgtgccgctccaggaaacgcagggcgttgtcggattcggccacgatggcgtgcgggggggcgggcgcgtggcgtgcggccaggaggtcccgcagggtcttctcctgggccggagtggagaagcgcgccgcgtccagtggttcgatggagagttccagtccggcgccgtggcggttctgggcctcggccagtccggccaggagttcccgggaccaggggagcgtctgtccggaggaaaggagcaccgccacgcgcagggtttcggcggccggggccgggccgtgccccgccaggagcatggccagggccagcagcagcgcccgccgccaagtgcgcggcagccagcgcggcccggacgcctcccggtgggacggcccaggccggacaggggccggctggtgcggcgcgcggcgggtcatggcggctccttgtccggggtcggcggcccgatccgtacgcctaggatccctgctcctcgcccagttcgttcaggaagaattcgtcctcggtccagccctcgcgcactttcacgaacagctccagatgcacggggccgcccatgagttcgatgaggtcctgcctggccttgctgcccacgtccttgagcaccttgccgcccttgccgatgaccatgcccttgtggcggtcgcgggagacgtagatcacggcgttgacgcgcgcgcccttgggggtgtcctgccaatgttctatggccacggccgtattgtagggcagttcctgggagagggccaggaaaagcttttcgcggatgatctccgaggccagaaagcgcatgggggcggtggtcagctcgtcttcggggtagagggagtcgccctccgggaggtgcgcggtcatcacggacaggagctggtcgagccccttttccttgagcgcggacacgggcacgatttcggccccgggccacgcctcgcccaggcgggccatcacggggagcatgtttttcacgtcggcaagggcgtctagcttgttgagggccacgatcacgggcaggccggagcgctccacggggcgcgagaggagcttgatgtccttttccaggagatcgggtttctgcaggtagaaggggcagtccagcaccaggacgatggcctgggcctgggccagggcctgccaggcggcctccacgatgcgcgaattgaggcgcgaaccgcgcggcacgtgcacgccgggggtgtcgatgagcacgatctgggcgtctcccagcgtgagaatgcccgccagctggttgcgcgtggtctggggcttggggctgacgatggccagcttctggcccaaaagggcgttgagcagggtggatttccccgcgttgggggggcccagaagggcgatgtggccgaagcggtggggggaggtggacatgcggtgcgccttcaaccggccggagccggaatggttgtttaggtgacgaggccgtaggttctggccatgtcttcgttgaaaacgagaaaaaactgggatgaaagtttgaacgccttgtggatgtgtttgcaatgccgttccagcatggatttaagctgcaccgtccaatccggttggtgtcccttgacgatgagaacaaaaacaaatgcgacagaggacaggtcggcttcaacaagagatttcggcaattcggtcgcgctgtttccgtgccttccggcccgaaggctcaggtagaacaagagagaatgaaccatcttctggcggatttcgtccaggaatgagtggaaggcgaggtctttgggagagctggacttggcttcaataaacaacagggcctgcctgttgcgtttgagttttttgacaagaaggaattcgacgatgctcggcgggtccttcaggctcttgtatgcgtggcctttctcaacccaatagacatcatcctcagcaaatggtccaaaggtcatcccggattcttcaattgtgacgggactcattcaaacgccatcccgacttcttcttcgtagagccgcacggattcgtcgataatggggttctccggcatgccttccaggagatcgtaggcatgccaagtccccttgccatcgatggactggacgggaatggagacgccccgctccctggcgatcaggtggagcttcttgatgacgaagtacgagtggctggcgatgaagaactggatgccaagtttcgcgatcgctccgatgatgtcgagaaatctggtaagggctttggggtggagagcggattccggctcgtcgatgaaaatgacggagttgacgtcaagatgcctgttgcccagcaatgtgtcgagaatggcgatctttttgatcccttccgcagtggcgtgcatgttgtatttgattctgccctttgtgaagagccattcggttgaacgctggtcgtatttgaccttgccgccaagcattgactccagccctttcctcgacttttcaaacgcgaggtatttccgcccacgacttgtcggaacctgcaaggccttcacaagatcgaggtatgtgtcgtcaaagccgaacagcttgtcttgctccctgcttttcaggatgatgccgaaaagcgaaagcacttctttggcaggcaagaagacagaatttgattccctctgtccggatttgatttttgcggtgagtttcggttttcccttctcgctcgcgagggagaaggagaacggcctctcgtcaatgtccatggaacacttcagagggccggagccatccctggcgacaatgtctgtgatcttgtctgtctggaaggtccaaaaaagcttttcttcgattatttcattgatgtcgcgcctgtcgtctccgcgcctgaagagttccacggagcgcaaggcggtataaagagctttgagaaagaaagtttttccgctcccgttctcgccgatgacgagattgatcggaccagggttctcccactggagattccggatcgggccgtagttggcgattttcaggttcgtgatcatggcgctcccggcagagtgccccgaaaaagggttgacggacaagacgttgcagctctccgggactaggccaaggttccacgccgggtcaaggatcatcgtaaagcgccccttgccttccctcttgacgatggctatagccgccctgtcatgacgaaagacctcatcattgtcgagtccccggccaaggtgaagaccatcaagaagttcctgggcgacaaatatgtcgtggaggcctccgtgggccacgtccgggatctgccccagaagaagctcggagtggacgaggccaacggcttcgagccgcagtacggcgtcatcccgggcaaacagaaggtggtggaccaactggccaaggcagccgccaaggccggcaccatctatctggcccccgacccggaccgcgagggcgaggccatcgcttggcacgtggcccagatcgtcaaggaagccaacccacgcatcgagcgcatccagttcaacgagatcaccgcgcgcgccgtgcgcgaggccctcgagaacccgcgccccatcaacgagaagctcttcgagtcccagcaggcgcggcgcatcctggaccgcctggtgggctacaagatttcgccgcttctctggaagaaggtgcgcaagggcatcagcgccgggcgcgtgcagtcggtggccctgaagatcgtggtggaacgcgagaaggagcgcctggccttcaagcccgaggagtactggcccttcaaggcccgcctcgaggcggacctgcccccggccttcgacgccgacctggtgaagctctccggcaagaaggcccacgtgggcgacgccgccacggccgaggccctggacgccgaactcaaggcccagcccttcgtggtgaaggacgtggccgagaaggagcgccagaagtcgcccccgccgcccttcatcacctccacgctccagcaggccgccaaccagcgcctgggctatcccgccaagaagaccatgggcgcggcccagaagctctacgagggcgtggacctgggcgagcgcggcaccaccgccctcatcacctacatgcgtaccgactccacccgcgtggccgccgaggcgcgcgaggccgccaagacctacatcgtggagcagctgggccaggaatactaccccgagaaggcccgcgtcttcaaaaccaaggccggcgcccaggacgcccacgaagccatccgccccgtggacgtgaacatcacgcccaaggacgtggcgggcctgctcccgcgcgaccagttcatggtctacaagctcatctgggagcgcttcgtggcctcccagatggccgccgcccgcttctgggacacccaggtcggcgtcacggccggtcgcgccgagttcaaggccaagggcgaacgcctgatcttcgcgggcttcctcaaggtgcacggccaggacgccgccgaggaggagcccgacgcctccgacgccacgggcgcgaagctgctgcccccgctcaaggccgggcaggagctcaagctcctggagatcaaaaaagagcagaagttcacccagccgccgccgcgctacaccgaagcctcgctggtgaaggagctggaggagcagggcatcgggcgtccctccacgtacgcggccatcatctccacgctcctggaccgggactacgcccgcctggaggagaagcgcttcgcccccacggagctgggcgtcaccgtgtcggaccgactctccgagcacttccagaccatcatggacgtgggcttcaccgccgggatggagacggccctggaccaggtggccgagggcaagaaggactggcgcgaacttctgggcgatttcaccggcgacttctacgccgccctggaaaaggcctccaaggagatgggcaacgaggagaccggcctcgtctgccccgagtgcggcaagcccctcaaggccaagttcggcaagtccggccccttcgtggcctgctcgggctacccggagtgcaagttcacctccaacttcgtgcgcgaggccgacggcacataccgcctcacggagcgcgaggtgggggccgactcgggcctggtctgccccgtgtgcggcaagcccatgatcgtgaagttcggcaagcgcgggccgttcctggcctgttcgggctatccggagtgcaagtccacgtcgaacttcacccgcaacgaggacggcacctacgccttcgccgccaccccggagcaggccccgcccgaggtggtgggcacgtgccccgagtgctccaaggacgtgctcctcaaacgcacgcgctcgggctcgcgtttctattcgtgttcgggctatcccaagtgcaagtattccaagcccttcacctcgggagtcaagtgcccgcgcgagggctgcgacggcgagctggtggagaagagttcccgctacggcaagctcttctattcctgctccaactaccccaagtgcgacttcgccgtgtgggactggcccgtggacgagaagtgccccgagtgcgactcgcccatcctggtgaagaagcagtccaagcgctacggcgagcacctggcctgcccggtgaagacctgcaagtaccgcaagcttcagcagtagccggaggcgcgccgtgaagatggactcgatccccttcgggctgacggactgggcgggcgtggagcccacccgccacgagggcgagacgggccacgccctgtggcgcacccgcagcttcggcccggcggagaaccccctgcgcgtgcgcatggtggaatattcgcccggctaccgggccgaccactggtgctccaaggggcacgtgctgctctgcctggagggacgcctggagaccgagctcgaggacgggcggaccttcaccctgacccccggcgtgagctaccaggtggccgacggcgcggagccgcaccgctcctggacggaggtgggcgcgaagctcttcatcgtggactgaccccgtcgccgcctccgggcgcgtctgggcggccgcgcccccgaacgccatgggattcctgcgcctgctgctggccctgatcgtctgcgccgaccactacctgggggccctgcgcctcccgctgccccgcttcctggggctgggcgcggacatggccgtggaggtgttcttcatcatctcgggcttctacatggggctcatcctcacgcggcgctacgaaggccccgggcgcgcggcggccttctacaagagccgcttcttccggctcttcccggtctactgggccacgctggcctgctacttcgcggccctggggctcttccgggtctggagcgggcgctgggcgcacctgccggagtggttccacgccgtctcggggctggaccttttctcgcaggcctgggccgtgttctccaacctgttcctcttcggcggcaacctgctgttcttcttctccatcgcggagccttcgagcctgttcggggctttcagccccgcgctgccgccctcctggatcgtgctgttcgtcccgcacgcctggtccatcgagatggagctggggttctacctgctggccccctggcttgtgggcgtgcgcgcccgctggctggtcccggcggtgctggcctgcctggcggggaagctctggctggagaacgtggggctggtgaacgattcgtggtacctgcgcaaccccgtgctggaccttgggctcttcgcgctgggggtgctggcgcaccgggtgtacgcgggggtgtacgcccgggacctggaccggggcctgcgctggggcttcgcggcggcgttcctgctggcgctgctgttctaccacaaggattcggcccactggatcttccccctgggcgtgcacctctgcgcgttcctgggcgtgcccgcgctgttcgccatcacgcgctccagccgggcggaccgcctggtgggcgagctttcctaccccatctacctgtgccaccagatggtgttctacctggtggccctcacggccggattccgccacgtggtcccgctgtcgctggccgccacgctggccttctcggcgctgatgcacgccaccctcggccgcgccgtggaccgctaccggcacgggaagtactagtcatcccgccccctcgccgctctgcacggcccacagcccggcgtagacgccccggcgctccaggagttcctcgtggcggccgcgctccacgatgagcccgtccaccaccacgatgatctcgtcggccaggcgcaccgtggagagccggtgggccacggccagcgtcatgcggctggcccggaaggcgtgcaggttctcctggatgagcccctcggtgcgcgtgtccacggccgaggtggcctcgtccaggatgaggatgtcgggctcgcgcagcaccgcgcgcgccagggagatgcgctggcgctggccgcccgagagcttcaccccgccctcgccgatgggcgtgtcgaacccctggggcagctcccggatgaaatcgagcgccccggcgatggaggccgcgcgctccagggcctcctgcgtggcctcctgcgagcccagccggatgttctccgccgccgtgcccgcgaagaggaaggcctcctgcgacacgtagcccatgcgcccgcgcaggctctccagggtgaagcccgccatgtcctccccgtccaccaggaggcggccggactgcgggtccaggtggcgcagcgccagcttcaccagcgtggacttgcccgcccccgtggggcccaccacccccagcacccggccgcgctccagggtgaagtccagcccgtgcagcacgggctcgcgcccggggtaggcgaagcgcacgttctcgaagcgcagttgatgcggggcgtggtccagggtcctggccccggggcggtccgcgatggcgggttcgagatccagcacggcgaggatgcgcgcggccgaggcctcggtgcgctgaaactggttgagcagcatcccgaacacgaagagcggcagcaccatgcgcgtggccaggagcacgaaggtggtgtagtcgcccgccgtcgggccgtcccccgtgagcgtgagccagccgccgcccgcgatgatcagcgcgaaccccgccccggccacggcgtagagcaccgggatgaaccgggcgcgcgccagggccgcgcccacggcctcgtcgcggtagcgggccgaggcggactccacgcgtgcggcctggtcctcctcggcggtgaaggcctggatcacgcccatgccgcgcaggttgttgccgatgagggcggccacctggcccacggccgtgcgcgcctcgcggtagcgggggcggatgcgcgtggagaaggtgcgcacggcggcgaaggcgaagggcatgggggccatgagcaggagggccagacgccagtcgatccagaaaagcacggcgaagctgcccgcgaaggtgatcaccagccggatggccgatgtggaggcgtcggccaggaagttctccagggtgtccacgtcggaggagaccacgttgatcaggtcgccgctttgccgctcctcgaagaagtgcatgtcctggcgctggaggtgccggtagagggcgttgcggaggtcgtggcgcacgttctgggcgatgcggtccaggaggaaatcgctcagggactggcacagggccaggcagacgaaggccccgagcaccagcgcgccgtagagcagcaggcggtcgcgcacggccagggcgtcgggtccggagagcggcccggagagggcggcggtgacggcgtccacggtgcgccccaccaggaccatgggggccaggtcgaaggcgcgggcgacggcgttggaggccagccccaggaggaactggccccggtagggggccacgaagggcagaagccgcgtgagggaccagcttgaagcgatgcgcatcccgggtctatactccagagcggcaaggaggaaaaccatggacaacgcccgctacgtctgcctgctctgcggctacacctacgaccccaaacgcggcgaccccaagggggacatcccaccgggaacgcccggagacaagctcccgcccgactgggtctgccccctgtgccgcacggaccagacgaatttcgccaggaaggattaggaagtgcgataactaaaacaagaagcccggtgcgagccgggcttcttgttttgctcgggacgcagcctggcgtccccagaggtcgcccgcaggcgtggcctcgcggagccgagctccttgttgtgacttgacgtttctccgatacatgccgcacacgttgatgtcaaggcgtgcatcgtaaaaaacgtgcgacacgaaggagacctccatgggcgcatcccccacttcctccctgcttctcggcctggatcttggcacggcttccgtcggttgggcgctcttcgccctgggcgagggcgactctctcgaacgcctcgtggattgcggcgtacgcatcttcgaggaaggcaccgaaggcgacatcgaggccgggcgcgacgcgagtcgcgccgtaccacgtcgcgaggcccgttcgcgtcgccggatcatcgagcgcaaggtcatgcgcaagcttcacctccagcgcacccttgcgcgcttcggactcctgccggagattccatcccttcggcccacggagcgggtgaccgccttccaggccctggacaaggagttgtccgaagacttctacgcgcgccatcccggattgatgctgcctgaaaacggcgggcgtcgtcttttcccctaccatctgcgcgccatggggctggccgagcggctggagccccacgagttcgggcgcgctctctaccacctcgtgcagcgccggggcttccattccaacagccgccgcgcgccctcggacaaggacgagggcaaggtcaaggacgccatcaaggccctgtacaaggaaatgggggaccgccacctaggccaatacctggccgccatcggcgggaacgcgccggccgccgacggagagtcttgcggcgagcgccgggtgcggggccgctggctgcaccgggacatgctccgggcggagttcgacgccctttgggccgcccaggcggcgcaccgcgccccgtgggccacgcccgaggcccggggggccgtgggcaagtgcattttctggcaacgccccttgaagagcgccaaggaactcgtggccttctgcgaactggagaagcgcgcccgccgcgccccgcgctgcacgttggaggcccagcgtttccggatgctctccaagctcaacaacctggaggccgtcacgccccacggcgaggtggtcaagccggacgcggcccagcgcgccgtcctggtggagcgtttggaaagcaaaggcgacctgagcttcgccgatctgcgcaagctcctgaacctgcccaaggggtcggaattcaatctggagcggggcggggagaaaaagatggagggcaaccgcacggccgccaagctccgggcggccctgggcgcggcctgggacgccctctccccggaggacaaggacgccctggtgctgctggtgtatgccaccaacaagcccgaggtgctctcccgggtggcggcgaagcgcttcgcgctcgctcccgaggcggcagcgaagctgccggaggtgcgcctggaggaggactacgccgcgctttcccggagggccatgcggcgcatcctgccccacctggaagcgggggcgccctacatcacggcccgggagatggaatacggcaagcccgcgccgcctccctgcaaggacctgctgccgcccgtggccgccgcgctcaaggggctcaggaaccccatggtgtcgcgcacgctcacggagttgcgccgtttggtgaattcccttgttgcgcgccacggcaagcccgcgcgcatccgcgtggagcttgcgcgcgatctcaagcggtcgcgcatggcgcgtcagcgcatctcgaaggacaaccgcgcaaggcagggcaaccgggaccggctctacgacgagatcctgaaggcctatccaggcctcggtcagcgcaaggagaccgtggcgctcaaggccttgctggccgaggagtgcacctggcgctgtccctactgcggcggagtcttcggcaacgacgatctcttcggcccccatgcctcggtggacatcgagcacatcctgccgtactcgcgcagcctggacaactcgttcctgaacaagaccctggcccataacgcctgcaacaaggccaagggcaaccgcacgccttacgaggtctggggcgaggcggccacggagcgttacgcggcgatcctggacagggtgtcggggttcaagtgcgacggctggaccagggaggccaagctcaagcgcttcatggtgcgcgatatgtcccaggagttcgcggagttcaccgcgcgccagctttcggacacgcgggtcgcttcgcgccttgccgtggagtatctgggatggctttacggggcggaggccctgcaacgggtgaaggtcagttcgggcggggtcacggcgctcgtacgcgacgtgctggggctcaaccatgtgctgggtcgcggcgagaagagccgtgcggaccaccgccaccatgtggtggacgccgtggccgtggcctgcacggaccagggccttatccagcgcatcgcctcttcggccgaatgggccgagacgcacgcccagcgcattgcgcgcgcaccgctttccccgccgtggtccgggtttctggaggacgtgcgggcgcgcgtgttgggggtgaacgtgtcgttgcggccccggcgcggcgtgaacggcgcgctgcacgaccagaccttctattccctcaagggcggccgggtgacggtgcgcaaggcgctggaaaagttgagcgccaccgaagtggggcagatcgtcgatccgctcatccggtccctggtgcaggcgaagctggcggagcttggcatcaaggagcccgtcaaggctttttccgacggcgcgaatccggtgtgcgtggagcggctggggggcacgcccgtgcgcagggtgcgcgtgctggtgaagggcacgccggagcggatcggccagggggaccgcgcgcgtctggccatgaccggcggcaaccaccacatggccgtgttcgagaccgtggacaggaaggggcgccccgtgtgggtgggcgaggtggtgacgcgcttcgaggccaagcgccgcgccgggcgcaaggagccggtggtgcgccgggagcgccccgatggggggcggttcctgttcacgctgacgagcggggatgtggtggctatcatggaaggaagtgtggagacgttgtggcgtgtgcgaacagtgaccaccgacggtggtcgtccgcgtatccggatgactccgctccaggatgccaggccggaaaaggaaatttacatcgataagaacgtaagaaggccatttgtcagtcaaatgggtgatggaagttaccgaaaggtcacggtgacgccgcttggcgaagtgcgtcgggacaacacgtgaaccgcatcctggacatcggggaccgcccggcccggctgaacgtggaggacggtcttctctgcgtgcgggtggagggcggtcccgaggcgcgggtgcctttggcggaggtgggcgcgcttctggtgtcccacgggcgcgtggtgttcacgcacggcgtgttggccgggttgtccgccagcggcggggtctatgtggcctgcgacgagcggcacatgcccgtggggatgatgctgccgcttgcgggcaacagcgtgcagacggagcggatagcggcccaggcggaggcttccgcgcccttgcgcaagcaggcctggaagtatgttgtgcagatgaagctcgtgaaccaggcctgggcgttgtcccttgtgcgggggcacggccacgggctggagggcatggccgcgcgcgtgcgctccggcgacccgggcaacgtggaaggggaggcggcgcgcaagtattggcggtttctcttcggagcgaacgggttcacgcgggaccgcgcttccgggggcgtgaacgcctggctgaactacggctacgcggtggtgcgcgcggtgatgggccgtgcggtgtgcgcggcggggctccatccgtcgctggggctgcaccaccacaaccgctacgacgccttctgcctggtgagcgacctgatggaaccctaccgtccgcttgtggacgtgtgcgcggcgggcatggcggcggcgcacggcacggagcgggagcttggcaaggagttgaagcgggagcttctggagtttctgaaccaggattttctggtggagggcgagcggcgggagctgttcagcctgtgcgcgcagacggcgcgcagcctcggggagctgtactgcggccagcgcaaccggatgtttctgccccggttcgagggtttgggcggtgtgccgtgagcgggaggttccgtgccatgtgggtgttcgcgctgttcgacctgccggtgacggccgtggtggagcgcaaggagtatacgcgttttcgcaaggagttgaagcgtcttggcttctcgatgcttcaatactcggtgtacgcgcggtattgccacagccgggaatccaaagacgcgttcctgaacaaggtgcaggcgctggtgccggacaagggcgaggtgcggctgttgtccgtgacggacgcccaattcggaaaaatgcgggtgttggtgggaaaaaaacggcgaaaaccagagaaggggccggagcagctcatgcttttctgagctgctccggcagaatttcttcagcaatttcagtgtctttttcttcaagagattgtagccgctgaagaaatggggtcaagtcacaaccgtagaccagctgcatgaacgcttcggaggaattgtagccgctgaagaaatggggtcaagtcacaacaggtgacgagggagttgtggtccacgctcgattgtagccgctgaagaaatggggtcaagtcacaactcacctgggtggggttcaacatccgcacctattgtagccgctgaagaaatggggtcaagtcacaacgcaggagaggctgtactgatggaagcccccattgtagccgctgaagaaatggggtcaagtcacaacctgggccacgagcacgccgtcgatttccgaattgtagccgctgaagaaatggggtcaagtcacaacacgcccagcagtggaaggggtctgtgcttaattgtagccgctgaagaaatggggtcaagtcacaactttccgcgttgtgctggaggttgtcgttggattgtagccgctgaagaaatggggtcaagtcacaacacctcgggaggtggtggtgattcctcccctattgtagccgctgaagaaatggggtcaagtcacaactcgcgcccagggtggccgggtagaccttagaattgtagccgctgaagaaatggggtcaagtcacaacgaggagatggaaccccgcacgtgggggatgattgtagccgctgaagaaatggggtcaagtcacaaccttgctgggcctggaagagcttgagtttgaattgtagccgctgaagaaatggggtcaagtcacaacgcgcaccaggccgatgagctgcgggtgcgtattgtagccgctgaagaaatggggtcaagtcacaacgaacaagcgctgcgggacgcgcccggatgaattgtagccgctgaagaaatggggtcaagtcacaacattgactagggcaggaatgcgctactcttgattgtagccgctgaagaaatggggtcaggcggccccggccccctccgcccgcccccccctgctcatcccacggccgccacgcgatcgtcacccggctgtcctaggatgtctgcgggtcggcggtccggtccttttcaggaggtgcggcatgcgcgcgttcaacgagtccgagcaggccatcctgcgcgtggtcgaggcgttcgacggggtggtgaaatacctgggcatcaccccggaggagcacctcgtctcctacagccagaagcacctggaaaggctcctggacgaggaaatcctcgaacgggccaagctccggttcttcagcggcaagatcaagggcgtgcgcttcacgcgcgacgggctggccatctggaggctcttcaccggccaggaaacgcccgaggccaagctgcccgacgcggggctcctcgtgcgagacctctacctgcgcaacggcctctcctccaccgacgaggccaccccgcgcgacacgctcctcaagcaccactcccgccgcgccctggtggacgccttccaggccgggctcgtggccaaggtcaagatccgccaccccggcggcgaaaagaccaagggtttcgtggtcacccacgcgggctacgcctggctgcgcggcaacagcctcatctgagcccggcgcgcccctacttgggcgaatagccccgggcgcgcatgcacttgtcgcgcaaatcctccaggcgcttgtcgtggatgcttgaatcctggagccccgccgccgcgcgggaggcctcccagtcgcactcggagtagtcgcgctcctcccgggccgtgtcggcgccgggggcctggtagacggtgcgcccgccgcaggaggcgcaggccagggccgacagcagcgcggcggcaaacgtgatgcgcccgatggtcatgtgtcgcctcacagccaggtgaagagaagaatgtagaaggcgatgccgcccagggcggcgtaggcgtcggtcttggacatggcggtcctccctggtccggctctctagcccagcccagggcgcgcggcaagaccgccgagagcctcagcaaatgattccgaacgattgcacgcgcggcgtttcttgcgtaacaagaacgcgaaaccctcgaacggaacgccgccatgacccgcaagttcgtcatcatcacctcctcggccctgctgctgctgggcctggtgatgtggcagctgggcctgcgcgcccagggcgagctcaaggccgtggccaccgagcagttcaaccgccagcagctcatcctggcccagaagctggcccaggacctggaacagcacttcagcttcctgggcgcgagccttctggaactctcgggcatcctgcaccgccatcccgcgctcatgggcgagccggagaaggccctgccgcctttccaggagatcctgcgccagagcgaggtgctggccatcggctacgtcccggcgggcggcggagccgtctccttcttcaacgacaagggcctcatgtccggccccctggtgctggactacggcgccttcctggactgggccaggggcagcgagaccggcaagctcctgacgggccgcgtggagagcccgccccaggggcccttcgccggaaagaccatcctgcgcatggccacgcgctactggccccacgaagcgcccgtgagcgtcggcgtcgagggcccgggcgtgctcttcttcgtggtggacgccgtggccgtggccagacgctacgcccacgacgtgcgctccggacagacaggctacgcctgggtgatcgaccagcgcggctacttcctggaccactacgaggaggacttcatcgcgcgcgacgccttcgaggtgcgcaagcgccgcgatccgggcatcgacttcacccgcatcgaccagctcatgcgcgagaagatcatgaaaggcgaggagggcgtggactggtacgtctcgggctggcaccggggcgcccagggcgaaatgcgcaagctcatcgcctacgccccggcccacatcgcaacggaccagccggacccggtggtctggggcgtggccctggccgcgcccgtggacgaggtggagggcatcatcggcaaggtggccctgcgcgagatgttcatggtggccgtgttccaggtggtggtcttcaccggcctggccgtgaccatgtatttcgccttccgctggtcggccaacctcaagaccgaagtggaggcccgcaccgccgaactgcgcgaggcccgcgaccgcatccgccagaacctccaggaactcctggaaacccaggagcgcctcatccgctccgaacgcttcgccgccgtgggcgaggccgccgcccacatctcccacgagatccgcaaccccctcatgctcatgggcggtttcgcgcgccaggtgcgccgttcactgcccgaagacgggcgcgaagccgaaaagctccggctcatcgaggaggaggccaaacgcctggaaaccatgctggaggaagtgcgcgacttcacgcgccccgccgcgcccaagctcgccccgcgcgacctcaacgccaccgtctgggacaccgtgaccctcctggagcaggagctggcctcccggggcgtgaccctgcgcgcaaacctggacaaaaccctgcccccggccgtgcacgaccccggccaggtgcgccaggtggtgctcaacctggtgaagaacgccgccgaagccatgacccagggcggcgcggtgaccatcgtcagccgggccagggacggcttcgccgaggtggtggtgaaggacgacggcccgggcatggcgcccgaagaggccgccaaggccttcaaccccttctacaccaccaaggagcgcggcaccggcctgggcctggccgtgtgcgaacgcatcgcccgcgaccacggcggggccatccgcctggacacggagaagggcaagggctgcgccttcaccctgagcctgcccctggagcggcgtggggccgaacagagggcctgacgccgggccggggaaattgcgggaagatgcgcgcgaatcgcactccgtgcttgacacgccctcgatcgcaccgtacacatcctcttcctttcgacagcgtaggaccgtagctcagggggagagcacttgcttgacacgcaaggggtcaggagttcaaatctcctcggtcctaccacgtgaccccaggggaggcgtagcctccccttttttggcatcctagggaggcggtgcctccctttttttggtaatggggtctggtatagccgccccggcacggggcaagcgggagagcgagcgtgaacgtccgcgtcggagaacagatcgtcgaggcagcgcccggccagtcggccggtgaggtcctttccaaggccctctcgggcaaggccttcaagaacaccgtggccgcccgcctgggcgaagcggtgatcgatctctccgccccgcttgccgccgacgtggccgagctggcccccgtggccgccgactcccccgaaggcgtggaggtcgtgcgccacagcgccgcccacatcatggccgaggccgtgaagaaactcttccccgccgcccaggtgaccatcggcccggccatcgagaacggcttctactacgatttcgccttcgagcgccccttcaccagcgaggacctggaagccatccaggccgagatggagaagatcgccgccgccaaccaccccttcgcctgccgcgtggtctccaagcccgaggccgaggcgctcttcaagggcatgggcgaaggctacaagctcgaagtgctggccgacatcccggccgagaccgtctcgctctacacgcagggggccttcaccgacctctgccgcggcccccacgtgccctccaccgggtttttgaaggccttcaagctcacccacgtggccggggcctactggcgcggcgacgagaagcgccccatgctctcgcgcatctacggcgcggccttcgcggaccccaaggagctcaaggcctacctccatcgcatcgaagaggccaagaagcgcgaccaccgccgcctgggcgcccagctcgacctcttcagcgtctccgaggaggccggggccgggatgatcatctggcatcccaagggcgcgctcgtgcgcaccatcctggaggatttcgagcgcaaggagcacctcaagcgcggctattccatcgtgcagggcccgcagcttctgaagcgcgatctctgggagcgctccgggcactacgacaactaccgcgagaacatgtatttcaccgagatcgacgagcaggcctacggcgtgaagcccatgaactgcctgtcgcacatgctcatctacaagtcgcgcctgcgctcctaccgcgacctgccccagcgctacttcgagctgggcgtggtgcaccgccacgagaagtccggcgtgctgcacggcctcttgcgcgtgcgccagttcacccaggacgacgcccacatcatctgccgccccgaccagctccaggaggagatcatcggggtgatcaacttcgtcaaggacgtggtggacctcttcggcttcgaattcgaggcccagctctccacgcgccccgagaagtccatcggctccgacgaggcctgggagctggccaccacgtcgctgcgccaggccatggagtccatcggcctgcccttcaccatcaacgagggcgacggcgctttctacggccccaagattgacatcaaactcaaggatgccttagaccgccgttggcagtgcgccaccatccagtgcgatttcaccctgcccgagcgcttcgagctctcctacacgggggccgacggcgaacgacacaggccggtgatgctgcacagggtggtgctgggcgcggtggagaggttcctgggcgtgctcatcgagcacacggccggggcctttccctgttggctttcgcccgtgcaggcccgcatcctcacggtcaccgacgcccacgacgcccacgcgggcgccgtgctcgcgcggctgcgcgatgcgggcatccgggccgaggccgacctgcgcaacgagaagctcggctacaaggtgcgcgaggcgcaactggagaagatcccctacatgctcgtcatcggggatcaggaactggccgagggcggcgtgaacgtgcgcctgcgctccggcgagaaccttggactcaagggggtcgacgcggtgatccaggccattctggaagactgcgaagccccattcaaacgaggaggtatgcgctataacttctgccagtgacaccgcccgctgcaatcaccagattcgcgtgcgcgaagtgcgtgtgatcgccgacgacggctcgcagttggggatcatccccaccagcgaagccctccgcttggcccaggaaaaaggcctggacctcgtggaggttgccgccgccgccgatccgccggtgtgccggatcatggactatggtaaattcaagtaccagcagcagaaaaaacagcaggaagcccggaagaagcagacggtcatccaggtcaaggaaatcaaggtccggcccaagaccgatgagcacgactaccagaccaagctcaggcacatccggaaattcctcgaggaaggcgaccgctgcaaggtcgcggtgttcttccgggggcgcgaggtggtccacaaggatcgcggcgccagaatcctggagcgcatcgttgtcgacctgggcgaactggtcaaagtggaacaggagccccgcttcgagggacgcatcatgaacatgatgctggctccttccgtgaagaagaaagtgtagcgctcgaacgtttcgcgcggggacggccctgcggacccgtcggggtaaagccccggcggccggtattttcccaggaggacaacatgcccaagatcaagaccaacaagagcgccgccaagcgcttcaccaccaccggcaccggcaagttccgccgccgccgccagaacaagcgccacatcctgaccaagaagagcgccaagcgcaaacgcgccctgtcgccttcggccatcgtggattcggccaacgaaggcgccgttcgccgcctgctgccttacgcctagggccggggcgccgtcccggtccggcggggggcttccccgccgcgcgcagggacgacaggatgtaatgcgtgtccccgtgaggggcatgggagccgcccggcggttcccatgcccctcacggggacgggccgcgagaatcggcccggaccaggaaaccatgcttcgacgagttgccgcaacagcccgtgaagctcattgaaagtttttgaaggagagctctagaggaaactttttcccaaaagtatcctctcgaatcctctccgcgcttcccacaggagggacaccatgcgcgttaaacgcggacaggccgcccacaagcggcacaagaagtatctgaagcttgccaagggattcgtcggcgcccgttcggtgctctacgagaccgcccgcgagaacgtcgaacgcgccatggcctacgcctaccgcgaccgcaaggtgaagaagcgcgagttccgcaagctgtggatcatgcgcatcaacgccgccgcccgcgagaacggcctgagctacggcaacttcatgcacggcctcaccctggccggcatcgaactggaccgcaaggtcctggccgacatggccgtgcgcgagaaggccggcttcgccgaactggccgccctggccaaaaccaaggtgaccgcgtgagccagggccaggccctgatcgaggaattgaccgccctggccggggaagccaaaaacaccctcggccaggcggcctcgttcgaggccctggaagacctgcgcgtggcctacctgggccgcaagggacgccttgcccaggtgatggccaagctccccgcgctcacgcccgaggagaagcgccaggccgggcaggcggcgaaccagctcaaagacgagctgaccgcctggcacacactgcgcctggaggccctcaagcgccaggaggaagaggccctgctggcctccttcgacccggctctgcccggacgcgccccatccctgggcgggacgcacccgctgaccatggtcagcgaggagatctgtcgcgccttcgcgggcatgggtttcgaggtggtcaccggccccgagatcgagacggacttctacaacttcgaggccctgaacttcccccccgagcaccccgcccgggacatgcaggacaccctctacatcggggacaacatcctcctgcgcacgcacacctcgcccctgcaggtgcgcacgctgctctcgcgcaagccccccgtggcggccatcgccccgggcaaggtctaccggcgcgactcagacatcacccactcccccatgttccaccagatcgagggcttcctcgtggacaagggcgtgaccatggcggacctgcgcggcaccctcaccttcttcgtgcaccgcatcttcggggccgagacgcgcgtgcgcttccggccgagcttcttccccttcaccgagcccagcgccgaggtggacatctcctgcgtgctctgcgaaggcacgggccgcgccggggacgacacctgccgcgtgtgcaagggcacgggctgggtggagatcctgggctgcggcatgatcgaccccaacgtgctcaaggccgtggacatcgaccccgaagtgcactccggcttcgccttcggcatgggcgtggaacgcgtgaccatgctcaagtacggcgttggcgacctgcgcctcttcttcgagaacgacgtgcgcttcctgggccagttcgcgtagaggcccgcgcggccatgcgcctgaccaccgaagaacgggaggccatcaaggccgccgtgcgcgcccaggaccccgaggcccaggtgtggctcttcggctcgcgcgcggac

SEQ ID NO: 4273 - DNA, 23237 bp, synthetic construct
  misc_feature 1..23237: note = Synthetic
  source 1..23237: mol_type = other DNA
acggtgcgcccctgaatcacgccagtaagcttatcggtgcgctcccactgggcacggatggactccaccgaggcgcgctcaaagtgatactccatcgcatattcaatggcttgccttggagagatagagcgcagtttaggcggctgaccttctctgcttcacggcgatcctgctctgagtaatcgctgttttcagagacacgcctaaatgcgcgtcagcccattttcatattgctattacgtaaaagttatatcttatcaagcgcaggcaaaatgtttcgccaatatcacgtagcctctgagctacgatgtcttgatctaccatcgaacccaaccccaaccccaaccccatattgtatgatcccctattccccaaaacacttgtggtcgaccttattggcgactctcacctactcactcgggagcgcgactcccgcatacgccgctgatccagctgatttcgttgtttataattacacccatggcaactcgtcatccccgagtctgtatggacgcctttttgtccccaacaactatgatccggctcaatcctatcccctagtcctgttttatcacggtttgggagaattcggcaccgacaacatgagccagatcaataacaatattaataacctgctcgctaacgccaagagtcgtgacttttttctgtatgcgcctcagcacccgaccaaggggtggacaagtgagggcatggatcgcacgctccggatgacggcgcatcttctcgatttatattcaatcgataaaagtcgcctttacattaccggcctttccaacggttcggattggtcgttgggggcgatgtcagattatgacggggtatttgccggtggcgtttcgattgcggagggcgctggtgtcggggatagtagcaatctcgtggatatgccgctctggttgtatatcgctgccaatgacggcccgcagaagatgcgtggccgggtgaatagcatccgcgccgcccttggcaaatctccggtgagctttcccctgaacaccaacccgtccaatccttactataacaatggtgagccctattactctaccaattcaggggacaccttctacagtgaggacgctcttcgttactccgagtatgcctcaggcgggcacaacatttgggggcgcgtttacaatgaaagttttatgtatgattggttgctctccaatgagaatgaacttttgacgattcagccgaatgagacgatccgatttgattttggccgcattcgaataacggatccggattcgaacgggttactctggaacagcacgaactactctttggagaaaacacttgatgcggccgtggttccattcgcgctgaccgacgccgggcgtcgcacacctgttcgactcgaagtcactaaagcattcggtaaccgcgacgaaagcggttctgttgggaccactctctatgacgatgaggtcgctctggatggctggcgaaccattaagaaggtaacttccggcgaccccagtgcttcttttgagatccgtggtcttgttccggatcaactttatcaaatcgaaattttcactaccaaggatgacaacgacggcagttatacccgcactacacgttatcagatcaatagcgaatacattgatttagacccttttatgaacgatgaccagctcccggttttcccagctgtatctgcggatgcttccggtgtgattgaagtcgtagtgcttcctacacccggatccggcgctcggtatggtcatataaacgccctttcgatcaccccgattatactccaagcaggtgaaattgaaatcgcttcaaatagtttcgaagacattggcacgagcgcaactggcgacgattggggctattccatctcaccgactgtggtcaatccagcagccggtgccgaaacgacactggacgcaactctcaggagctgggggccgacgacatcgataaatggcttaaccaccatctgggggcctcaagacggcagccgattctttggaggtagcgacgctgactacagccaggtttttaacggattcacacgaggatggaccattttcgacagtattgatctcactggctacactgatgtcactgtcagcttttactggtctgctcagggcaatctccaagaacttggttattatcttgctggaactacagatgggagcgttgcgaatttcacaccagtgacttcttcgagcatcaatgctgaccagagcacgtgtcacggcacaacccagttaatcgaaagcaccaacttgtcagttggaggcagctccggctacggacaagactggattaaggtttcaatcgatatcgacaatacaataacaagcctttcattcgccctctttggcaattcagacagcaattcacgcgtcttcggctgggataacgttgtcctaactggaaccccgtctccgtaacaatgagaacgtcagaaaagcgtagtatgctctggatcaatacactaccatcagtcaggccgaaacatggctataggttagtctgacccttgagcatccattggccgaagtgtcgccgacacttagggcaacagtcggcgatgcttggttgctctagttggcaaatatcgaacagatttaatggctcgccgattgttatataccctaatgctcaacctcgattggcattttcattctgaacgataatcaccgttatgctttttccaaatctcggctatatcggcactgaaatccaatcgtcttatagtcattcaataccctctgattaacgacaacgcgccatggcgtcagcgtgaagttggctggcatgcgcatcgaccttggccgctgtcacttctacggattccttttcgccgatgatcaaatcagccgcctttcgggcctgcgaagctgccgttatcacaaggcgagtgtgggactttaaggctttcatccagctgcgcaaataggccgcctgattgtcgatcacttcgttatctataccgcactgggcacagagaaaagcggaagtcatctccgcgattaattcctcttttcagtagttttcggagccaaagtcaccctgcatcttgcgatctaatcggtggcctgtggcgtggcccttatgccgatatcggcataaggggcattatgctgacttccaaattatgccgacatgagcttgagtaagtgcatagtaacagcattcgccgcctttgatatcggcataatcaaagcgcttcaaggaaggcaagaatttcatccggggggttgtatcggccttttggaacatcggtggccgttgtttttgctatggcattttctttgagttgcatatctgcatgcagatacatttgtgtggtctcgatagattcgtgccagagccaaagtgctattaccgttgtatcgacgccattctgcaataattgcatggcacaggtatgccgcagtgtatggggagtgatgtttttgtggcttagtgacgggcacttcagcgcagcttcgttaacgtgcctgtgaacaatccgctcaatggcatcaagactcagaggctgctggcgttggctgacgaagagagtatcaactatgggatcgttgcgttgccgaagccataatcgcagggcatgtacggtatccttacgcaagggggtagtgcgttctttacgcccttttcccaagcagtgcacagcgggcgacgggccaaattcaagatcattcaatgtgagattgatgagttcggaaactcgcaatcccgtttgaagtgtaagtagcaatattatccggtcgcggcaaccatgccaagtgttagtgtcaggtgcatcaaggagcgccaagatttctttggcatcgaggaagtctataactttttttacgtatcgttttggcggtaaatacagaatgcgctgacaatgatggagccattgtggttcattgaccgacacatatttgaagaaggaacggattgccgacaatcgggtattgcgagtgcgtgcgctttttcctctttcggcttcaaggtcagcgagaaacccaccgattaactcggcatccaggtcaccgatatctagcattgttggttcgcgatttagacgctcagacgcatagttaagtaaaagtcggaaagtgtcatggtaactggcgattgtgtgtgggcttgccctcaactgatttctaaggcgttcagcgaagaaacgctgaagacagacaggtaatgttgtttgtttcatctctgagcgcgttcgacagccaagcgcattagctctggaactgcttcgatataccagtaagtgcgggatggtttggtatgaccaagccatgcacttaattttgggatttctgtgtctatatttagaccggcgcgataccaacgaataagtgtactaatggcaaaggtatgtcgcaaatcatggatgcgtgggccaacaccatgtcgaaaataatcttggggttcacgcaatccaatgcgttgacagatttgggcaaatacgtaacgcacagaacagtccgtctacggacgcccagactcttgaataaaaaacgctagagcattcttaccgaggaagtattgacgttcagctcggtaagtagccaacactttcgccgtgcttgcactcagcgcaatgcagcggttttttccgcccttagcgtgctggatggtcagtatcttcgcttcagggtctacgtcgctatctcgcagatgaatcgcctcgctgacacgcataccgcttaccgcgagcagaccaaagaggatcgcatgtgtctgcaaaccataccacgaaggaatacgctttgcttctcgcagtatagaatggatctctgtttcagtgtagatatagggtctagggcgacggatcttagatggcaacaactcggcgggcggcacctccgttcgatcgtcaacactttgcatccagcgggcaaaatttcggaccatgcccagcctcattgaccatgtctgctcgttggccgagccaaactgctttttccaattcaaaaataactcaatggtcacataattgacgcccgaatcatcagcgtaggccgtgaagcgtcgaagtagacgttcttcggtttttagcgaatagccgaagcgacggcgaagttcagataacgctcaagctgtgcggtcagcgtcatcacattttggccactctggtgcaagttctcgcaaggcttccaggccgtatttggcgtaaagcgcagttgttgatcgcgaacgatgccgaagcgcatcgcgcacttcatccatcgaagcgcctcggcgcagcatttccgtcgctaaactatggcggagcacatgtgctccactgtaggtttgtggcggagcctggtcagtttggctgaaagcttcacgcaacaccgtgtttagaacttgggcatccttgaacggttgatacggtgcccccggtctccaacaaacagataacgcgaagaaccacgacgcaggctgcggatgtaagcgacgatggcttcaccgacgtctactggaagtggcattttgtctcgacgcttcccttttccgcgaacctctaatactccacctcgccagtttatatcttccaagcggattgcgatgacttcggttgagcgaaggcctagccgagccatcagcaatatcattgcatagttgcgaagcgccattttaccggtctcgtgaataaattccaagagtttcaaaaccgaatcggcatcgagatagcggaggctattgttgggatacccgtgttttattggcaaaatacactgggcaagatttcgcttcgtccgaccgctccaaaacagaaatatgaagaagctgcgcaaatgactaggagcacgcaggcgcttattggacccggacgttccgctgggcgcgtaagaaacgccacgatgtcattctcagttattgtatctaaatcgcctaattcaccattgccgaactggaaattcaagaaacgccgcacctcatcctgacatgtcgccaccgtagctgcactcagtccacgttgttccgctaagtaaactgtgagttgctcctctaattccttccgatccgatgattttgccgctggtgtaaccggcatatttaatcgtccggtttctctgatgaaaataacaaagcgactcaggctatactttctactttttcgagacgacgcactgtaacgttgcaaaaccgtttttactgcgcactcaatcaaagtttccgagattcgcccaccttcgcttgcaagtgtttcgcagaaatgtctagcagacgcctcgtaagagcgtcgagtggaacgcgcgtatccctgctgctccagttgcaacacaaaggcgtcaagggcattgtcgagcttggcatccataaagaacgatgctctatatcaaccccacactactattccagttgcagaaagtgttggattatgttcgcactgactggatttaattccatcagtgaactacaaaacacgcgaattcccgcagaaatgtgactgctgaaaataattaaatctcctgagctcttttgcgtattctgtagttctactattttaattagtttaaaatattagataacaatctaaaatggccataggattcggcaatagctctaggccttgcccatgggggagcgtctgcttcatcggattcgactcctgatgccaacaaataagctgcgacttcggcgtagccccatcggcaagcccatccgagcggtgttgcttgtaggacttcgtctcgtgcggttaatactgctcccttttcgatcaattgtttcagaaatcgaatacggatggattctgtaatatgccccgggcatcgtccaattacgtggtgagcgagagtcactcctcgctttcccatgacatttggagagattccattatcgaggtaaaagtcgaaaacttccaggaactcatcaactcgttcgactccccaataaagcccactcatagtctccgccaaaatattaaaccaatggttatcatcacccggccaatctaatttatcaaaacccatccgggtaatcgctagactgcctcggcctgccgcggcccatagcaagtcattgattttatctgggttgtcttctatccattgcggtgcgcgctcgacttcattatggtaacacagggtccagctcatgaatttagcaccgtgttttagtaggagtgctttcatcttttcatctttattctcataagcccgatccaaggcgacgccggacgcatagacattaccatcgggatttgcgcctgcatcgagaagaagttttgctgcggttaaatcactatttgcagctgccagccacagtggtctcccttcactccaaatttcatcttcgacgcctccgaggcgcgtgcgctcatctgggtctaacccaatctccagcaaccatgccagcaaatcaagttgcccaaaccttacggcctgactcatcaggccacccgtttgccaatcaatactctcttgaatccgatgaaacccatcagatgattgctcatgaactctttttaatttttcgatctctcctaaagcagccaaagatagcaagctaggctcaacgcctgccttctcaagacgtctagcaattgcaatacgctctggcgttccatgccgctcccatcttggacggtgtaaggcatattcaagggcgttcattccgctcaagtcttctttgaaaaccggagcgccttgtgcgatcatggcttctacgagtgataaacggctttgctcggcagcacggtgcaggggagtgcatccgtctcggtcgcagcttcggagtaaatcgtggttcaacttcatcagggcaaggacatcagcatcacttccctctttgatgagttgattgattttatcctgagctggcgataccgttacgtttgggcagcttgcattttcgcgtcgccgttgttcctcctcttcaattattttgttaatagcctcactgccagagcgtttggatagatccaatgcacttgatacatcgcgatagggatagatgcctttacgggcatctgatcctgcttgcatcaaccagcgcaccgcgtctgcttggttattcatgacagcaaaatgaagcgcaatgcgttcatcgtctggcgcaagttccatcttcactaactcgggccgttttttcgccattgatttaagggttccaacatcacctgctttggccgcgtcacagaaccgggcgactgttaccccgtcgacaaatgctttgagacgagaccaactggcatacccatgagaacgggcaatgatcagaatggcctgcgaatgctgcaatggttcttggagttttggaaaataaaactccacctcctgtcgtgttgcgctgtctccgttattgtagcgcgcaataagctccttagcctgccttttaatctgctgtaaatccggccgctcaggaagctggcggcggatcggatcgtgcctattttttgaagtattcatgattgctcaatcaaaataaggcccgagtccgcgtaacaagccagagtaaccatgaatgggttttgttatatcttaggtaatgcagctagacacagtctttctcgcggacacgatggccttctgtcaggcacagaattgaaagtaggccgataaaataattctacaagtgctaaaacgaaaaattcgcgtagggccaagcgcattactactcatgttatccgccatagcttcgccacccatttactggaaaacggaaccaacattgccgaagtccaatctttgcttggtcacaacaatatcaaaacgacgcaaatttacctgcatgtgcgaagccagtgatctcaggcgatgacaagtccgctggattttcattggtcaatatgttgataggcacggacccggagccccatgattatgccaacctctaaatgcgttaagccctgttattttgcatcgctccaagctcatatcggcataattcagaagtcagcataacgtcccatttcgtaaaagagctttgagtaatactcaggtgcagaggtaaaggactctcggttaggtagaccgatgacgtctagcagaggaaaataggtcgcatcccgcatgccgtgacggatctctggaccatcagtccattccgtcaccagtctctggccttcagctattggttcaacggtgttccctattggtttctctggtatcggctcccgagttcttccacgcgcgcacccgtatatggcgccagaagtggaatccagtagcaggcctctctaccgcccatgagtatcgcttgccttccagatatacacctgagcgttcaaaaatgcttcttagctcggcgctggtgaaaggtaggcgtttatcgatatccacttcgggcaaaggaggcttacaagcagctccgcgccactatctcaaacgggcggcagatgtatgtcttctccgccagtgataaacgcggtcaattgccagaggttcaggtgggacgccgtgcaatgatcatggtcgatggtgccaataaggaaaaaggaatcatgaccgtttacgtcgaattcagctatgaatgaggtcgccgtttcctttagcgatgcccattttcagattatcaatgcatgggtaaagcgttacagggttacacctgggcaattctgtcaggcctttgtcctgatggggtttgagggactcgatagccatatatcggacattggcgaaaccgtctatgatacgattgttttggatgtaatcgaaaaatacgtcgatgaatcaacaatccctgaatggcttgccgaaatggaatgacggccgatgctcgatggcgggagcggagacggcttcgccgtcctgccccgactcgggctcggccctttccttgttaaggatcagtataagtgacgcagactacagtatggaattttagaaaaaaaacacgaacctagtggctcgtgttttttagaaaacgctttcttgggctggcgtgatccgcagaacggacagctagacggtgaccgtggccatacgcccgcgttattgactttgtcttgaatccatttgcaataattacgaaatacggaattgaatcaagctaaaagattgctcaagctgaataaatggaaagccctatttcgttcagcttcgacattggtcacgccagcattggttgggcagcgattaaggaaatcgacgatgcgcccgatattatcggatgcggcgcggtgacttttaggcctgatgattgccagaaccacactcgggccgttttccggcgagggcggcggcatatcgccgcgacgcgaaaccgcatgaagcgcttggaaaagttgctgcttgatatcggtgcgttaagcgaggcggacatcgagcttgcacggagaaatccgcatccttggccgtggctgttggccgctaaggtattaatcggaaactatgatcagttgaattggctcgaactttgggcagtaatccgctggtacgcacacaatcgtggctacgatggcaatgtgttgtggtcgggttcacttcctgacgaagatgacaaggatgatacgcagaaggtcgaaaatgcgaaccgcctgatgcagcagtttgagacttcgactatggcggaaacggtgtgcgcattcctcggcgtagacctatccgataacaaagcacccgcgctgaaagcgtatttcaaaggccaggacgccgcctttccacgcgaagttgttcaaggggaagtgatacgtatccttgaagcgcatattggtaagcttccgcgttgtgacgctcaactaatagaatgtctatgtggtcaagggcgcgattcctggaaggcggtttcttgttgcggcattcgtttgcccaagcgctttcatggcggtttgctcttcgggcaaatggtgccacggtttcacaatcgcatcataccggagtgtcgaatcagtggtgaaaagacgcccgataagcattgcctagatttctaccggtatcgttggggtatgcttctgtgcaatctacgcgtctcggacgttttgaccgattcaaggaagctgtttgcccgtgagagacaggccgttcatgcgatcatggagaaggatggctacctgacgaaaaagacgctcaagaaagcgttggaggaggccacgagttcgacgcccgtcaatgtggaccagatgtttgtgacgccggaaatggagaaggctcttgtccttgatccggtgaagcgagaactatcatcgcaaaaactgagcggcatgtggtcaacaatccccgagcaatttcaaaaacgcttcgcgggccaacttttcaagcgcaaaccagccagtttaaaccgctggcgtgatgtgctgatcgccggaggcgaatccactgaggcatttgacgaagcagttcaagctacctatgatgcctacgtgaagcgcagccgtaaaaaggcgcgatctttatatcaatttaaagctgaccgaattagtatagactgcgctagtggtcgcgctccttattcgcgtaagcacatgcagcgggcatgggaggcggtctttgatgatcagcaacccgatcctaaagattctggtggttgcctggaagaaacggcggaaatcgtcggcaagcaaattcaacgctcagttgacgcacaaatcaacaatcacctagttcggcatcgtctgcttattttccgtcgcttgttgaaagacatggtgcggacttatgctgggggcaaagcagaacgagttggccaggtatccatcgaagtcattcgcgaccttcaggagttttcggcaaagaccgcgaaagaaaaagctcaactgatgggcttgaagttggcggatcatcgacgtgcagtaaaagagattgaacaagagctgcccaattacggaggcaaatataagatcagtgcgggactcattaaaaaggtgcggattgctcgagacatgaactggacatgtccattcaccggcaagcactattgctttgacgacgttgtgaatgggcaagttgacaaagagcacatcattcctcgttcgtggcgtcccagtgattctcttgactcacttgtcctgacatggcccgaagtcaaccgcatgaagggccagcgtacagcttgggaatttatggtcagcgacgagagcaagcaagttcccggaactaatttacaactgcaaacactggccaactacgagaaactcgtccagaaatcgctcaagcctgggagggacccgcgtggcaacgccgcgcaaaccttcatcgatgacgatttgcgccgttggcgacgcaagttgctgctgcaactgccagatttcgataagcggaagaagtccgatggtgacgctggtagtggtttcactggacgcgatctcacgcaaaccagccatctcaataaattagctgcgctgcaggcccgcgatgaactcaagcgggcacattccgccgatattttgagcctctctgggagcgtcactgccgccgtgcgcaaggcatggaaattggagggttgccttgtccaagcctgtccggaaaccgaaaacaaaaccaaaacggagattcgcgaaatcacccacctgcaccatgcattggatgccgtgaccatcgggctcgccgcctactatttcccaaaagatggaaagctctgggagttgatgagccgtcggcagatcagaagcgccgccgagcaacaggaatttcgacaacgcgccaagcaaagcgttagcttctccagtggcggttcatggggcattaaagatctgccccttaagctcaaacagcaagtcgcgaaccgccttgccgaacggcgcgttgtgcagcatcagcccaagaccatgcgtggcctgaaggtccagcaaaacacctggcgtgtattgggtcaggatgaaaaagattcacagaaaatggtcatcaccatagcctcacgggatgaaaacaaaaaacgtcaacgaagtactaaaaccgaaaagaaaagtaaactactcggtttagctcccaagaatggtgacggtaagttggcgaagctaaaaggtagtctgatcgtagaggagaactttggcgtaatattggatcctgagatgcgcgtactgcctcatctaaatgttcactacgagttggagcgggctaaagccgcaaacaatggagtgcagcctcgtattattcgaggaggaagcctgatccgaatagaggagggccgctacaaaggaacttggaaagtattttcaatcaaagacgcgaagtctggattcctcatcgacatggcctcaccagaaattgtgaaacttgccaataagaagcgagactgtgtcatcaacgcgcttttgaaaacgcttctagcaaataagctcaccatactctcgcctgactatactgggacgctatgacgccatgtcctaccacatcgtcaacatcgattccccgaattgcagcatcaattgcaagcacggacagttaacgtgcttgggtgagaatgggcgaagacagcaagtgcctttggaggatgttgccgctatcgtcattaccagtttctcggcgcagttgaatagccatctgctgttggaagccgctaagtatggcgttgcgctcgtgatctgtgaatattttcagccgatcagtctgctattgccggcgaatcgctcgaccgacaccttgctcactaaagcggcgctcacaatggataagaagaaagtggcgacactctggcagaaaaccattgatgctaaatgcgtgaaccaagcgtctctggccgagcacctgaatcccgagcaccccaagcgtgaaatattgcaaaagcgggccaacagtaaagctccgggtaaggaaagcgtttgcgcgcgctattattggggaatctatgctgatgctctggcgatcattggcttcaagcggggccgtcaagagggtggggtcaacgatttactcaacttcggttacgcgattcttttatcacttattcttcaaaagctttttgcctgtggactcgatccaacggttggtatttcccatgaagtgcgtgaacgatctactccgcttgcatatgacctcatggaaccgtttcgcccttgtgtggactggcgcgtggcacgatggatgatggaagaagccgcaccggatgattatcaagtcaatggccgtttccgccgctacattaccaacttcacactggagcgcgttggttacctaggtattgaaatggattttcgcaattgcctggaatcagttgtgcgcagttttcgccaagctgtgctcagtgggcaaactcgccaatacaaaccgtggattccctcaaattcaaaatgggctggctagttgtcgccttcgaccttccggtcacagaaaaagaagcccgtaaagcctataccgacttccgcaaattcctgttgaaagacgggtttcagatgatacagttttcggtgtatgcacgccccatggtcacacactcacggatgcaaacccacttgcgccgcgttgagaaagaaatcccacccaatgggagcgttcgtgcttggtatgtcacccaagcgcaatggcagcgaagcctcgtcatctacggtaaacccgcaaaaaagcaggctccggaagatcttccagaacaaactcttttctggtaaactcttcttaatcagcagactggaaaattccagtctgcccgattaagatttggattcaaggcaaagcccgcgcggagttgcggggtcataatggccaagtctgcccgattaagatttggattcaaggcaaagcccagggacgagcatctagccactgatcaagagtctgcccgattaagatttggattcaaggcaaagcctgaatagatggctaacgaaaaagaccaccagtctgcccgattaagatttggattcaaggcaaagcgcagttatttacccgtccgcgttcatcgttagtctgcccgattaagatttggattcaaggcaaagcaatcagcaataccgaacccaccgttttaaagtctgcccgattaagatttggattcaaggcaaagtggtgcttctggtggggtaatgtttacagggattctcttcgcgcaagtagcctgtaaaatcattccgtaaatacatattgattttattgtgtaaatttgaattgcaaaaaccatgagtaacgaaaaacaactgcctgatcccgatcaattattcagcgaagcagcatgtgatgccgaaagctccatgcttttcccatataggaagactattgctgtcttgcgcatgaaggacattagttggcgaggtgtgtccaagtggccgtctgagcgtggtgtaaaaacaagccacacatccgtaaggaatttttgggaggtatattctagggacgaaacccttaaagacgacttcatcgacacaaataatgaggcgcgtgattcgctttttgagcatggcagcaaagttgttggggtgaatttggctgagaactacaacgagcttattgatgagcgggaggaagattaatggatttccatgggtgagtaagcaatgagcctagtcatcttcgtgacatcgacgctgcgggcattcctcgcaaggacgcgagcggtcgcaaggttgattttcattcgctccggtattccttcgcgacattcctagtcagcaacaatatttctcgctcctacgcgcaaaatttaatgcgccacagcgattctcggttgttggaagaagtttatacggatcgcgagctattgcacgattcgaccgcccttgaccagttgccgaggctaaagccggatgaaaaactgatacgtatagtgctacagaaatcagtcgcagagggtccttcgcagtcacaacctgtcacaatcagggacgcaagggaagccgtgcaagccgctatggatcagggtcttagtcgcattctggcacaacttggcgcacgtagtcaccttgccaaaatggtagacggtgcaggactcgaacctgcgacatcctcggtgtaagcgaggcgctctaaccaactgagctaaccgtccgttagtgggaaacgcatgaaaatgagcgatttgcggcgtcgatcaagtaaaaagaagcgggaattgaccgaaagatacaattttatgcttccgtaagggcgggtcatgcgtcatttttccgagcttttccctcatgcgtcatacgatctcagctttagttgaaaacaaatttggtgtcctcgcgcgagttgctggcatgttcagcggtcgcggttttaacatcgacaccctcaacgtgggcccgactcatgatcccaagtattcgcggatcacgatcaccctgcgcgctcaagaacatgcgctggacatggcgatcaagcagctcgatcgtttgatcaatgtcatcgacatcacgcattttggtcagcgcaatgcgtttgtggctcgcgagctggttatgctcaaggtcagcgctagcggtgatacacgctcaaaggtcattgaagtctgcgacatcttccgcgccaaggtgatcgacgtcactccagtggcgattattatagagtgcacgggcaacgagaataagatccgcgcttttctggaactcattacacccttcggcattctggagctggctcgcacgggcaatgttgccttgttacgcggtgcaccagccgagacagaggaagactaagaatttaccgataatcttttaccaattgtcagttgtcagtgaatgcatctggcggctgaaaacgaaaacaacgaaaaacccgaacacatgcccgcaaaagtatacacggaagcggacgccgatttgagcgtcctccaaggcaagaccctcgccgtcatcggctacggctcgcagggccatgcccacgcgcttaacctgaaggacagcggctgtaaggtcatcatcggcctctatgaaggcagcaagtcgaagcccgtcgctgaaaagcaaggcttcgaggtctacacgacggccgaagctgtcaagaaggcagatgtcatcatgatcgcattgccggacatgaagcaagccgaggtctacaaggaagacatcgagccgaatctgactcctggcaaaacccttcttttcacgcacggcctagcgattcactatggcctcatcacaccgccagaaggcgttgacgtcatcatggtggcaccaaagggcccgggccacgttgtccgcactcagtttaatgagggcaagggcgttcctgcgttgatcgctgtcgctgaaggttcttctgaatccgctaagccaatcgctttggcttgggccaagggcgttggcggcacccgcgccggtgttattcagacatctttcaaggaagaagtagaaaccgatctcttcggcgagcaagccgttctttgcggtggcgcgagcgccctcgtcatggctggtttcgaaaccctgaccgaagccggttactctccggaaatggcgtatttcgagtgcttgcacgagctgaagctgatcgttgacctcatggttgagtccggcatcagcggcatgcgcttctcgatctccgagactgcggaatacggcgactacgtttccggcccgcgcgtgatcaacgacgagtcgaagaaggcgatgcgccaggtcctcaaggaaattcaagacggcacattcaccaagaactgggtcaaggaatacaaagagggctgcccgaactacaagcgcatggcgcaggaaggtaaggatcacccagtcgagaaggtcggcaaggaactccgcgctctcatgccttgggtccccaagaaggaaatcggcggcactcaagccgaatataccagcaagtaattgccggttcagtatgaactttaatcagcgggagagtgcgaaatgcgctctcccgttttgtcgtacaggcgtctagaaggtggcgctctcgggggatttaccctcccgaatcggaaattgactgtgtggcctgaaaccttttgattgctcgctattttttcctatgtcgaaccaaccaatcatactcgcgacgcggcgtagcccgctggcgctttgtcaggcgaaactggccaaggcgcacgtggaaacgattttcgacggcgcgacggcggagctgaaggaatttgtcaccactggcgacaagaagaccagctggtcgctcgagaaagagggcggcaaaggacttttcaccaaggagctagaagatgccctgcttgccggagaggctgatctggccgtgcattcggccaaggacttgccgacggaaaacccgcccggcttggccattgccgcctttttgcctcgtgaggcagttaatgatgtgctcgtggtccgcgacggcgttgcgaagccatgctttatcgcgacgagcagcccgcgccgccgcttgcagctcaagacgtattttccgtgtgcagtgtggagcgaaatccgtgggaatgtggacactcgtctacgcaagattgctaacggtcaggcggatgcaaccatcctcgcggcggcgggcctacgtcgcctaggtatcctgcaaagcgaaggcgtggtcttcaagccgttgacgatccatcagatggtgccagcggtggggcagggggccattgcgcttcaatgccgcactgaggatgttgagagatttgccacattagcctgcccagcgacgcagtttgcggtcgagctagagcgtaagttcctggcggcgatgggtggtggttgccacacggcgaccgcaggccatttctgccacggtagcctgcacgttttccacgaagacacgggccgtcaggagttccctttgcccaaggacaatggcgacatggacaactggctcaaggatgtcgtggagcaagtgctcagcgcgtagctggcttgactaggaggcgttacaccgtttaattgttaaatagaatgactgttggaacatacatcgaatctcgcgatcccagagttattgacagggaaatcgagcttattaaagaagctgcgaaggaactgatggaggaccgagagaaattccttcgtttggcgcaggcgacgggtatgtacaagaaggatggcagcctgaaaaagcagtttcgttaatgcccgcatattctattgcattgggctatcatggctgcgattcgtcggtcgcgaaagcgataatcgaaggagaagatatgcgtcccagcgccaagccatacgattggcttgggcatggtctttatttttgggaagacagtcccttgcgtgcaatggcttgggcaaaaaaaagatgcagtcaaaaaggtagtaaaattaagaaacccgctgttctgggcgctgtcatcgatttagggaactgcctgaatttaatcgatgctgaatgcttaattgaagttcaagctaccttttcagcgcttcagtcaatggaggagttcgggctatctttgccagaaaataaagggcttcaattggagaagagatacagggattgtgcggtcttcgagtggctacatcaattgcgcgaagagaaagatctggcaccttacagtagtgtccgcggttttttctctgaaggtgagccactttatccaggggcgggcctacacaagcaggatcatatccagatatgtgtccgcagtgccgtaagcattattgggttctttcgacctcgactgaaattttagttatgccaatgccaggaaaagtctatctcgtgggagcggggccgggggatcccgggctcgttactttgcgtgccaaggagctcatcgagcgctgtgatgcgctggtgtatgattatctcgccaatccggacttgctccagtggaccaaggtcgggtgtgagaaaatcttcgtgggcaaacagccaaatctacatgcgatttcgcaggaggagatcgagaagatcctcgttaagcgtgctaaggcgggggagagcgttgtgcggctcaagggcggcgatccgtttgttttcggacgcggcggcgaagaggctgaaacacttcagaaagacggtgtgccctacgaaatcgtgcctggggtgacggcggcgttggcctcagcggcctatgcaggtatcccgttgacgcatcgcaatttcagctcctcggtgagctttttaacgggccacgaagacccggaaaagcacgagatgcacgttgattttgagcaattcgccacggttggcggcacgctgtgtatttacatgggcatggggcacttggccgaaattacggcgcggctgctcaaggccggactgtccggcgaaactccagttgcgatcgtgcaatgggcgacgactccacggcaacgcagtttgctgtccacgctggccaaagttgcgacggcgaaggaggaggcagggttgtcgtccccggcagtggttattattggcgaggtggcgaagctgagcacgaagattggctggtttgagcagcgtccgctgtttggccgccgagtggtggtcacccgtagtcgtgagcaggcaagcgagctctctgctgcgctcacaatgttgggggccgaagtgcttgaactacctttgattgaggtggccgaggacgcggagtcgaccggagaagacatctggccgtcattgggcgcttaccgctggttggtattcaccagcccgaacggcgtgaagtatttctttgaaaaatttcaccggaagttcgacgacttacgttgcatcggtggagtgcgtattgcatgcgtgggcgagacgacagcgcaggccgtccgtgagcaacgtttggtcgtggacctagtccctgatgaggctgtgagtgaatcccttgctgaggcacttctgcgcgaggaaactttggaaaatgaaactgtgctggtggttacgggcaatcgcaaccgcgatgtgctgatcgggaagcttgaggagggccgtgcgatcgtcgatgccttcccggtttaccggacggaactaacggatctgtctggccacccggcagcaacgcgattccgcgattccggcgctgatgcgattacctttgccagctccagtgcagtggacggtttcgtgcagcaggcgaaaaatttattgcccggacctggtgcgcgacggcccaagggcgtggcaattggcccgaaaaccgcggcgcggatgcgcgagattggcttgccagtggaccgtttggccaagcagtcatcgatcgaaggcttggtcaaggccgtgcaatcgctttgggattaaccttgacggagcctcccctctgagaggactgtggcgtgtgcttatcgacacatccaaacaagctttttccggattccgttccgttggttttcttgcgcacgcatttgttttgctgtccctaatgttggctagctttggcttgtcgggctgcgccaatagcggggcaaagggcagctccaattccgcagacgaaatggccgcttcggccaatgtgctgcgggtgggcacttcagctaatatgccaccatttgtttttaagcagggtggcgagcttgtcggtttggaaattgatctggcgaagcagttggccaaggggatgaaccgcgagctgcgtatcgtggagatggattttgaagacctgatccctgcacttcaaaacaatcgcgtggacatcattatggctggcatgaattacacgcaggagcgtgcggcgatcattgcgatgaccacgccctacatgcaaagtggccagatggcgctggttttgcgcaaaaatgcctcgaaatacggcttgcctggcttgattggcaacacacgcgtgaaggtgggtgctgaggccggtacgaccggtgaatatctcgttcagtctagttttcctaatgccaaactggtgacttattcctcggctgaagctggtgcgcaagcggtggccgatggcgacgtggaattactcatccatgacgcaccgactatttattggttggctggaacttaccagaatcgcggggtgacgccggctcgaccggtgttaacgctcgaccaaatggtctggggcgtgaaccgggacaatcaaatgtttgtcaaccagatcaatgctctggtgacgacttgggcttccaatggcgaacttaaccgcattgtgcggcgctggatcagcctttaatctaggcggagcgttagctcccttctgttaaaaacagaaaaagattaaaaataaagataaagagcccgatcgctaaggcgatataaagcatgggccacggcttccgcgtaggtgtggaagttctgttttcggacgactttggtagttcgggcacggtttgtggtgttaatcgatgatgatgtagagcgctttgtgaaatgtatttgtcatttgtgataatttagctaagtaatttcatctcccgataatgagtagtataaccccgtcaatgactgaaaacctagccaaggtaatgccttggccatatgctctgtgcgatcgcaagggcatggtagttcattgtaacgatgtgtttacacgattggtgggagtggagaatagcttggaaagcgggcttaatataggtgagttcatgagcacccttcaggcgggtcttcaattgaattccctcttggccaaaacggagaaacaagcttggcacggcaagttgaaaatcgtgggacggcagaatcttgccgtcgaagtgctcttacaggcggacatggatacgccgaaccatgtctggctcatcgtcatggaaaatccggtcgtcaatggccagatgatcctgaatccgcgtagtgagctccgtctgcttcagatcctgatggatcacactctcgactacgtttacttcaccgatattcacggccgtttcgtcattaccaaccgcgcctttcaacgggcattggagacgcaatacccgggccaggaagtgggtaagtcgatcatggatttcgtcaccaaggagacgtcgcgctgggtcagtgagaccgaccaggaggtgctgacctcgctcaagccaatcgttaatcacgtaggcctgttccagattcgtaatggcggtgcccattggttgcagactacgaaaatgccagtgtttgaccacaaccgcctgtgcattggcttggtctctgtaagtcgagatatttccgaggcgcggcagactgagaaccgcttacgccaggcgattcaacgtgctgagcaggccaatcaggccaaaagcgatttcctggcgaacatgagccacgaaatccgtacgcccatcaacggaatcatcgggatgagcgaactgtgcctggagagcgatgtgacgcctgatcaggatcgctatttgcaaacggtgctcaattgtagcaataccctgttggctctggtgaatgatgtgctcgatttttccaagatcgaagccgggcagcttgagcttgaaaatattgattttgacctgcgcgaaagcatcgaagacacgatggaccagtttgtcactctggcgcgtgaccgtgggctcgagttggcgcttaagattgacccggcattgccatcggtggtttcgggcgacccaattcgcttccgccaggtgctgaacaacttactgagcaacgccgtgaagttca

SEQ ID NO: 4274 - DNA, 23228 bp, synthetic construct
  source 1..23228: mol_type = other DNA
  misc_feature 1..23228: note = Synthetic
cgactggagccacttttcgcactcctcaatgctcataccctttcgtgaagcatagtcctcgatctgatctcgagcgattcgaccaaccccgaaatatcgggcctccgggtgggcaaaatagaggccggagaccgaactggggggattcatagcgtagctggtcgtcagcgaaactccgatcttcttttccacttcgagcagatcccaaatcccctgcttctccgtgtggtcgggagcggaaggatacccggcagcaggacggatgctgcggtagcgttccttaatcatccaatcgacatgaggattcaccgcaccgcgatccgccgacaaccgttccccgaagcgaaagccttcctcgcgcccaaatccccaattatcccgcacctttttatggcagaactccgaaagaccttcggcaaaacgatcagccagcgcttgaatcaagatcgccgtgtagtcgtctccactctgtttgaacgaagcggcgtaatcctcgatctcctggcccgccgtgcaggcaaatgccccgacgtagtcgatcttgcccgaagtcttcggggcaacgaaatcggccagcgagagatacggctcatcggccgagcttttttccttctgctgacgcaggaaacgaaaggtatccagaaccgtcttccgcgaagcgtcgccatagatctccacatcgtctccaatcgaattcgccggccacaatccgaggattccccggagatggacccgctttccgcttaccagatcatcgaggatccggcgggcatcgtcatagagcttcgtggcttcctcgccacgctgatggtgagtcaagatcttgggaaaactcccgcgcatctgccaggcatggaaaaagggagaccagtcaaaatattcaatcacctcttccggcgaaatcgactcgagcaactccgtccccaccgtttcggggaccagcggttcatacgaatcccaatcaggcgagaacgcccgctcccgcgcttccaccagaggcacatattttgccgaagtcgccgccccggccgcatgacgctcgcgcgccttttggtgggagtcttccagatcgatcaggtactgctccctcgtcttctcgttggtcaaatgattgcagacctcggtgacgagcgaggcatcgctcacatgaatcacaggcccgctgtagtgcggtgcgatcttaatggcggtatgggctttcgaggtcgtcgcacccccgaccaaaatcggcacgttcattccccgtttctccatctccttcgcgttggtgatcatctcatcgagcgagggcgtgatcagaccggacatcccgatgaagtccgcgttgtgctctctcgccgcatcgagaattttgtcgagctcacacatcactccaaggtcgaccaccttgtagccgttgcacccgaggaccactccgacgatgtttttcccgatgtcgtgcacatcgccccgaacggtcgcgatgacaaaggttcccgccgagctggaatcctttttctcctcctccatgtaagggagaagataggccacggcctttttcatgacccgcgcactcttgaccacttgagggagaaacatcttcccctcgccgaagagcttcccaacgaccttcatgccgtccatgagcgggccctcgatcacgtcgagcggacggtccagcttctgccgagcctcctcggtatcctcctcaatatggctcgcgattccgcgaaccaaggcgtgctcgatgcgtttgcccaagtcttgggaacgccaatcgcctaccccttcagcttttttttttaccgaatctccggcaggcacggctccttcgccccctaggaggaatttctcgagaatctccgggttcttttcacgggaagctcgttcgaagagctcttgcaacaccttcatcccgcgaaccatggccgcactcacccgctcttcgggactcccgccagcgcggccttccttgatcgcctccgcatgctcgatgagccgctcggtcgattcaggattgcggttgaggatgacatcgtcgaccaaggtcttcagcggctcctcgatcttgtcgtaatccatcaagagaccgggattcacgatcgccatgtcgaggccagccttttgcgcgtgatggaggaatgatgcgtgcatcgcctcccgcacaggattgttgccacggaaggagaacgaaacgttcgagagacctccactggtcaagcaacccgggcagcgcttcttcacttcacggacggcctcgatgaagttcacggcatacgggttatgctcctccatcccggtcgcgaccgtgaggatattgaggtcaaaaatgacgtcctgaggctcgaatccaacttcctctgtgaggatccggaatgagcgctcggcgatttccactttgccctccaccgagacggcctgaccgttctcatcgaaagccatcaccactgcggccgcaccgtagcgaaggatcttctgggcctgtttgcggaaagcgtcttcgccctctttcaggctaatcgagttcacgattggcttgccctgcacacactgcagccccgcctcgatcaccgaccacttggaactgtcgatcatgaacggcacccgggagatatccggctcggaacccagcaggttgaggaacttgcgcatgcactcctccccttcgagcatgccctcgtcaaagttcacgtccaatacgtgagcgcccttctcaatctgagaactggcaaccgtcagcgcgccctcaaaatctccggctttgatcaacttcttgaagcgcggagaaccggtcacatttgcccgttcccccaccatcaggaatccttcaccggacccgtcaaaattcatcggctccaatccgctcaatcgcagacaacgcgtaatctctggaaccacccgtggcggaaactcggaaacttcttccaccaccgcagcgatgtgatccggagtcgttccgcagcatcccccgacgagattgaccagcccctcggtggcaaagcccgccagcgcacttcccgtatgctccggcgtttcgtcatatccggtatcactcagaggattcggcaagcccgcattaggataaacgtgaacataggtatccgcgacccgcgaaagttcctgcagaaatggcttcatcaaatccgcgccgagagcacagttgagacccacgcagaatggctttgcatgccgaaccgaattccagaacgcctccaccgtctggccggacaaggtccgcccggactggtccgtaatcgtcaccgacaggatcacggggatccgctcgtttcgctcctcgaagagatcttcaatcgcgtggatcgaagctttgagattcagagtatcgaaagtcgtctccggcaggagtagatccgcccccgcctcgacgaggctctttgcctgctcatagtaagccgtccgcagttgctcgtaggtgacggcccggtattccggacggttcacatctggagagagcgaggccgtccggttcgtcggccccatcgctcccgcaacgaaaagctgacgcccctcgcgagccgaaatctcatcagccaccttgcgggccaaccgcaccgagtcccggttgatccgatccacccaactctcgagaccgtaatccgcctgggcgatagtcgttccactgaaagtgttcgtctcgacgatgtccgaacccgcttcaaaaaatttccggtggatgtcttcgatgatctccggacgcgtaatgctgagcagatcgttgttccccttcaaatctcccgggacatccttcagatcctcattgcgaaagtcttcctccgtcagattgtgacgctgaatcatggtgcccatcgctccgtccaaaaaggcgatgcgcttctgaaaaatttcccgcaactgcccaaaggacgcggattcgggaatctgtttctgcttcgacatgagacaaaaagtaggcatttcccaagagggatcaactattaatccatcaacgaatcaggatttattgatatgttgcatgacgccctctttcggaaaagatgccatgcaaccacaggtacggtgaatattctcatgagtcttgcggattctctcactgaaacctccttcacggctaacctccccaaacgcctcccccggaccgcggaattcattccgccccgcatgcctcacggctcccctcccttctccttctcgttgccttcacgcaaaaatcgattaccattttgaatcgtgatcacgaaacgactcgtcttcctcaccctaatcctcgggatcagcgggctgaccgcagcgccgcgtaaggtcgtttccatcaccaacaccgaaggagttacgattgaggccgaaatcatttcggttgtccgatcgaagaatgacgtctcctggctctgctttcgaaaacctaaaggcaaagacttctacctctatccctttgcctccctgacccgttcctccctcgacctcctctccacgacctttcagggaaatgaactcgtcgtcgttgacggattgacggggccccagctcgacatgctcgacgaatatctcgcagcgagcccccgggaacgactcgtcctcgaagtgcaggatgcccgaaagcgggaacgcctcctctctcgagagtggaaaagactgcaaaaccaaacttggcaaatccaacaacagctcgcaggaattcaagatccccagcatagagtgcgcgtcgccgctctcttccagcaatccctgcgcgcccgcgaccgcaccggcaaacgcctcgtcctcctccaagccgaaatccgccgcatggaagaacgcatcgatctgctcaagagcatgggagtccccatcgaagacgacccattcgcggattcaaactgagcagcccccccttccaaccaactcgtttcagctgaagtcaatttaaattaacctggttaattaattgacacgaatattctcctcaagagtttggtttgccttgccacctggactccccttttgctttggctgtctcaccacattccggctcacggaattttctcttcatgaaagttacagtattctccaccaagcgctacgaccgtcgctcgctcaccgaggccaaccacgacaaacacgagttcacttttattcaggatcggcttcgccccgaaacggttgcactggcgaccgaggcggatgcggtttgccctttcgtccatgacatcgttgatgaggaagtcatccgaactctcgccgagaacgactgccgattgatcgcgctccgctgcgccggcttcaacaacgtcgacttggaggctgcccgcaaatacggggtgacggtgacccgcgttccggcctattccccctacgcggtcgccgaatttgccgtcgggttgatcctcagcctcaaccgcaagattcaccgagcctactcccgggtgcgggaatacgacttctccatcgacggcctcgaaggcttcgaccttcacgggaagaccgtcggaatcattggcactggcaagattggcgtagttttcgcaggaatcatgaagggctttggctgcaagcttctggcctacgacccctaccccaacgaggaaatgaaagctcttggggccgagtatgtttctttggacgatctcttcgcccagtcagacatcatcagcctgcactgcccgctgatgaaacagacccaccacatcattggagccgaagctctcccgaagctcaagaagggtgtgatgatcatcaacaccagtcgtggtggtctcatcgatgccgatgccgccatcgaaggcgtcaaagagcgcatcatcggcgccttgggcctcgatgtctatgaagaggaggaaggcatatttttcgaggaccactccgagggaatcatggacgatgaccgactgctgcgactcacctcctttcccaatgtcttgatcacgagccaccaggcctttttcacccgggatgccttggccaacatcgcggatgtgaccatccgcaacctcgaccagtttgaggaagacgggaagtgcgaatttagcctctgaggagtgcaaacttcagttggatatcgctgatttttagcggcttgcgaggatttccgtagagaataagaccaagccgcccccctccagccccgacaccgtcggggcccctacagccctccatgccattcggcaaactcgaggttgctgacaagcaaagaaggagtctgaaatgggaccatagccaaagtccccagaaccagaactcccctcatacttgtaggagggggggaccggcgtcagccggtggggaggttccccgcgttcgaaaatcctgggcggcctggattcaaactgaatagcccgtgcaaacagccccctgctcccgatgaaagcattcaaccttcgtaccgcaaccgctcgaaaaatcccgcctctccgcccgagccttcgtaaagaggccgtttgaggcaatcgatcggacgattcaaaatcttttccgttgccctgcccgaatgtccttttcagtttgagattgtggaaggtggataccaagtcattgcccgtcgctggaggccgaagcgcttcgaggatctcgttgggcaggaacatatcgtccgcacgctctcgaatgcgattgagcgggagcggctggcgcacgcctacctatttatcggcccccgtggcaccgggaaaacgagtaccgcccgccttctcgcctgcgccctgaacggttcggagaaacctacggtcaacttcgatgccgattccgacttggttcaggcaataatggggggcagttgcatggatgtcatcgagatcgatggtgcctccaacaactccgtcgagcaggttcgcgacctccgcgaggattgccaataccgcccatcccagtgccccttcaagatctacatcatcgacgaggtgcacatgctctcgcaggcggctttcaacgctctcctcaagactctcgaagaacctccccctcacgttaaattcatttttgcgacgactgagagcaataaagtgctcccgaccatcgtctcccgctgccaacgcctcgaatttcgcccgatcgacgatgcagaaatcgtccgtcgcctcggggagatctccaaagctgaggaaattaaggtcgaggactccgccctgcgggccatcgccaagctggccaacggtggaatgcgcgatgcacagtccattctcgatcaattgatttccttctgcggcaccgaaatcagcgaaggggatgtcctctccgtcttcgggatggccggcgaagcggacttggccaaactcggacgctccctcgccgagagcgactacgaaggcctggtttcctgtgccgaccgcttcagccgcgaagggaaggacctttcccggatccttaccgatctttccggactcatccgggaagccctgctggaagccattcgttcggggggatcgagcaacaagctgggcccggttctcgagatcgaacctcttctgcgcatcctcgacgccctcaaggcgggggaacgggccgtgcaaaagggcctctctgaacgcgtcaattttgaggttacgctccttcgcgccgtcgaccacgcccgcactcgacccatcgatactgtgattcgccaaatcagcgacctcgttggaactgaacctgcgggtcaaaaaaaaaattgagcgagtccccccgggccgtgaacccgtaaaagaggccgcaacggcctctcctcccccctcagagaaacctccagagcccgaaaaatcggacgacgaggaggtagattccggaaatctcgaggataccacggactactctccccacgccatctatggttcggatgaagaggattccaacgaacctccccccgactacgaacctcccaagcccaagaaggctcggaagcccaagcaatgggaagatggggaacacatcgacctcgaagcggccgtggcagaggcctccgacctcccggtctccgtcaacgaattggaggctctcatcgccaaaactccgcccgaactccgcaaattcctcgaagatgagttcagtgccgaatttcttggacccattgtcgtcgatccgaaaaaattagactaaccattcatccagccatgaccgatccatcctccacttcttcgccattccccccgaagctcgccccgtcgatgctcgcggggaatcacgccaatcttcgtgacggcttggagaagatcttaaagctaccaatcgaatggctgcacctggacatcatggatggccacttcgttcccaacctgagtttcggccccaaaaccatcgacgacctgcgacccattgcgccggaccttttcttcgacacccacctgatgctggcccgccccgatctcatgatcgatgcctttgccaagtcctctgaccaaattacgatccacgtcgaacccttctaccccattcgcgagaccctacacgccattcgcgacaaaggcctcaaagccgggctcgccctcaacccgggcactcctctcgaacgagctctcccttttctcgaggaaatcgatctcctcctcctcatgaccgtccaaccgggattcggaggacagtctttccgcaccgaggtcttggagaaaatccaagccgccgaccagattcgccgggagaaagatctccccttccgcatcgaagtcgatggaggcgtcgacgccgaaaccggcccccaatgccgtcaagccggggccgatacctttgtctgcggaaccgccttcttcaaagcggacaatctcgagaaattccgccagggaatcgaagagtaacatcgaggcccccaaaaagccgcccttagaatcagttactcgattcgctaggatcaccaggaatgatcgagccggtagccgtgaaggccatgaacaagacgtggcccgccagccgcctaggtgggcgctaaagcaacccacccacagtgaagggatcaaaacctccgaaccctcgctcaaattttctcagaaatgtgctgaacccacatttccataagccatgcggttggagaggccagagaggaggctgttccgggcccgtgccggcaacgacagtgtccttctctactgggagatggaaaccaccaacgaccgccgatgtgggcggtcacggtgttcccagaggaagattccctgccaggttccgagagcgagccgaccattgatcaccggaatggattccgaggaacgggtcaggaccattttaatgtggctcggcatatcatccggcccctcgagagtatgctcgtagcccgtgccatcggggaccatctcatccatataccgctccaaatccgcctgcgcagtcggatccgcattctccatcaagaccaagctgcagctggtatgacggcaaaaaacaagcgccagcgcctctgaggcacccgcgcttgagaccgctgattgaacgcggtcggtgatttcatacaatcctctcccccctgtttcgaccgagaacgtgttgttcgtgaccgacaccgggaactagggaaaggaaaaccgttcgaggtcttaggccttaacgaccttgcccgctttcagggctttagccgacacccaaatccgcttcacttgcccgttgggcatgcgaacgcgaacccgttgcaggttgggtcggaaggtgcgtttggaattcttcacgacgtgcgtgccgatccctccgctcttcttggattgacccttgcgagtgattttacctccccgaatgggacgacgacctgtgattgcgcaaattctagacatgatgaatcttgggaaaacggagaagaaaaacgggttgatccctatcgggcaaccctaaagcgataaaaaaaacacgcgcctcaaaggcgcgtgtttaaaaaacgctttcttgggctggcgtgatacgcattacgcacaggaagccatacgcccgcgttattaactttgtcttgaatcctgaaaaaactaaaaggccagcatctcaatgtgtcaacgcttctgaaggttcaaacaagacacaaccgggcactttccgataaaggttctcaaaaattacaacgcgaccggaaagctcttttctttttggttttccacagcgtcaaaaatgcgctaatatccgagccatgccaaagcaagtttcattcgcattcgacatcggccatgccagcattggttgggcagctatcaagaagaacggtgcggtcccggaacttcttggttgcggagtcgtgaccttcagacctgacgattgtcaaaaccaccagcgtgcggcatttcgtcgaggacgccgtcacatcgcagcgacccgaaaccggatgaagcgcttagagagtcttttgcttcacctagaagtattgtcgaaaattgatatccaaaatgcccgtgagaacccccacccttggccatggctacttgctgcacagattctaactggtcagcgccaagctctaacttgggcagagctatgggcggtgattcgctggtatgcacacaaccgcggttatgatggaaacgcgctctggtcgggcgaagaaaatgaggacgataaggaggacacacagaaggtggaaaacgccaatcgcttgatgggcctttatcaaacctcaaccatggcagaaaccgtttgcgcctttcttggagtcgatcccgcaaacacaaaaaatccttctctcgaatcctatttcaaaggccaggatgccgcctttcctcgatcagttgtgcgagcagaagtcgttcgaattctggaagtccacttcgaaaaactgccaaggtgcgataaggcatttgtcgaggcgctctgtggcgcagaaagagattcttggaaacgcattccctgcccatccatccgcctacccaaacgatttcacggaggtttgcttttcgggcaaatggttccccgattcgacaaccgcattattcctctctgccggatcagtggagaaaaaacaccggacaagaactgtcgggatttttaccgcttccggtggggaatgcttctctgcaatctaagggtttctgatgacgaaacagaatcccgtcgtctaaacgccgcggaacggcaactggtccatcaggcgatacaaatcaacggataccttacgcctaccggtttgaaaactgccatagaaaaggcaaccggagccactccgatcaatgtggatcagatgttcatgactccggaaatggaaaaagcgctggtcctcgatcccgttcgacgtgagatctcttcgcagaaaatctccccgatttgggagaccattcccgaacgcttccaaaagagattcgccggacggctatttaagaatcgcagagctagtttggctcaatggagggaggatctcgccgagggcggcgtagagctttcagctttcgaccagagcgttgagtacagttatgaagcctatgcgaagcgtaagaaaaaacaaaaactcgacctacccgaattttgcagcgagagaatctccgtagcatccgctagtggaagagccccctattcgcgtacactcatggctgaagcttgggaagctgtattcgatgacagtaagccggatcccaaagaccggggtggatgcctggaagaatccttagaagtcgtgaccaggcaaattcagagatcgattgacgagaaaacgaacaaccacctagtccgccatcgtcttttgatttttcaggaattgctcaaggatttaatcaaaaattatgcggacgatgactcagcgaacgtcgatatagtagctctggaagtcattcgggatctgcaagaattttctgccaaaacagccaaagagaaagcccaattaatgggtctaaaactcgccgaccaccgcagagccgtaaagctaatcgagaaggagctggaaaaatatggtggggaataccggatcagcgcaggcttaatcaaaaaggttcgtatcgcgacggacttgaattggacctgtccttttaccggaaaacactactgcttcgacgacttagtaagaggcaatgtcgatagagaacacattattccgcgctcgtggcgacccagcgatgccctcgatgctctggttctcacttggcccgaggtaaatcgattgaagggccagcgcactgcttgggaatttatggaacagcaaaacggcggacaagttccagggacagatctacgacttcagcccctcgcaaactacgaaaaattcgtcgattcgctaaaaccgagattcgatcctcgcaaaggacaacgggacttcatcgacgacgatctccgaaaatatcggcgtaagatgctcttacgcgtcaagcacttcgataaacgaaaaaagccggagggcgaagcaggcggatttacgggccgagacctcacccaaacaagccacctaaacaaactggcagtattgcaggctcgggatatccttgatcgaccctacgacgacacggtgtggagtctggctggcagcgttacagccgccgtccgcaaggcttggaagcttgaaggctgccttgcccgggcttgccccgaaacggaaggtaaaacgaaaacggatattcgcgaaataacccatctgcatcatgcactggacgcggttactatcggattggcagccttctactttccgaagaacggtaaactctgggacttgatgagtcgacgccagatctcgcgtaaagaagatcaaaccgaattcgaatccctcagccgcttgcctatccgctttacgaagaacggtaaatgggaagttcccgaggtgcgtcctaagctcaagaaccaaatctccgaacgactgttggaaaaacgcgtaattcagcatcagccgaagaccatgcgcggtctgaaagtacagcaaaatacatggagggttcttcacgaagacccacaggatgagaataagatggtcatcacgattgctaatcgcgatgagaacaagaaacgaaagcgaagcaccaaaaccgagcgaaaaagcaagcttctcggactcaggccaaagggcgaacaaggaaagttggctaaactgaagggaagtttgatcatcgaagaaaattacggcgtgattcttgatccagaaattcgagtccttccccacctcaatgtcttcgaagaaatcgcaaatgccagaaagaccaatggaggcgtcaatccacgagtaattcgcggcggtagtctcattaaagtagagaaaggtcggtatgaaggtgtttggaaggtcttctcgatcaaagacgccaaggctggatttctcatcgacatggcctctcccgaaatagtgaaagcagccaataaagttcgaggatgcgtgatgaatgcgcgattgaatagcttattgaagggtagactaacaattctcgaacctgactatacgggtcatttcgagtgacgacatgtcctaccacatcgtcaacatcgactctccccgctgcagcatcagttgcaaacacggtcagttgacctgtacgaacaaagacggaagtcgccagcaagctcccatagaagatatcgcggcaatcgtcataacgagcttttccgctcaacttcacagccacctattactcgaagctgccaagcacggagttgctcttgtcatctgtgaacgtttccaaccaataagcctccttcttccagcaaatcgctccaccgacacccttctgacaaaagccgctctcagtctcgacaaaaaaaaagtcgatactctctggagaaaaaccgtcgatgcgaagtgtgcaaaccaggcatcgctcgcagctgaaatggctccaaaccatccaaagatagaaacgctacgaaaaagagctgcaagcaaagcgcccggaaaagaaagcacctgcgctcgctactattggggcatttatgccgaatctcttcatttggaaaatttcaaacgtggacgggaggaaggaggggcgaacgatctactcaacttcggctacgcagtgctcctttctcttctccttcagaaactctttgcctacgggctcgaccccactctcggaatctcccatgaaattcgcgagcgctcgacaccgctggcctacgatttgatggaacctttccgcccttgcgtcgattggcgggtggcaagatggctccaagaggagacgggcatgggtgactacagagtcgatggcaagttccgacgctacgtgacagatttcactatggaacgtatcggatacctcggcatcgagatggactttcgaaactgtttggaatcagtcgttcgcagtttccggcaagcggtcatgacaggacaaacgcgaacctataaaccatggactccccccaattcaaaatgggctggttagttgtcgctttcgacctgccagtcactgaaaaggaagcccgtaaagcttacacggactttcgcaaatacctgttgcgggacggattccaaatgatacagttctcagtgtatgcgaggccaatggtcacccactcccgaatgcagacccatattcgacgcgtggaaaaagaaattccacccaatggaagcgttagagcttggtatgtcacccaagctcagtggcaacgaagtctcgtcatctacggcaaaccagccgaaaaacagcccgcagaaggccttccggaacagacaattttttggtaaccccttcttaatcagcagactggcgaaagccagtctgccggattaagctttggattcaaggcaaagctggtgcttacgattttaaggcattcatccaagtctgccggattaagctttggattcaaggcaaagccaataattgcctattatggaccgtaaagcaagtctgccggattaagctttggattcaaggcaaagccgcggcaacggctacctcagcgccgccgcagtctgccggattaagctttggattcaaggcaaagcgctccagctcctcgcgccgcggatcattttagtctgccggattaagctttggattcaaggcaaagcctggatgtggggttccagatgtggcggccagtctgccggattaagctttggattcaaggcaaagctgagagcatggtccgcacgtacgacgccttagtctgccggattaagctttggattcaaggcaaagcacgctaacctaccgcgcgaagagattctcaagtctgccggattaagctttggattcaaggcaaagcgggtattcgccgttgaagggaaaggtgacgagtctgccggattaagctttggattcaaggcaaagcgtaaaaattgacggcaagatcatctctgcagtctgccggattaagctttggattcaaggcaaagccgccttcacctggccgcctcatccatcattgcctcgccatcctccaaggattcggtcaaccatcgcaggtgttcgatcatccgatcgacccgagccagtgttccagccccggagagaaggcccagctcccggtagctcatgcgccctttgaccaatagaatcgttccggtggtggatccgaggtccttcaaaatccgctcgcacatgctcgaagtgattttctccgagatccaatcgggccggttggtggtgatggtgatccgcttgttaaattctttcgtcgggccattgaccttgatcaacttcttaaactcgctccgctccagacgattcatccccttcttcgagcgaatcaagagaatgcaatcttcgcgcagcgccgtctgcaggtgaaccgccgtttcggaatgacgggaatctttcagcccagccgacatggtctgcacgctcatctcacgctcgtcccacttcccgtagacactcggagatgccttaaacaggccaaagcccttggcctcgggctgcgtgacctcgagatcataattctctgccaaaaattcgaagttcttctgaatcgaccgccaagagcctcgattcagaaaaaaaccaattaggatgacggccaaaaccaaaagaaccacccaaacgacgatttccaattccatgaaaacttactagctcccctcgaagaacgatacgaggagaatcggcgccctgaaaaaagtcggcagattgttcgaaattggacggattcaagctgacaatccccttgccagtgatccggccgaaatggattctaaaaaacagaatgagcaacgacccaacagccgctaccaaaaacctgtgcgacatcatcgtcgccctcgatgtccctgccaaagaggaggccacccacatcctcgatcgactcgaggaccgacccaagtgcgtcaagattggcctccaactcttcacccgctacggcccaagtctggtcgaagccatcgcttcgcgcggatgtaagatcttcctcgacctcaagctccacgacattcccaacaccgtcgcccacgcgattgagagtctcgcccatcttccaattgaattgttgaccatccacggactgggaggcccggccatgattcgcgccgccgccgaagcccgcgaccgcacgggttcatccatgaagattctcgcagtgacgattcttacttcgatggatgaggaacagatgagcgccgtcggtctccaggactccccgaaagagggagccaaacgtctggccaagatggctctcgcagccggcgcggacggtatcgtctgctcggccctcgaggtcgagacgatgcgcgaagaatttggcccggagccgatcctcgtcgtccccggcattcgaccttcgggttttgagaaaggtgaccaaaagcgggtcatgaccccaggtgaagccgccaaagcgggctccacccacttggtcatcggccgtcccatcgtcaaagctgccgatccggtcctcgtttacgaccagatcacggaagaaatcgccgccacaaccaaatagaaatatgatgccgtcccacagtcggcccttgggaagtgcccgtccctccggagtccgcgccattcttctcgctgccggaaaaggcactcggatgaaaggtgcggtcgacgacaagattcttgtgcccatcgagggcaaaagcagttttcgccgcagtttcgacacttttctctccagtgcgattttcgacggcatcgtcgtcgtttaccgcgatctcgagcagaaggaaagactagctgctgagctcgctgacacttccgctgacggcgatctccctccggtcaagtgggcccagggcggatcgctccgtcaggactccgtcttcgaagggctcgccactgccggaatcgacaccgagtacgccttcatccacgactgcgctcgtcccctcgtcaaagccgaggatattgagcgtctgttcgagcgggtcgttcaggataaagccgcctcgctggcacgtccggtcaccgacacgatcaaacgggtaaaccgtcgccggacgaattcccgcaaatgcgtgcttaaggagatcgaccgccgcggatgctggtcaatggaaactccgcaagccttcgagtataacctgatcttcgacgcctaccagaaagcacggcaagataccgtggtctatacggacgacacttccgtcgcttccgcagcaggggtcagaatcactctcgtcgaaccctcatttcccaatcccaagatcacccgtcctggggatttggctctggccgccttcctcgttcgcaacccggatttgatccaaaaggagccggaatgagtctccccccatttcgcacaggcctcgcctacgacgtccaccggttcgctccagagcgcccactggttctgggcggtgtcaccattcccgacgctccgggcctcgacgggcattcggacgctgactgcctgacccacgcggccagtgacgccatcctcggcgccctcgccctcccggatatcggcttccacttcccccccggcgatccttcctgcctcaatatcgacagccagaagatcctcgcctttgcggcggaaaaggccgcggagctcggatacaaaattggcaatctcgacgtcatgatcatcgccgagaaacccaagatcagcccctggaccggaaagatgcgcgagcgcctcgccgcaaccctcgggatcggaaccgaccaagtcggcattaaggccacgaccaacgagggcctcggctcaatcggccgcggcgagggtatttccgccatggcgacggtgctgctgtatcgggagtagaagcgggagagcagaccgcgacggatccgaatttcctgaacagatgcgttgtcccaagacgccccatagcccaccacaaaactaccaactcagacctcgatgaaaatcaacgaaatcgccttcacttgctatcccgtaaccgacatgaaacgctcccgcgccttttacgaaggggttcttgggttaaccgttaccatggacagcgaaacggaaggtgctcattgggtcgagttcgacattggctcgggaacgctggcgatcggtagggcccccggcatggttcccagtgaaaacggcggttcggtaggcctcgaggtcgatgatttcgatgcagcgatcgccgaactcaaggatgctggcgtagaaatccacttcggccccatcgaaacacccgtatgcttcatggcatttgtcagagatcccgacgggaattctgtgggaattcacaagcgcaagccaggtcactcttgaccgagcctcgcaggatcgagagccgacgatcccctaccctgcggttgattcctaaacgcttcgcaaaggtctcgggagcggttcgacgtttctcaccttacgatcattcgcttggcgcagcaatctgcgaggggttcaccccttcccgtagctcgatcgttgcgagcaccttcggcacatacatccgggtttccgagggcaacacggcggcgatgccattaaagtcagtcgccgattgctcccgcattaatcgccgcacccggccctcccccgcgttgtaagcggcaaagacaagcggccaggattcgaaacgcccgtagaggtaacgcaaatacttcgctgcggccgaggcacttttcgaggcgttgactcgctcatcgtcgggcgtcacctccagccccatccattccgccgtcgctggcatgaactggaaaaggccctttgcaccgacaggactgatcgcttccggatcgaaggaggactccacctcggccagccaaatgagctcggtcggcacgcctttctcggcgaatttgcctttgaccaaaggcagcaaccccggcgcgggctgaggtgcctgacgctccgcgatccggtgcctccaaactctcaggtccatgacgtagtcgtcccgaaactcctccacctgctcgggggtcggttgcgtctcggattgttcgacgacctcggccgcttcctgtcgcgaccaattggcaaccacggcataatcgtatcgctggagcagccaagccacataatgacgaccattctcggtctgagacagggccaacatcatttgcgggatcatcgcctcgaagctcgccaagtcgtcgagttgattggactccagggcggtctgcaattgtgtcgccaatccctgcaattcatccggcgtgaaggcgaggtcgggcaactctccgttttgccaagcctgccccatatccaaagccaaatcgacgacttgatcgacctgctcacgggaaatctcgggggtctggccgagaagagaaagggaagacagggaaaaaaatgaaagcccgagggcgcgaattccaaaaatcatgccgtgaacaagcactttggctcgaaaatagcaagagagtcgagcgaggtgatgcataagattcttgtaatcaagagcaaacacctctctcctcaaatttctgttcatgaatccaacctctgaaatccaggatctcgcccgcaaagtcgaagaacaactatccgcccgccgcgtggttctgaccatggggggcgagccgacttacatcccccatcaaccgcggggcgccgagtggaacttggaggcgatgggccccgaaaagttgaactacgcccacaagatggcctccaatctcctcgaagatgagtgccccggcgccgtagcactccaagtcttcggcaagtggtatccgggcgaacctctcccccgatggaatgtcgtcctcctcgacaatcccggcgatgtcctctggcccaatcgcgataccctactcctctccaagcgcgacggacgcaaccactcacgcgatgcgaccagactggccaaaaaagtcgccgaaaagctgggactttccgactttctcatgccggcccgcaatccctctgcccccaagcgtaacacttgcggatgggtcctccccctcgatttcgtcgaagaggaatggacttccgaaaaatggccttggtcgaaggaaaaccccatccctctcttcgccggagattcgcagatcggcctccgcctgcccttgggagaccttcccgaggatgccctccgacgcgccttgaccgtcgaatgcatcgacggtgcgatccacctcttcatcccgcccttggaatgggccggcttccgcaagctgatttccttcttctccgaaaccgtagaggagaacaacctcactgacatcatcctttgtggatacggtcccagcggagcccccgaaaccgtccgcaccttcggtctcgccgctgatcccggcgtcttggagatcaatctccccgcctgcacggactgggtctcctaccggcacaatcttctggccgccgacacggccgcccgcaaagcgggtctcacaaccacccgactgcaactcaatggcggagtcaacggaaccgggggaggatcccacctcgccttcgggggcacttccatcgagaccaaccccttcctcgagcgccccaaccgcatcgcatccattctccgctactggcaacaccaccccgtcctgtcctacgcattttccgggcagtatgtcggccccggatgtcaggcaccgcgattcgatgagggccccacccacagtctctacgagaccgaggtcgcctgcgaaggaatggagtcgattcgcggatcttttgaccccttctggatcgatcagttcctccacaatctgatgaccgatgcctcgggcaacacccaccgggcggaattgtgcttcgataaattctacaacccgacggcccccaacggctgcatcggcattatcgaattccgagcctttgaaacgcttcccgacacggacttgatggcgaccgtatcgctcctgatccgcaccatcatcgcccgcctcgtcaaacgacctttcgggagacggcttcgccgcatgggaaaacaactccacgactatttcttcctgccatcctggctctgggaggatttgcaggaggtctgtgaagatttgaccaaagccgggttccccttcgacccggaatggctgcgcccagtcttcgaattccggtttcccgaacgcggaaagatggaagtttccggtggagacctcattcttcgccaagccttggaatcctaccctctgatggccgaggaatcacaaggtctctcgaccgtccgcaaggtcgacaactctacggatcgactcgaaatccttctgccggatcacagcgtcctcgaaaaaggctacctcttggtcaatggaatcgagatgccgtttacgaagcatagcgccgggatggtctgcgggctccgctacaaatgcgcaagcgctcaccctgccctccatccaaacgttccgatccagtcgcctcttctcttcgagtgggtcgatcagaaaacgggcaaggttgcaaccgccgcccgctaccaccactggcacccaacccaaccagtttacgacggcttccccacttcggaagaagaggccgaacagcgccgcaaagatcggtggatccccgcccccgagagggaaggactcatcgctcgaggacgtccaccacggacttcgcccgagttcaaggtcaccgtcgatcttcgtcgccagcaattctaagagccttccaagctttctcaaatctcggcgggaaagcccaccccctgtccgacaacgaatattgccagggtgactgttgagcgactaggtttccttctgtgaaaacctctatcctgctcatcacccttagcggcgaagaccgccccggaatcgttagcgaaactgcagcaaaagtgcacgcccaccaagggaactgggagcgcagccgcctgattcacctttccggacgattcgtcggacttcttcaggtcagcgtccctgaggatcagcgggaatctctccgcgccgatctcctctccatcgaaggtctcgaattgaccatcgctgacggcacgggaagccgcagcaccaacgccacttccttccaagtaaagctcgtcggggccgaccacccgggaatcgtcaacgaagtcttcggagccctctcttctctcgggctgaacgtggaatccatgtccacccgcaccgaagccgccgccgattccggaactctccttttccgggccgaagctcggctatcctcgcgcgagccgatgcaggaggccaccgtccaagaccacttggaagaactcgggcaagatctcctcgtcgaagtttcggcgaacgaagccggttgatttttctctgcggtgaatccggcctaccgcagtgcagttttcctggtggagggaactctacccgccacccacttctccattgtcaccgcctacaatccgaacggagtcctcactgattctgcatccaacgccgtcgccgatcagcaactcctccaggccattcaacagaccggagagtcacccgtcagaattaccggcatgtcccccgaccgttctcatcaagaactcggatggtcgattgaggacgaagaagaagccctccgactcgctcaaaaattttcccaagtcgccctctatcgagtgatcgaggaagacctcttcctcatcgaacgagaaacgggaacccgcgaaaaactcggaaaatggcaggactttgttcgtcaatagaccaaccgctttccttctttttcctttcgctccgtcccttctttcgattagaaccaactcattccaaagcgagggtagctcagttggatagagcatcggccttctaagccggcggtcgtgggttcgaatcccacccctcgtgccaacgccttcgcgaagcgaaaatcgatccccccctgtcacgccgtagcacgtacccgggtgcctaaaatcacgcgcacatcactggttcggcccgtccaaccaaacgcatccttagcacctgcgaaggcggatcgtgccaacgccttcgcgaagcgaaaatcgatcaaaaaccacccccctgtcacgccgcagcacgcacccgggtccccaaaatcacgcgcacttcactcgttcggcacctccgacaaaacgcatcctcaacaccggcgaaggcggatcgtgccaacgccttcgcgaagcgaaaatcgatccccccctgtcacgccgcagcacgcacccgggtccccaaaatcacgcgcacatcactggttcagcccgtccaacaaaacgcatccttagcacc

SEQ ID NO: 4275 - DNA, 8893 bp, synthetic construct
  misc_feature 1..8893: note = Synthetic
  source 1..8893: mol_type = other DNA
gttgccaatagcctcgcggcctgaatcatttcctcgggcgataccgtgcccgctccgcttgtcgcaaagccgagtatctcgcccgagtacctcagcccgatctcggaccattgggccagcagggtatcatggcgtacatcgctcttaaaaatgcgctcattgccgtgcccggtatagagttcgtaagcgatatccggggcactcccatccaggtcccagcctcccggacgggagaacaggttgacctcgctgatccagacgtaataggttgcccctgatttcaagggctgcccggcgatgaagccggtttcctcatcgtggttgtctccccacagaccggcaaagagcgcaatccccagcacaaccagcagcggaatataccagccactctccctgaagcgtttaagccgttcgtgttcccaaagcccagcgagcttgttccaagtacctgactctaccgggttcggagcttcgggctctgacgatggatcgtgttcttgaagaggtggcgtgttcatggattgtcgcaggggaagcaatgcccctgccggtacggcagaaccactatcggcaaggcatggctctcgatgactccctccaggcgctggaggtatttctggtgggacggtttctcaatgatgaggatgatcgcggcacgcctgccagtctgggccgcataattcaggctctgcccaatggcctcggcccacttgtcggcaaaatcgacctcaatcgcgtactcgtcggtcaggatgtcacaacgtgttccgttgggaagggagatttccatttcccccttcaacaccctagcagcacaatctctgtagtgagattctggatacaatcgagctgcctccagcgaggcaccggatccaaacaggcagcaggcaaagagcatcatgcccattcgccattggccgagtgtgtgtagccaccccggagaattgctcgctgctttagcggccataaaaataaaacccaacgtacatgcctgcacacagggctagtccgagtagattatagagtttctcccggtagcgcagcgttcccatgcacagcactagccgataccggttacggcctactccccggggaagggatgtcggcctgttgcccggaagcatccatgtgcaagtggatttgctcctgagcatcgctcgcaagtaccggcaattgatccagagccgcaagagtgacttggtttgtttccataccgcccatgcccaaaagccccaaaggatggtccagaatatggcccgatagagactagcgccaacgcttgaggttgttgtggtgacagagtccatgtcagggtactttcaggtacttgttcgagtagccgtcgtggctgatcttcatgtactcaccggggagaaaatcccacggcacttccagtacaccgatttcaacggtgcggtgaggctcgataatgaaatagaactcatacctctctcgcagggtcctgttttcaacatagacgacaggactcaggagcttgttcgaggtattggagaagatgacgacctttcccttccccagcacagattgccgaaagctcacgtgcacgggcagttctggtttcttgggctgctctgagcaccccaacaggcagatggtggcgataaggcacagaagcagcgcggagaagcaaaagcaactgcgaccccgcaggagacaggttggtgttttcatcgagttatccgtgggttgtttcgatccttaaaacggaccgactaacacaaaaaccctaagatcgtagggttacctgtcaagccctacgatcatatggttgtggggtggataattcgctggcggaactgggagacagattacggtcattgcgggccaggcatggcctcacacaggaggagtttgcccagctcgcgggcatcggctacaagttctatcaggacatcgagggtgcccggaagaaagagatctggctctcgaccgtggaacgccttgccatcccctatggcttaagggcgtggcagctattgactccagacatgcccgaggattcaaaggtagcccgtaaggcccccagcagtcgggtgcatcggaggtaggaatgtgtcggggagtgctcgaccaagtgaatttaaacaaaaacgcggaccctgaagtccgcgttaatgcttgaaacgctttcttgggctggtgtacctgcatgacagatagtgaccgtacgcctgcgttactaactttgtcttgaatccgcgcaaagcaaactgaaattattcaattgtatcaaggataaaatgctgtagatcatggggtatgaaccccgtctcgtttgcatttgatattggccatgcttcgctgggctgggcagcgattgaagaaaccggtgcgatgcctcagatactgggatgtggcgcggtcatcttcagccccgatgattgtcagaaccacgcccgtgcggcttttcggcgaaaccgtcggaatattgccgctacgcgtaaccgtatcaaacggctcggcaggctgcttgtgcacgtgggagcctttacggaggcacagctcagggagcggatggatcagggccgggggcatgcctttccctggttgctggccgcgcaggtcatcagaggatatcgacagtcgttaagctggcccgaactgtgggatgtcatccgctggtatgcgcataatcgcggctacgatggaaacgcgctttgggcgctggcaaagacggataaggaacaggacgaggacagcaaaaaggaagaaaatgcgaaccggttgatggcgcagcatggggccatgacgatggccgagacggtgtgtgcgttcctcggtgtggaccccgtctcgaagcgggctccggctttggaggcctattttaaaggtaacgatgctgccttcccgcggcgggtcgtacgggatgaggttgtgcgcattctgcgtgcccatattggaaagctggacggttgcgatgaagcctttgtcacctgcttgtgtggggatgcggaaaacgcctggaaggcggtggattgtccgtccatccgcttgcctggacgctttcacggggggctgcttttcgggcagatggtgccgcgatttgataaccggatcatcccgttgtgccgtatcagcgcagaaaaggtcccggccaagcattgtcgcgagttctaccgttatcggtggggaatgctcctgtgtaacttgcgtgtgaagggcaagtccggggaggattcgcgtcgcttgagtgcggaagaacgcgtgcatgtgcatgcggcgatggaagaatccggctacctgaccaagacctctctgaaaaaggcgctgcgggagatcaccggagccgagcccgccaatgccgactcgctttttctgactcctgagatggagcgggccctgaccttcgatcctgtgaagcacgcggtttcctcagggagggttgcaccggtgtgggccgtgttgcccgataggcaacgcaagcgttttgccggatggttgtataaaggcaagccttccagcttgaagcgctggcgagagaacatggcggcggacggtgtggatctgtcggatttcgacgatgccatcaacatcgcctacgaagcgtacaagaagcgggcgcgcaaaaatgctcgtgatctggatggttttatagacgaggccatttcgattgtcgcctatcgtccgagcgggcgtgctccctacacccgcgatctgatgcagaaagcctgggaggcggtgtttgacgccggccagcccgacccgaaggacaaaggaggctgcctggaggaaaagcccgaggtagtagcccagcaacttcagcgctctattgatgcgcagacgaataattcgctggtgcggcatcgcctcctgatcttccggcgactgctgcgtgacctggtccgcaactatgcgggcggcgaagtgacgcgagtggggaaggtgacgctggaggttattcgtgacttgcaggagttttcggccaaaacggccaaggagaaagcccagcttcttggcctcaagcttgcggaccataaaagggccgttcaggtcattgagaaagaactacccaagtacggagggagatataccattagcgctggactgataaagaaagtccgcattgcccaagacctgaactggacctgtccttttaccggcaagcattattgcttcgatgacatcgttacgctgcaggtggaccgggagcacatcatcccacgctcctggcgaccgagtgactcactggattccttggtgcttacgtggccggaggtcaaccgcatgaaggggcaacagatcgcatgggcctttatggctgggcacgagtgcgaaaaagttcccggcacggacctgcaactgcaatctctgagcaactacgagcgctgtgttgacaagctcagacccgggcgcgatccgcgggggaatcgcaatgctgtctttatcgacgacgatctgcggcgctggcgccgtaagcagctcctgcttatgcccgagtttgatgcgcgtaggaaaaagaatagccagcaggagggcgacagtggcttcaccgggagggatttaacgcagaccagtcatttaaacaagctggccgcactacaggcgcgcgatgagttgactgaaagaagcgataagcttggcccgcgtattccgcaggtcgttatgctggctggtagtgttaccgctgccgtgagaaaagcttggaatctgagcgggtgcctagcccgtgtctccccggaaacagaaggacagaataaaaccgcgattcgtgagatcacgcatctgcaccatggtctagatgcagtcactcttggcctggctgcttacttctttccgcgtgacgggcgcttgtgggagctgatgagccgccgccgtatcggcagcgatgcggagcgtgacgagttcaaaaaacgcctcggccagttcgtcacattttctgccggcggtaattgggaaatctcggacctgcctgtggagctaaagaatcagatagccgagtgcttgatggagcgccgtgtcgtacagcatatccccaagacgatgcgtggcctcaaagtccagcagaacacttggcgtgtcctgcatcaggaccccgatgaccctgaaaagatggttctggggatggccatgcgggatgctgacaaaaaacgccagcccaagacctccagagaaaagaagagcaagctgcacgggctcagcccgcgcgatgggacaggcaagctcgcccggctcaagggcagccttattgtagaggagaattatggaattatcctggatccagagccagcaatccttacgcattctttagtctggaaaactctaagagaagtccgcgagaagctgggatatatgcctaggatactgcgaaacggaaatgctatcacggttcctgctggtcggttctgtgggacgtggagaatacgttcaatcaaggacgatagtaagaagggactgttggttgatctttcattcccagatattgtgagaatgcagagcaaggggggagggatcaaacgcgatgttcggctatctagcttgatcaaggacaaatttaccatctgccaactggattactcgggttgagaatatgtcctaccacattatcaacatcgactcaccgcgctgcagcatcagttgccgccaggggcagttgacctgtattgatgaagatggaaggaccaagcaggctccgctggaggatgttgccgccattgttattaccagcttttcggctcaattgcatagccatctgctgttggaggcagcgaagcacggagttgcacttgtcatctgtgagcggtttcagcctgtcagcctgcttttacccgctaaccgctcaagcgataccctgctcaccaaggcggcactgtcgctcgaacgtaaaaaagtggatgtgctgtggcgcaaaacactcgatgcgaagtgtctaaatcagactctgtatgctgagttcttggtcccggaacatgccaaactcgatgtgttgagaaaacgagccctcggcaaggctcaatcaaaggagggaacctgtgccagatattattgggggatttttgccgatgcactcggcctgaaggattttaaacgggcgcgcgatgggggaggggtcaatgacctgctgaacttcggctacgccgtcctgttatcgcttacgctacagaagctcctggcatgcggacttgatccgaccctcgggatctcccacgaggtgcgtgagcgctcgaccccgctggcctacgatatcatggagccattccgcccttgtgtggattctcgggtggctcgttggctgatggaggaggtcgaggcgggagattatcggatagatggccggtttcgccactacatcacggagtttatattggaacgtgtgggctacctcggactggagatggatctcaaaaactgtctggaatcagtggtgcggagttttcgcagcgccgttttaactggacaaacacgtagctataaaccatggaccccctcaaattcaaaatgggctggctgattgtggccttcgacctgccggtcacagaaaaggaagcccgtaaggcatatgcggactttcgtaaatttctgttgaacgatggttttcagatgatacaattctcagtatatgcccgcccaatggttacatactcgcgcatgcagactcatctgcgtcgggttgaacaggaaattcctcctgaaggaaaagttcgggcctggtacgttacccaatcccaatggcagcgaagcctggttatccatggcaaaccagccgaaagaatgccccccgagggactcccggaacagatacaactttggtaaggccctaattgtcagcagactcgggaatgcaagtctgctgacttaggatttggattcaaggcaaagcgaggtcaagcgcatgtactcggaagatatgagtctgctgacttaggatttggattcaaggcaaagcgtaaaaggcgacgacgtcctcccagtcgcgagtctgctgacttaggatttggattcaaggcaaagctctcttgagagcgacgggcatggcgggtcagtctgctgacttaggatttggattcaaggcaaagcctcgaccgctccctcgctcacggcccacagagtctgctgacttaggatttggattcaaggcaaagctctgcctgcgcgatggtaaggcctacgaggagtctgctgacttaggatttggattcaaggcaaagcaaagaaatggcggaagtcgtgatgcgtgaagtctgctgacttaggatttggattcaaggcaaagctgttcgcggatgaagtccgggtaatgaggaagtctgctgacttaggatttggattcaaggcaaagccgtatcttgaacctcccagctaaagaaaagcccccctgggtccctgccgaatcgtggtagggccgatggtggggcttctccggtgtaaaccatggtttacaccaagggcttgtgaggcctagttgagtccggcctcatggtcgaggagtcggtgcaggcgtcaggttctgtccgggagtaggtccacgcggcccttgaagacttccgtaaaggtgttctggaggctccagagggtgcggggtatgaacgcttcatgacggggctttctccacagagagaggaccttggggatgtatccgttggccatgacaccggtatcgacagcgcggataaccagatcatgggcacgccggtcattgatgcgggcctcgcggtaacggatgacccggtaatcgtgctggtcccagtagcgcctgagcttgcccacagcggcatcaaccagccggggcaggtcgtcgaggatacgcggggtgtgcttgcgggccaactggatctcgcccgaaaaagacagattatcgcagacaagcacctggctgcccgcgacgagcccggcagagaagcgcatgtcgtgggagtttcgcacgccgaccacgtagtggtagtccgggttgtgggtaaagccgctgacctcgatcaggccgaagtaacgggcgttgtcatgggtgagcccatgcgcctgcccggcaatggcaaagccctgggtaagcagggcgacctccacgacttgcaggagttttaagtgagcaatcggcctccaggtgctggtcgggggtggcgtcggtgcctgcgcgagctctccacggctgacggcgtggctaccgcagtgcaggagcaggttgcaaggcttggtggttgtggctgagacgggttcgatggtatcggtgatcatggtgttgatgagttgagggtggtgagtgatgcgccgacttggcgcttgcgaaaaaacaaaagccccgcctcggataacacgaagcggggctgtattggttgtccactacacgggtggcttcaacggtagcgttcgcgttccgggtactcggggtattccggcacgaagggcgaacgcctcaccgctccgacggcatagccaatggagccgatgaggatggccacggagatgaccaggaacgggctgagcgtttcctgggcctcgttgaccgcgccgatggccacaggccccacgagcgtgcccacgctgtaagcggtgagcgcgaccagggcgattttcaggatggcattcatgggttggatgcgggtggttgttttttttaacggactgcgcatgaccggctattgcctgcggcactgcgcagcccgaacgatgctccggccccatatcagcgagcaggcaaccgagcacccacccacccaatacagggcattggccagcggcacaaacggagcctgctcaaccactgcggcgggcggaggtggcggctcgttcttgtcgttgcccagcatgaggaggccagcgccgacgctgaccacggcgatgacgatggcctggatcatcgctcgcctcccgtccatttcgcgcactcaccccggaagctgcaccaggcgcagtgcatgcccggttgagggtgaaagcgctc

SEQ ID NO: 4276 - DNA, 18999 bp, synthetic construct
  source 1..18999: mol_type = other DNA
  misc_feature 1..18999: note = Synthetic
atcgtccggtttttggggtagcagttgcgcgtccgtggtatttttcgcctgttgttggcgcaacttatgtagctactgtaccaaattcgtatcgttctttcggaccaaatcggggcattgcttctcagtttgatgcaacacgtggtttacgtgttcgatcaacgacaccgggatcaggtccgcaaggtggggtacctttcaatggtagttcaggatacccaaatccatatgttggtggcgcaagaagtcgtaccagcataacatctccaatacaatcgaatgttccctcattcgggaatgtccaagttcgccctgaatcgcagaagcagaccgaaggaaaatccgtctttagagaagaccgttcacaagaacgtgtgcgatcttttaataattctcgtgataatagcccattattctcttcgcctcgtaattccggaagaagatttgaaggcggcggtggatttatgggtgggggaaactcgtcgccatctcgttcatctggaagtgccggtggcggtgcgcactcgcgttcgaatggtcagtagtctgtagcatcatctaactttacgtttattactttttcagaatgactatgaaagcatatgtgcagcactgttgcatgcagcagtgcagtaaagtcttgtgcctattctgttccttagcgtttggactctatgtgccgaatcaatgtctcatggcacaaggaatcgaagacgctttgcgatatacacagccaaacggcttctacacccctcgagctcacagtttaggaataagttataccggaatagctgatgactttgcagcagtttttgttaaccctgcaggacttgcacgtcttgtcgtatcggagttttcagcatcgttgaacggtcgaaatatttctaattctacctcttatttcaatggcgataattctgcaaatcgttttggtctaaacataagtagtattggttttgccgcgcctctgggcgggcgcaatagtcgttttggttttgctgtgggattcggaacagaaatagattttaccaatgcagattcttccgcgggatttaatactcgttcaacaatgcttaatagttgggtacaaagtgctaatcctgaattccgtgatttggcgtattctctcgcacttgctgatacagttcgcggacggcgttttacaccgattcaagatagtttatatcaagggcagtacacagtagagcaagggcgcataacgaatgttgttggtggtgtaggatatgaagttaatcaacaattttctgtaggtctttccctgatcggtaaattcggtcgattccaatatgaccgatcttttagcgaggaagacgctttcaatgtgtatcgtcgattagatccaattaatctcaccgatattgattttcaatcgctcactacacgcgaagtgattacgcaggaagtatcaggctttggtgttatgattggagggcaatggcattttcaggatatcgcacgtttcggtgcaagtgttcaattacctatgcaatatcacattcaagagcagttctcacaaaccactattgcacggtttgacaatgcagaagagtttcgtgactcctttggtggtcgttcgcaatatgctgtcgtagtgccaatgagtataaatcttggcggttcatttcattatgcaggatttacactttcagtaggtgcgcgatattcagatctttcgcaagtctctttcagtggcgggtcgcaggagctacgcgatgtgaatgcacaaatagttcgtgcattagttccgcaaaaccgctacgggattggggttgagtacgatggtgcgcaatctccagttgctctacgtgtttcatactcctcaacacaatcaccttatagcgatcaaaccttacagtcttcggcaacaatgattgggggcggtattggtctatacgcggcggataatatgcgcttagatctttcgtactctcgtcaaacaggaacatttcaacggttaatgtatagtggagatttttctgcctatcgcggtacacaaaccataacaaccatgatgctgggcgtcgttgtacgattctaatttgtatcggtggttcctgcatgttctttctttttaccgcgttgtggtaagccgccgaagattaatgatttaatgagattacgttttgaaaaacgaaatcttgttgcgtatgcgacgatagtttctttgccgagtaaacgttgtgtaatcacgccaattggcaatccctgattccacagtgcttgtgctttagcctgtaagtcacctagatattctgctttgcgggtaattttttgtttgccgtttttatttatggcactatgcgaacaagcaagaatatcaaaatcttgacgttgtaaataaagtaaactatctaacattaatgaagcatcttcaacttcgtagaggtaatgcgtcattggtgatacgtacatgtcaccggtgaataaaatcccgcgatcagcatcaagaaaacacacatggtcgattgaatgtccgggtgtgtgtaagcaatgaagcgtaccatgttcagtacttactgtttcactaagagcaagcggttgaaattttctgggttttccatgaatagcaattcgctcgaaagtcattggaaagccctgtgcagcaagtgcaagacctgcttgatgcatcatcacgggaataccgagctgctgctggagataataaccattgcccgagtgatcttcgtgatgatgagtgataattgcttgcgctaacggcgattctctacaaaatgctaacactgattttgtgtgaaaaatatcgcctgagtcaatgagggtagagccaatgcgccatacaatagagtttgtgtacggcttagctttccagcctacacgtatgccggtaatatgctcgaatgttatgcgctcaatgacatcaaaaaacatgattcttatgtgcgagaagtcaatggttgaaattgtgtatcatgccatgccgaaaacagatgctttaccttcgtgcgttgatatttcccggtcgatgtaatcggtaactcatcagtaaaaacgataacttttggtgctttggcaaagggtaaatgttcttggcaatattgaagaatagcatcggcttgtgcaccttcatggggaataattactgcaccaacttcttccccatataaccgatggtcgaagcctacacaaataccagagcgaactccgggtgcatgagcaagaacttcatcaatttcgagtggggaaagattgacaccaccgcgaataatcaattcttttaatcgtccggtaataaaaaagaatgctcgaccatgttcgtcgttttgataaaatccttcatctccactgcggaaccatccatatttgaatgtttcagcattcgctgaaggattattggcatatcctttcataacattaacaccacgaatgacaatttccccgcgttctccttcgatgagtggtgtgccattcggagaatggattgccatatcattgacaggaagtgcaataccaattgaaggaaagccatgtgttgacatccagcgttgatattcttcatctgttaaatcggtgggcaagtaacaagagtaacatgtagtttccgccaaaccatagccatgggtaacacgaatacgaaatattgctgtaaagcgttcggcggtgtcgcaagtcagtggtcctgcaccacaaataactgcttgtaatgttgattgtgccagtgcatgtcgaagctcatcaacacgagcgtgatcaacatcagaatatgtctcggttaaaaacgctaacaaggtcggtaccacggaaacgatgtgaacaccatccgcaagaatgcgttgaaaaaaggttgaagtttgaaattttctattgaggacaatactaccaccggctataagtggggtgcagagtgtaacaataattccattaacatgatgcatcggcagtacacacataaagcgagtatcgggtgttgctttataccattgtgcaattgccgtgcagtcagcaaggatattgcgctgagtaaggacaacacctttgggcttgccggtagtgccgctggttaagactatgagtgcttcgttgtcaagtgcagggggagtatcgaatgtttcaggaagcggatgttgaaaacaatatgttgtcactgcaccatgcaggtgatttgtgggatcttgtccgacgaccaaaagcaaacgctcttgtgaactgttgtcgagaaggggtgtcatacgtctatgatactcttcacgacagagaatgagagtactgcctgaactttcaatgatatactgcaagcgatgatcatcttcacccatattcaaggggacaacacaagcaccgaggagccatattgcacagtactgaataatagtatcactatgattatgtgccgctacaatgactgaggattgtgctccaatacctttggacgacaagtaccatgcgagttcacgaatacttttgtatagctcgttgtagttgtattcatgccgttgatttgtatcatcatagtaaatgagggcgggtctgtgtcgatcaccatggtatcgaacaagcatttctgccaatgacgaataaggcaggggatactgttccggaggaagagaaccaacagtttgtgcagaatggatcaggcgtgcaatgtcttgttcagtcgaaaaatgagtctcaggttgagagggagaaataggcatgaaagaagttgattcattaccgtgaaagttattgtgagattgcattatcataatcatcagaacaccgaagcgaagaaatgaagaaagaacgaatacatgcacacacccgcacaaaaataaaaatagccgacattccaaaggaacatcagctatgagcgtctgatcgcaacaattaggggagaaattattgctcgactcgtagcggagaagggatttgaacccctgacacatggattatgattccattgctctaaccaactgagctactccgccgacctgacttgttctgcaatctgcatttcagcaatgactgcgtcaagtatgtcaaagagttgcaaagataaccgaaattgtatggctgtgcaaataaattcgcgttgcaacaattccatttcatatcgcttcgtgaaaatgagtaatttaacactgcatcgagttgtagcatgctacctactcttccttcttcttctctgcgcacaataatgtcggttatgggtcagatctgggatcgtatcaatcgtttagtacgttcatatagtttgcaggaatcatcctccgaatttcaacgtccatcgcgtgcatatgctgagtcggatgaggagaaattgcgtcgtatgattgaagaacttgagtccggaaagcgcacgcgccaaccgcatcttgcccatactgtaccgcaacgtaagacaccacatgatatagaacaagaaacgcgacgacgtattgagctcaaacgtgctttggaaatacttggcttgccaacaagtgcaacacctgagcagattaaaaacacctacaaaaaactcatgatgcagtatcatcctgaccgtgttatgcagttaagttcagcagagcaagcacttgccaaagaaatgtcggcacggctgaatcaagcctatcaattcttgaaagaaacgctgaaattatagtactaaagcacatgaacggaatctcttctcatatcgttgagcagttagcagacctcggtattgtcggttcgtctgatgtgattttgcgtgccggcatgttggcattgcaagccgctccaacagatcttactgttttactgacaggcgagtcgggttcgggcaaagaagtttttgcaaaagcaattcatcgtatgagcaagcggaagcgactgcctttggtgtcggtgaattgtggtgcaattcccgagacattgttagaagccgaactctttggaaatgagcgtggggcattcacgggtgcagtggaacagcgtaagggtttttttgaagcggcgcataaagcaactatttttctcgatgagattggtgagatgcctattactacgcaagtcaaacttctgcggattttagaaagtggtgagtattctcgtttgggttcctccgaagtgcgtgtgtgtgatgtgcgtgtaattgccgcgacgaatcgtaatctcgaggaacgtgttgccaatggtgaatttcgacgcgatcttttttatcgtctcaatgctgtgcgtatcgagctcccttcgctcgcagagcgacgggaggacatccccgaacttgttttggcaattgcgcacatggtgagtgaacagcgtggtataacctacaaggggatgagcgattccgcattgcagatattgcaagagttgccttttgaagggaatgtccgagaattgaaaaatatcattgaggcaattgttacgctggagcacggtgaatttattactcgtgaaatactgatgcgttacttacccaaacaatcgacacagtcctcgtatagttatcgcccggcaccgaatgcaatggtacatcttccgaatagaactgcggaacaagtggagcgtgaacttttatacaaagcattgcttgatgtacgaggcgagattatgcaaatgcgacaagaattgcgagaaatacgcgagcgactgggcattcgtgatttcgtactacctgtacccgattatacgcagacaccacccgatacaactatgtcgtcatccaccacggcaattgttccggcttcgggtgagtatgcctttgttcctgctgtgccgtcctttatgcccgcggaattacatgaagaaaatccatcatccggtgatacacatgcgttgagtcacgaacagtcgggcgaagccattgatgcagaacatgaagtagtgttgcatgatgatactgagttgcataccaatgccattgcttccaaacaagacgatatgatttttcgcttggacgacattgagaaaatgatgattcttcgcgccattgcaaaatttcatggtaatcgccgtgttgccgccgatgcccttggtatcagcgagcgaacactctaccgcaaactcaatgaatatggtatcgagtaggatgaaatcgacgaaagaataagtcaatcagatgtcttacaacaaaaagcccggatgaaatcctgcggggagcagtgcattcatggagtagaactcacgttttttctgtgtgttgagaagtaccactagtgcatgttgtgaaaaatcatatagcaattgtcggcatgcaccacaaggcggtgtgagattcgttgtatcagcagtaacgatcacgcacgaaaactcacgtatacctcctgagaccatggacacgagcgcactgcgctctgcacaaatcgtgagtccatagctcgagcattcgacattcacaccacgccaaattttacccgctgtatcaatgattgccgcgccaacatgaaaagtcgagtatggagcatgggaatactcgcgtactgccaatgcttgacgttgcgcattgcggaaagtttcttccatagtggcatagtgaactgctaattgttgtttgcgcgattgaatacgatgtgttgcctccgaaggtgctgtatcatgcagtgcttcgcctgccaataaatagcaacatgcctgaacatactgctcgcgctccaagaagaaatccacatactctaatgcagcatcaatagtcagggcagatgatggttgatgcatagaaccacaactgaaaaagatgaaaaaatcagagaagaaattttactcaacagtaacacttttcgcaagattacgaggcatatcaacattgcatccacgctcaacagcaatgtaatacgcaagcaattgcagtggaatgactgacaaaatcggtgtgagcatcgcaagtgtttgcgggatataaatcacatgctcagcgaattgttgaatatgtgtatcgccctcggtggcgatagcgataattcgaccattgcgcgctcgcacttcctgaatattggaaatcactttttcgtaaatctcatcatgggtagcaatgaccacgcagggcatattctcatcgatcaaggcaatcggaccatgtttcatctctgccgcaggataaccctctgcatggatataggagatttctttcagctttaatgcgccctccagagctacgggaaaattatatccgcgacccaagtacaagaagtttttagcagaagcatactcgtgtgcaatagttttgatactttctgccgttgcaagaatggcttcgattttatcgggaatcacttcgagtgccgcaatgatttcgcttgcttctttcgacgacatgcggcgcgttctgccaaggaagacagcaatttgcgccagcacattcaactgcgaagtaaatgctttggttgaagcaacaccaatctccggtcctgcgtggatatatacgcctgccgctgtttcgcgggcaatggaagaaccgaccacattgacaatgccaagggcagttgcacctttcatcgtggcttcgcggatagccgcaagcgtgtcggcagtttcaccactttgtgaaattgcaaagatgacatcatcagggaagatcacaggattgcgatagcggaactccgaagcatactccacctcgacaggaatatcggcgcattgctcgatcatgtactttgccacaagagccgcatgccatgatgtaccacacgccgtaaagatgatccgcttggctctgcggagcttgtcgagagccggttctaagccgccgagtttaatcgtatcgccctgcaagcgaccacgcaagccattacgaaaagtctgtggctgttcggaaatttctttcaacatgaaatgctcgaaaccgcctttttcaatctgctccaaatcaaattcaatttcttgaatcgccggtgtggttgtttcgtcatcgatggttttcgtttcgtagcccgtgcgcgaaagaatagccatctcattatcatcgagatacaagacactgcgtgtacgggaaatcactgccgccgcatcggaggcaactacatactcatcattgccaacgccaacaagcagaggactaccgcgtcgtgccgcgaccatcatatcgggagcatctttgcataatactgctataccgaatgtgccatcgacttcattgagtgcaagtcgaactgcttcggggaagcgttggggtgtgtcaggcaaacgatcataaatcgaacgaataaacatgaccagcacttcggtgtcagtatcggaacggaaggtgcatccttgattggtaaggcgttgtttgatggcagaataattttcgataataccattatggatgagcgcgaatgtaccgtcgccatcaatgtgtgggtgcgcattacggtcgctcggtgcaccatgtgtagcccagcgtgtgtgtccaatcccaacactcgcacgcatgggttcagtgtgaagttcatcagcgagagttttttccaactcagcaactttgcccgtttttttgcgaatagcaaaatcaggcgcaatgtgtgcattcagcagagcaatccctgcggaatcatacccgcgatactctaagcgtttcaaacctgaaagaataataggcaatgcttctgcgccaccaatataaccgacaataccacacatagagaaacgactccaagagttaagaaaatgattgaaaacaagggtacaagaccatcaccgaaggagaacacaacatgttcgtaaaaactctgcacacaagacaggtatgtatgtggtcgatgatatggtttgtttttggtttgtttttttgtgcatgcaaagataccacaaaatgagtgtgctcgtgtcatgcagtatgaggaaaagaaggagtgagtttgatggtgaaaagcgaaagaggttgcaatagtatgggcaaaaaaaatcctcgacatagccgaggaaaagacgtaaagtctgcgaggcaaaacctcttattgtgataagaagtcaagcatggctcatttacatgtatggaaattaataagattttattgagtaacaagaaaaaaaatcgttaattgatagcaatgctttttcaatacatgtttttctgaattttatttttggagtatgcatcatggcaaaaatattaggtttagatattggaacaaattctgttgggtgggcactcatagacgatacgaatcagaccattattaactccggtgtgcgcatcttctccgaaggtgtgcaggaaattaacacagaaaaagaagcctcaaaaaatgctctacgcagaatggcacgacaggtgcgtaggcaaattgaacgcaagatgcgccgtagaaacacattgctcaatgctttgattgatcttcatcttttaccggaaaacgacaagcagcgcaaatcgtgttggtatcgtaatccctatgacttgcgaaagaaagcattgtcttcgcaactaactctgcatgaattcgggcgagctttgtaccacctgaacaagcgcagaggatttaaaagtaatcgtaagtcagattcgacttctcctgataccgatcaagatacaggtgttgttataaatggcattacgacgttgaaaaatgaaatacaagcaagcggtgcacgaactatgggcgaatactttgcttcattaaatcctcatgagaagcgtattcgcaatcgctacgcatcgcgcgatctttataaagaagagtttgaacttctttggacggagcagaagaaataccatgctaatattttaacagacaatgcaaaagaaagaattcacaaaatcatcttcaatcaacgtccactacgatcacaacgttctgcaattggattttgcacttttgagcaatcagccgatggtaaaatgggtaaacgtcgcgctgccatgagtagtttgttagcacaagaatgtagaatgctccaaacggtcaataatctacgtattctgggtggtaagcgtcaaacagaagaacaacaaatactaacagaagatgaaagagagaaattgattcgttacttggatgcgaacaaggttcttgaattcgtgagctatgaagatgtcctcaagaataataaaaaacgaggtacacttcgtaaaacaacatggtatgatatactgggtctttcaccggagatcgaatacaaatgcaacttcgataaagtattgggcaataagactaaggtagagtttatcgaaaagttgggtgctgaatttattgcatcacaagatgaagcacgattagaagagtatcatcatgttttgcgttatgctgatgacaatgtgtggttaatgtcctatgtgcagagcaaatgggatattactccggaacaagcagaacaatttgtgaaaattcgattagaagatggatatagtagtctctcgacgaaagcacttaaaaaaatagtgccttttttacgtgaaggatatcggtatgatcaagcatgtgagcaagccggctaccaccattcttacacacaacaagctgctttgcagaattccatcgggcgcataagcagtgtactgccatcattgcgtaatccgattgtcatggtagctttaacacaagtgcgacatgtcgtgaatgagctgattgaatactatggaaaacccgactgtatccgcattgaattggcacgccaactcaaaatgcccagagataagagaattgcaatggagaacgacaataagaaaagagaaaaattatacagtggctataggaatgagttgttaaaggagttcccgcaatggacaaaaattaccaaacaagatattgagcgatataccctgtggaaagagcaaaaagagatgtgtatctacaccggtgagcaaatcagtgttcaacgtctattcggacacgacattgatattgatcatatcctgccatatagccgaacattagatgattcatacatgaacaaagttgtatgtgtacgcaatgctaatgccacgaaaggaaatagtattacatacgaagcatttggaggtaatgctgaaaagtatgcgaatattcttgagcgtacaaaaggtcttcctcatcccaaagcggcacgctttaaaatcaaagatctgcgttcgcgtttgggtgagcttcccgaatatgaaggaaagattgcgcccaatgaagaaataggtggatttattcatcgtcaattgaccgatactgcctatatcgctcgtgaaacaaaaaagctgatggaaacgattcttccgcgcaaggatattcaagtatcgaatggtcaagcaaccgctctcatacggcacttgtggggcttaaactctattcttcacaatacacaagagtcaggaacaacacctgctctcaaaaatcgagaagatcatcggcatcatgcagttgatgcaatggtgattgccttgactacgccaggcatgctacgacaactctcgactcttcatgcacagaataaattattttatgcgtcctcaaaacgtaccgaagatgatactcttctgccatggaaaggatttcgtgatcacgctcaacagtcggttgcggctattcttgtttcgcacaaattctccggcaaagtacgtggcaagatgcacgaagaaacattttatggcaagatattcaaaccgagtgcaggtgcttcgcaccaagagcagtatgtcgtgcgtaaaagtctttcggcactcacagctacacaagttcttgctatcgttgatgataaagtacgtgctattgtgttgcagagattgcaggaatggggagtggatacatcaaaaggtaaatttacgatacctcgcaaagcattcgaagcacccctatacatgactgcctctgccggtaaagtagcaccgtgcattaagagtgtgcgtgtaggagttccatcgaataccatgaaactgctcaaatcaagagttcagcatcatggagaaacattgccatttgctgtatatgtcgagccgggaaacaatcatcattattcaatttttagatcaagaaaaggtaaaaaagatgtccagaccggtgaaataatgagtttagttgatgcctacggatggataaaagcgggtaatacacctattcgcaagatctataccaaagatccttctgcagagtttttatactctctgcaaaaaaatgaaatgttcttgtggggtgtacatcccgataccttagaattcgaagtgggtaagaagcacaaaattgtcaaaaaggaattgtacccattgttacagaggcaactgtaccgcatacaaaagatatcacaaggaaaaattgattttcgattgcacttgttgtcgggtagtgacgatgttgaggtagagtcagattcggaatctaatacatatcagatgacaaaaggtccatcgcttgtgcaaggatgtaaggtggtcatttcacccgcaggatttttacgattgacgtaagtaccctacaaaagtatgggtaagaactgggtcatattgataaacatggtgaatatatggctaatcgcattattgtggtttcttcatcggcatattgcagtacaaaagataatcaacttgttcttgctctgaaagacaagaatgaagagcatcgtgtgccgcttgaagatattggattgatcgaacttgatcatccaagtattacactgacaaccggcttaatgagtgcttgcgcagaatatggtgttgctattatttcgaccggtagtaatcatcatccgaacagtattacgcttcctttgtacggcaatcagcttcatacggaacgcttacgtgcacaagtagggtgttctgtgccacaacaaaaacgcgcatggaaggaacttatcgaacataaaattgataatcagattcgtctgctttcttggtatggtggcgatacgaaatcaatgaggcgattattgaataaagtacgctcaggcgaccctgacaatattgaagcacagactgctcaaatctattggaagcaattattttgccacgagaggttttctgtacttccatatcgtttcagtccaagagtatcagatagtgctgatagtgaagcggatacgcatcaccatcttgatggatattttcgtcgtgcccgtgacggcaagtatccgaatcagttactgaattatggttacagtattcttcgagcacttgttgcacggggtattgtgcaggcaggattacatccggcattgggtattcattatcatcatcgaaataatcccttttgtcttgctgacgacctcatggagccatatcgtccttttgttgataccattgtttgccacatcattcaagaatatgcatttgatacaatgttgatgccggagctcaaaaggaaattgctggcagtatctgttgccgatacacacatgggtgatgttcggcgaccactcattacggctgttgaaatgacttgtgcatcactgtggcagtattatgcacaagagcgtacatcattggctctgccgacactttgccttgcagagaaatagtcctaagtactacaattttgactcgatctattttcgaagaatcagcatagattgtatggataacccggaagtgttattagagaaatcttcatcaagaaaatcttcaacaaacaaacgaaagccacgtagcgacagtgctatggcagaacgttttaatgcgtatcgaattatgtggttatttgtgttttttgacttaccgagtgtaactaagaaggaaaaaaaagagtatcaaaaattccacaagtttctcttgaaagatggattttctatgtttcaatattcggtgtattatcgcttttgtggttcgctcgaaagcagtgaggcatatactcgcagggtagaagacagtctgccgaaacttggcaaagtcagtatcatgcgtgttacagataaacagtttggcatgattaaaaacttttgggggcagaagccaagagcttcagaatctccaccggcacaagtagaaatgttctaaaaaagtcaggtttgtgacagaccatagacctgactttttcagttttttacacgtacagcatgacctaagtcgttgttttgtttgatttgtggaaagtataatgtaaatgagccatacttgaaatcaaaccacaacacaaagctatcagcgcagtatagtatgaacatgataaggaagcaaaaacttgataacaacgttctgcaacaacactacaaaagatcatacaacaagcgataagatgttgtgctcacaatccgcactacatgttttcactgaaacttctatctttgcggtcttgattcttcgctctaagcgaagcatattgtttcattgttgtttcttcccgcgtatggaacgtttcaccggactcatcggtattgttgtgatccttgttttggcgtatgccatgtcgagcaatcgcaaagccatcaatatccgcttagtggtcagcggattgctgttgcaatttggtttggcactctttgttttaaaaacaccggtggggcaggcagtatttcaaagtgtcggcagtggtatttcgcatttgttggaattctccggcaagggtgctgagtttgtgtttggtctgctcaccaaaaaagaagatctcgatcgtgtatttggtcttggctcatcattcatctttgcagtgcaggttgtaccgacgatcatccttgttgcggtactcgtcaatatcctctatcatcttggcattatgcagagagtggtgtcagtcattgcacgcggcatctatgcgattatgccggtgagtggtgccgaagcactctcgaatgtctccagtgcttttgttggtcaagttgaagcccaattgatgattaaaccttatttagccaacatgacgaaatcagaaattcttgcgtccatggctgggagttttgcctgtatttcgggtggtgtcatggcagtctatatttcgctgggtgtacctgcaccatatttgctggcggcgagtgttatggcggctccgggagcacttgtcattgcaaaaattgttatgcctgaaacagaagaatcgcaaactaagggtgctgttaaagttgaagtcaaacaacaatacgccaacctgaccgatgctatttcacatggtgcaagcgatggctttaaagtgtcgatgaatgtgattgccatgctcattggttttattgcactcatcgctcttgttgatgcaatgcttggcggtatcggttactatgtgcatacatggacggggtggatgccttttggttttgattttcgcacactgagtatgcgtactgtcttgggtggattcttctcgatttttgcattggtcatgggtgtgccaacccatgaaattcaacaggttggcgcattgctcggaacaaagattgtcgtcaatgaatttgttgcctataccgatatgtcgaaactccttgcatccaatgcattgtcgcccaaagcagtcatgattgcaagttttgcactatgcggtttcgcgaacttttcatcggtgggcattcaggtcggaggtattggtgaaatcgctccttcgcgccgctcggagatttcacaacttgccttcaaagcactgatttgcggtacgctggcatcctatctctcggcaacgattgcaggactactgatgtaattcttttcttcgtgtgcagatgaattaacttgttataccttttcattttttacgttatacacaatgccaacaacattgaaacaagcaaagaaaccgattgccaaagctaagggaaaagcaacagcaaaaacggtatcgaaatcatcgatggatacgctgaaaagttttgctgtgaagtcaggggaagcagaacaagccattgattggatcgaagttgcacgacttcttttgacctcgcgtttgattgataccatcgaagaaacagagcttgttccggcaggaaaaattacttatcaattttcttccaaaggtcatgagttagcacagattctcatgggattgcatacacgcaatggtcatgatggtgcggcagtgtattaccgctcacgtccatttatgctggcggcgggtatgacgattcgcgaagcatttgccggtccgatgggcttatccaccagtcgcaatggtggacgtgatattggcgtggtgcacaatatgcctcctcgcaaaggtgttaccattctccctgcaagtggcgatgtaggcgcacaatatactccggcagtgggctgggcacaggcgattacatatcgtgctagcgttttgcatgatgaggcgtggagcaaaagtatcggtatcgccatgggtggtgatggttccgtcgcaaccaatggtttttggtcggcattgacgattgcgacaacattgtcgttaccgtatatcgctatgattgaagataatggctttggcatttcggtacagtctgagttgcaaacaccaaagggaaatattgcgaataatcttcgtgcgtttcgcaatctgtatatcctcgatgctgatggtaccaatcctgaagaagcacttttagcaatttcacaggcagtacaatttgcacgaagcaaacgcagacctgccttgatacggcttgctgtaccacgtttgtgtgggcattcaggtgcagacaatcaagcctataaaactcctgcacaagtgcaatccgagcaagagcgcgatcctgtacaccgcgtacgaacatttctcattgagaaaaaaattctctcagcaaaagaatggagtagtttagagcaagaggttgaaactaccgtgcgcaaggaacttgctactgctctgcgcgacacagaagcacccgctgacagtgcgcataagtatgtttttcatgacatgacaaaaattcaaaaggtcggtggtgttcgtgctgagaatatcatgccaccgatggggagtattgttgctgaaaacggacagagaatcaatttgattgaagcggtacgccgtgtccttgatgaagaactttctatcaataatcgcatgatgatttttggtgaagatgttgccgttaagggtggtgttcatggtgcaacggtcggcttgcaagcaaagcatggtcatgatcgtgtcttcgatacatcgctgtcggaagagggtattatcggtcgtgctatcggtatggcactcgccggattaatgcctgtaccggaaattcaattccgcaaatatcttgatcctgcgactgagcaaatcaatgattgcggtacgattcggtggcgaacaaatggggaattcgccgctcctatggttgtacgtattcccgtgggcaatggtaagaaaacggcagatccttggcactctgtcagtaatgaagccattcttgcacatacacttggttggcgaattgcgatgccttcaaatgcacgcgatgccgcaggtcttctacgttctgctttacgcggcaatgatccgaccttttttctagaacatcgtgccttactcgatacatcggcagggcggtcagaatatccgggtgcggagtatattcttccctttggtgttgccaatattgtacgaacaggttctcaagcgacgattgttacatggggtgaaatggtgcatcgttcgcttgaagccgtagagcaaagtggtttggatatcgaagtaattgacttacgaacaattgccccttgggataaagacactgtgttgaaatccattcgcaagacagcgcgtgtgtgcattgtgcatgaagataccttcacagccggctttggtgctgaaattgcagcaaccattgctcaggaagcatttagtagtttggatgctccggtacaacgtcttgccacaaaggattgcccgatgccatacaatccgacactcacacaagcggtcgtaccacaggtcgctgatattgcgcaaacattacagcacctagtttcatggtaatagtaccgtatgagccggtgttgaagtaaaacaaagccccgaacagtgaaaacttttcggggctttttttatgtgaatccggcatttgttactcgccgtcatcatcagtgttttgaacatccatatcaggatcataattactttcagcggggacatcatcgccaccgcgtctgcgccttggttgtgtcaattcaaacgatgaagacgtggttgtaccattagaacttacctcaacggtgtatttaccaactgggaggtagtattttccgttctatgcggctttgggagaggcaggttgagcgggagcctcttagatgtctttggatttaacgggtccttt

SEQ ID NO: 4277 - DNA, 23210 bp, synthetic construct
  misc_feature 1..23210: note = Synthetic
  source 1..23210: mol_type = other DNA
atgggcgtcgccggcgacgatgggctgtgtgccgcataatcgcgatctgatcgaagcgatgctggcttatgacctgatcggtttccagaccgaggaggacaggtcaaacttcctgtcctatgtcaaagccgaactcggcttcgtcgtcaccgacggcgtcgtcacgacggcgcgcggcatcgcgcgatgcgaagtgtttccgatcggcattgacgccgatctttttgcgcaacaggcgcaaaaggcgacagcgcatcccgatgtctcccggctgcgcaagagcctcaacggcgagaagctggtgatcggcgtcgaccggctggattattccaagggcctgatcaaccgcatcaatgcgttcgatcgcctgctgacgacgcggccgtcctggcagcgaaccgtttcgctgctgcagatcgcaacgccgtcgcgcggcgcgatcgaggcctatggcaatctgcagggcgaactcgccaggctcgtcagcgacgtcaacggccggctcggcgaggccgactggacgccgatccgctatctcaacaagggttttcgccagggcgtgctggcggggctgtatcggaccgcgcaggtcggcctggtgacgccactgcaggacggcatgaatctggtggcgaaggaatatgtcgccgcgcagaacccgatcgatccgggcgtgctggtgctgtcgaaattcgccggcgcggctcaggagctcgacaccgcgctgctggtcaatccgcacgacgtcgaagggatggcgcgggcgatcgacaccgcgctgtcgatgccggtgaccgagcggcgactgcgctgggaggcgatgatggccaagctgcggcgcggcagcgtacaagcctggttctcggatttcgtgacgtcgctggaaagcgccaatgacgccaacagcgaggccgtcggcgcgatcgccagcacagcgccggcgctgaagatggccggcggctggtcgcgacgctcgccggtggcgttcagcggagcgatcctgcgataggctgaccggggcaacgatgatcggggcaacgccccggaggccggagcacattgtccgccgatccgccggacctcgtccgccggtgcctttgcgtcttgcgaccagcccgcagagccccgccgcgcccgcagcccgcatcgcgaggcttttccggccatgcgcggcctatgaacagcccatcaaaccaataattgaggtgaaatcccccggccgctcacgcgatcccttgcaaaaaccgcccggggcggtcatgagagggcgcccggagagatggccgagtggcttaaggcgcacgcttggaaagcgtgtgtgcgggaaaccgtaccgtgggttcgaatcccactctctccgccagtctccatgaagtccaatttgttgttataaaacaaggacttcgtgatgagcaagaaatctgcaaccacacccgccaaccacacccgcaataagcgacagcttgcagccctagccaccctcctggggctcatgcagaccgctgcaaagctcagcagcgaactcgacgccttggccaacgaggttggagggtcactggagcagatcgccgaaacggctggcgtgcccttctttgaggtccaccaagcctattcagggctgcgaccacccgcacggaagccccgcaagaccaaacgagccactgcgcggacctgagggccctgagggtcatcagtccgccatcgcttcgccgtcagatatccgcgaaggaccagggggcctcatggttttgccatgggcctttcccttgtgcgccagcgatcgtttgagtgtaatagaggtgacacgacgggaacgaggccgcttggggtggttgttagacaaaaaccgatgggtcactcgtcttgagcagccccaccggccaagtctatcccaccagcctcttaggcggcttggtgcttcacgaggtagctcttagcgccccgtcctttgcccgaaacgtattccacgttgatgctccataggccctcagaaagggcgctactgggctcgttaagcttctctctgatcttcttgagggagccctgatcgatgtcgagtgctctcaataccttcgttatcggctccctgccgggcaaccgggccgccatataggcaatgatagcctcgtgtttcgatcccttgcgaggcttccggaccttcgggccgtctatcgagaaatcccaatcagcaagcctcagccccggcagatcggctcggatgtcttgcagaacctcatcaccctcttggccctttggaagcacgatgaaaacatccgagggagggcaattgccgtgctcgtcaatagcgcaccgcagccgaatacgcccgattgcctgaatgatcgacacggacaactgccgctgcctcatgactcggcgaacgtcgagataggtcttccactgagggtcatcgaaccaatcgtcacctttaaagccctgcagagcgaagaaggtgttgttgagtgacacctgatccctgtacggcatgccgaagatcactgctgtatcgaaatccttccattcgttgctgccgtccaccttgccccaatgccctatggagaaccttgagaaggctggtgcgtagtcctcagcaagaggccgattgtctttgtgcacgcatacgaacacggacctatcgggtggcaggcggctttcaagatcatcgatcaatcgagggaagcgcttgctgaagtttgccttcatggtccgcttcccgacgccagaggagcgcgcgacatgcagggtcacgttgctgtagttgcggacgcggcttggcgtctcgatccgcagtgcccgaccaccgaacaagtcccaaaggaagtccgctcgtgctgttgcgtcaaggacgacagggccgggagcgtccagaggcactacaagcgccgatgagtgcaaagcgtgctcgttgccgttcttggcatagtaggcccattggtccaggagcgcctgtgcgtgctccagcgtctcgtctaccttcttaccaattcgatgtctcgtgatcgtgctatcttccaatgccccaagacgatcaaacgccaccccctttaggcccctccgaagcaaaccgaagtccaccggtggggcaactccagcctgtttgacaccttcagaccacaagccgcgagcaaacacaccgtcggtatcggacgccagtgcacacttatctgcctcgtgctttagcaaacggagagcatcgcactcggtccggtggtctcgctccatctctggcgtgacgtagctcagcacttgagcaatatcgctggaggtgactttgaagctcgtgaccacgtttgccagtgcctcgtcaacgatggtcagaaggcgcatgccccccttccatgtcgttagcctctcccaacggtcaccgcccgcctgagaggcgttgagataggcttggtgggtaatgacgatggtgtcatgatctgcaagagcctcttgcggcttgggatcatcggaatgatgagctatcgcgacggcacgtccagcatgatcattgatcttggcggcaatcccctcagcgtcctctatcagcctcgtaactatcgcgatacctacgggctccagaacgccttcagaaactctgttgcgctctgcctgcatggcagcgaacaggcatgcccccgtggtctttcccgaccccgtagcaggctgaaggatgcgccaaggaccgttgacactgttggctgtgtcacagatagcatcattgaaagtctcagccatagtgctccataggcgctcaagagggcctgaggagcagagggcatgattgttagtccagagttccgtcattcgcttagagaactcttgcggcggcacgaaagcatagagatgcccgtgcagacccttggtggtttgcattgattgaccgttgaggttgtctttgaggatgccgtgctgtgtcagaacgctctttgcgcgacgtgacggcagggaaatgcacccccaaaatcccctatagaggatcttcttaggggctttgaggggtgcctttattgatcataaccagttcggcttcaggggccgttgcggactctatagagccgtcttgagccgttcggctccccaaccagcctcaaggcgggaaagcgcgtctgtggcctcccaaggagtcctgagggcaccctaaacaatcaccattgatcatgatcgtaggtgcccgtcaggatgatcgtagagaagcattggtgccacacccggagcgggtccagcgtgcctcggcaccgaccgcgacacctacgtcatacttcctaggctgaaggcgtcaggccttaatgcaggttagcactgtggcgctctccggtcgcgtctcattaccgcctgtctcgagaactgtgatgttgtgactgtggtttccctgggcttcagttgtcccgctaaaggcgtggccgtgattgatatcagcagcatttgtttctgtacgggtgccaagttggttgtcataaccaaagcccgcaagcatagaattgccggtgccactaagagcgctcatgccgtggctatggggattgttggcattcatccctcctgtcgtcccactgaagctgtgagcgtgtcccccttgagcttcggcgtgcgcagtgtgcgcgtgggagccgagttggctactttgaagattaccaacttcgcctgagacagaagcgctatcgcggtggcgtcggtatctattgatcagcggcgggactcgaaactgccaaccagagccgccccatagatagccaatggcggcgaacaaatcagggtggtcggccgtactcaccaactggccatcgcaggcaagccagccgtcaggtgcggcaggcagtgcgaagtccatgatggctccaggtggaacggtgcctcgcaaggagcctccggcgacgccaatgaggcccgctttgatcctatagaaaccaagtgttccttcgctgttgaagctatagctcggacctttagcgcttccgtcagcagccagccagcctaccgtgccgcccatggctctcgtgagggccgttgaggctccagggaaggtgttcttgagggtgaacttgatcccacggatgtggtcgtcaccgttgacgatgccatcgttaacgcccgggttggccgtttcgaggctgtcaaggtagctgaaagtctctaccggcactttgcgcacctcgttggggtggtcatgcggagtgaagtgtgaagcgtagttccgtaatggtctcggaaaatgatgttagctcgctgttgttgattttaggatgttgagaagggtggtctgaggctaagtgtaggaaaatggggaagtgctcagacttggatcgttgatgaagtccgtgacgttgtagggaccaagccgaaagccgtagtgaagtcgtcaaacgatatgccgtctctgatcacggtgcaggcagatggtgccctctgtcgtctttgcaggcgtcgaagatcggcaggaactctcttaggcgctcgtggcgctcggtcgtgtcgtcgtgtctcctcttgagggtttgggagcgcctttcccttatggcagtctagaaaacccctaacccattgagtccttgagcaaagaccctcgttttggccctttagctgctacgttcgactctgtgaaagttgcacggtccagaccgcctcttgtgtataggtagtgcaataaaaccgtaagctacggatttttcgccgcttctgttggttttggtggtccagaggatcggaagggacccgagccaacacatagcgatttcgtctaacaacaacggcgactttaggcctcgttttcgaaatccatttccagagaagcccgtcaaatcggggagcgccgggggaccctatggcgcttgcggactcgcgctcactggcgaagaagccaagccaagagcgaagcgccgcgtgcgtgctgagggcctagcgatttctcaatgaggattggaatttcgggcgatagttttcaggcattggtcggtctgagaagcgcccttcccttataggggtaggagaaagcgcgtaacccactgtagtccaagggagatagacgaattctaggccttaagaggcctggtgccctctcacatgcaaagtgccccgatccaaagagccaaagagccaagcatgaaccgctctgatcctgataggacggcgagaatgaatattgatgttgtgacttggacgagcacgggcgttctccttacgggcggactctaggcggctttgggaaggcgattgagcaggcgcgcaacggctgttgggtgccactgcccgcctcgtggcgcattgatgccttgccggttaagttcgtcggtgatggcgcgcacgctggtgatgccggaacgcctgaagccatcaatgagcccctgtaggtcgatagcgcgctgtgcggccttctgcttgatcctggcgaccgcctcagcattgccagtctgcttgcccctgagcgcacgagcgccgttggggttgcccagcttcacgccacgggcctttgcagccgctagggccttcttggtgcgctcgccaatcagccctgcttcaagctccgcgacggcggccatctgtgtcagcaaaaacttgcccatggggccgggaggcacactcggcaggtcacaaaacacaaggtctacgtcgctcgccaccagggagcgcaggaggtccacgttcctcgtgaggcggtccagcttagcgaagaccagcttggccccaatggctttggcgtgggagagcgcagcggccagcttggcacggtcggacttccgcccgctctcagtctcgacgtactcggcaacgagggtccagcggccaccattgagatagctggccacggcttcacgctgcgcttcgatcccaaggccgctcctgccctgtttatcggtcgagacgcgcaaataagagacgaactttccagaggccaagacaatattcctgcttacacgtttccttctatcggacgttacgtgaatttgtgtacatggctcaatgcacattttggaatcgcagggattccgttttgcatggcttcagggagcgggaatgggcatcttgtgaagcggaatgaatagggggggtgagatgttcaagtacgggttgctgttcgtcgctgcaggggtcctgagctacaacgatgtgtcgccggtcgtgagcgccgtgatgctgacgttgatcgcgcttggcgcggtggacgatcttggcaagaagctcagaggggccgaaaaggcgattggtccggtggaccgaatgacgcaggagcttagtgacatcaaaagagaactgagcgatgtgcagaaggagcttgtgcagggcagcaaggcagcggcgcgtctggagtggttattgagcaacaggatcgaagcctccgaagcgcaacagttggctgaagacgtggcctcagcgttgtgccgtttggacagcctggaggctgaaataggccttaggcggacgcactcgatggcttcataggagcgcggtgcaatgatgtttgctcagccgtcattcctgtagttcaactgcaacagtaatcattagggcaaactacgaagctgtgcgaccttgaagcattcgaaactctagcaagggcgctcgaccttcgatgaatgacaagaaatttaagtataacccgttcgtcacggaggtcatgacggcacgcgaggtgcatttgaccgaacccgacaccgagggcgaatacgcggacggcaagtataagaccgaggcgactgcctgtaaggaatacacagagcgcttgaaggccgaaatccaagcggtcgcagacacccacttcgcgcgcaagaagaacgtgcacctgccttggtggaagaccaaggaaggggtcatcgcgttcaagttcaaatctccgaggaaacagccaaagctgactgacgcgaagggcaggttgctcaatgctggcacggtcatccgtgggggcactcaactccgtatcgctggcgttatcgcggcatgggagaagggtgagaagcggggcgttagcctctttccggacgccgtgcgtgtcatcaaactctctgaagacttcgacccttgcgcggcctttggtccacctgaggacggctttgacggaagcgcgcgcgcgcgcaatgatgacggcacccgttctcgtcaagcgccaagagacccctagggtgatgctagagccttcataacgtcaggtccgtagtccaccttttcgatcaccttgcgcaagttcatgcgctggcctgtcgagtaaacgccgtaggtgaaaccgcgttcatgaccgatgatcaactgcacggtgctctcggggacttcaaggctctccatgaggtcggcaaacgtcttgcgaagggcgtggaaatcttcgaagggggcagagacgccaacctgtttccgaaagcggccataagccttgctgacgttccatgaccgcttgaggtccggaccacccggcaccaatcccgcgaacaggtattcgtcagcgccagccaaacgacgctggattatcgggacggcaagtgtgtgaaccgggatttgccgaatggcggcctctgtcttgccttccgtgatggagaaccagtatccgtctttcaacttctcaacgtccgccttcttgagggcgcatagctcatccaggcgcgtgccatggagaagcgcgagcctcgtgaggtcggaaaggacgttcgcatagcgcggtgtcttgtagcggcctttgagaagcttcaggagcttgtcgttggtcagtcctttccgaacggctttccgtttggacccgctcgacctcttgccaaccccatgccctcgccatggattgtcccgttcggatgggtcagtgaggcccttgctcatcagccatgaccatagcgaggccagcgtggacaggtggcgttggatcgttttggacgatagcccatcgtctcgcaggagttgaacgtattcgcctgccttccgcctgtcggtgccttggatcgacatgtattcgccagcccaagcgagatagcgcttgatggttgacttgtgctgagccttggtctgctcggtgccgttacagatcgtgagccacgttgggtattggtcccgaatgagggtggccttgccagtcgcaagactgcgaaacagccgcgcagcctctgggccttccgtctccagaagggcctccgcctcacggttcaccacagccaaaagttcggacgctgccgtgctctcctggtcgccatgctccagataatcgttgtcggcggaagcgaaggcctctcgaaaggcgaaggcagcctgcatagcggcggcgcgcgggtctgcttggcccttctcggccaatttgatccggcgtttaaactcggcaacatgctgatgcttgagccggttggcgtcggtcaggctctcagtgcccagcgacttgatgaagcgcggcttgccttccaaagccgggcggagcggcttgggtatctcgaccacaacacgccacgtgttgcccttcttctgtagatatttggtgtccgccatccaaccaaaccacacccgaaaaccacaccttgctatcctcagaggctctgataaacaaggattaattggtctttaggtgcttgtgggggaggttcccactctctccgccagttgtccaaaaatgtgctttgaactcagcactttccaatgggttctccggcgacccatccttcttgcaggcttgtccgccacttaagaagaggcgcggggaaggcttctgattttggaagcatcgcgacgcgatcttggaaaatttgcggtggaaatgcaccccgcgtgaacaatctccggggcttacgaatgtcgttcctgaggcagatctgctggcaaccttgagtgcttgaatggtatcgggcgagaacgagattcttcgcaccgacaagccctgtcaccattggtagtgaatccccccgttgcgtctccgcaacgggggtaatccgtcgcaacgaaaaccaaggtttccgttgcttgccgtggctttcctaccgatttcccaccccatgattgctgaattgcgcaggacggtcaataatcaatttctggttgtgcgtgcttttcaggtggcgtgatgagtgagtgtgttgctcggcgaattcttggaattgacctcggtattgcatcttgcggatggggggtcatcgaggttggcgaggctagcggaagtatcattgcctccggcgttcggtgcttcgacgcgccattgatcgacaagaccggtgagccgaagagcgcgacgcggcgcacagcgcgggggcagcggcgaattattcgccgccgtcggcagcgcatgaacgccgtccggcgcctgcttgctgaatttggtgtgcttacggggcggtcaccggatgccctacatcaggcactgctcagaatctcgcaaagcgttgcgggatcacaagtcacgccgtggacgcttcgcgcggccgcgcatgagcgtaagttgaccaatgacgaattggcagttgttctcggtcatatcgcccggcaccgcggcttccgctcgaactccaagaacgatggcggcgcgaatgccgcggacgaaacgtccaagatgaaaaaagcgatggagaccacgcgcgaaggtctcgcgagatatcattcgttcggcgccatgatcgccagcgatccgaaattcgccgatcgaaagcgcaaccgtgacaaggactattcacacacagcgaagcgctccgatctggaagacgaggttcgcacgatttttcggtcgcaaacccggttcggcagcttggttgccagtgaaaaactgtcgcaggcgtttgcggatgcggcgttcttccagcgtccgctgcaggacagcgaagacatggtgggttcttgcccgttcgagccgggacagaagcggaccgcacgccgcgcaccttcatttgagttgttccgtttcctctcccgtctggccaatctcaaactgaccgtcggcagagcgccggaacggcggctgacgccggatgaaattgcactggccgccaaaggcttcggcgagaccaagaagagcattacgttcaaatcgttgcgcgaggcgctcgatctcgatccgaacgcgcgcttttccggcgtcgcgaaggagaaggagagtacgctcgatgtcgccgcgcgcaccgggggtgccgcctacggaaccaagacgctaaaggatgcgctgggcgatgcgccgtggcgatcgttatcgcgagtgcctgaaaaactcgatcgcatcgcagagatactgtcattccgcgaggacatgaaagcgatccggaacggacttgaagaaatcgggctcgatggccttgttgtcgatgccctcatgcaggccacggccaacggtgatttcaaggactttacgcgggccgcgcacatctcggcgctggcggcgcggaatatcattcccggattgcgcgaagggctggtctattcggacgcctgcacgcgcgttggttacgatcatgccgctcggctcgcggtccccctcagtcagatcggcagcccggtgacccgaaaggcgctgagcgaggcgctcaagcaagtgagggccgtggtgcgtgaatatggtccgatcgattactttcatatcgaacttgcacgctccgtcggcaaaagtgccgaggagcgcaagaagctgacggacggcatcgaagcgaggaatgtcgagaaggagaagcggcgaaaggaggccgcggaacaccttggccgcgcgccgagcgacgatgaactgttgcgatacgaactcgccaaggaacagaacttcaaatgcatctattccggtgatccgatcgacccggcaggcatctcggcgaacgacacacgctatcaggtcgatcacattctgccatggagccgcttcggcgacgattcctatgtgaacaagacgctctgcaccgccagatcgaatcagaataagcgtggccgaacgccgttcgaatggttcgatgccgacaagaccgaagctgaatggatggagtattcagcccgcgtcgaggacctcaaggaggtcaagggacgcaagaaacggaactacagcatcaaggatgcggcgagcgtcgaggataagttcaaggcgcgcaatctcaccgacacgcaatgggcgacccggttgctcgccgacgaactcaagcggatgtttccaccgcgggagtgcgagcgggtggtgactgtccgagcggacggcggcaacgatggtctatcgatcgtggaggagcgccgggtgttcacgcgccccggagctatcacgtcaaagctacggcgcgcatggggactcgagggactcaagaagcaggatggaaagcgcatcgaggatgaccggcaccacgccgtggacgcgctggtgctggccgccacgaccgagagcttaatgaatcgtctgacggtcgaagtccagaaacgcgaacgcgagggacggccggacgacatcttccattgcagccagccgtggccgggttttcgggccgacgtgcaacgcacggtctatggctccgagaccatgccgggcgttttggtctcgcgcgccgaacgtcgccgcgcccgcggcaaggcgcatgacgcaacagttcgacaagtccggggagatgacggcaaaaagcgcttcaacacgcaacctcacgagatcgccggagggaagatcgtttacgagcgaaaagacgtttttgacaagaatttcaaggaaagcgatctcgaaaaaattccgtatcctgagccctatggaaaggttgctgatccgaagaagatgcgtgacgaaatggtcgagaatttgcgcgagtggatcagaaaaggaaagccgaaagacaatccgccgcgctcgatgcgtggcgacgtaattcgaaaggtgcggatcgcgaccgacaagaaggttgcatttgaactaaacggtgggaccgtcgatcgcggtaatatggcgcgggtcgatgtgttccgaaagaagaacaagaagggtgcatgggaattctatgtcactccgatatatccgcatcagattgtctcactggaacgtccaccaaatctggcggtgaaaggtggcggcggagaggagtcggactggtatccgctcggcggtgaagctgagtttctgtggtcgttacatgccatgagtctggtcgaattagtcaattctggcggagaggtgattgagggctatttccgtagccttgatcgcaatacggcggcgatcacggtctcacctcaaacgacgaatgcgattattcgcaaaggcatcggcgtcaagacgctgtccagttttcgcaagttcaccatcgaccgtctcggacgaaaatttgaaatccagcgttaggtgcgtacatggcgtggcgaggcctgcacctgacgcaggcggcgcgattgtcgctcgccgacagtcaggtttgcgtcaagcaggacgccggcgaagtccggctcgcgctggaggacatcgcctggatcgtgatcgacacgccgcaggccacgctgacgagcgcgctgatgagcgcgtgcatggagacgggcatcgtgctggtcttcaccgacgagcgccacatcccgtccggcatggccttgccgtttcatcgtcaccaccgacaaggcggaatcgcaagacttcagatggatgcgaaggacggcgtgaagaagcggctgtggcaggccattgttcgccgcaagattctcaatcaggccagttcgctcgcggttcttgaccgcaacaatgcggagactctcagggaaattgcccgccatgtcgaaccgggagatcccgagaatgtcgaggcgcgcgcggcgcggttctattgggggcgtctttttgaagatttcgtgcgcgacgacgatggcgatcttcgcaacaagatgttgaattacgggtatgccgtggtacgcgccggcgtcgcccgtgcgctggtcgcctcgggatttctcccggcgttcggcctcaagcacgatggcgcggccaatgccttcaatctggcggacgatctggtcgagccgttccggccgtttgtcgatgtcctcgcgtggaagactctcggcgatcgcgtcgacaggaaaggcgatctcacactcgaagatcgtcgcgcgatggccggcgtacttctcctcaacggcaaggtcggcgcagggagcgtgtcgcttctagtcgcagcggaaatggccgcagccagtctctgtcgtgccctggagtttgaaaagccggcatttcttgagttgcctgaattggagcgcgattcgtgaaaagcgaggaggtgcgtttcgtgtggatgtttgtctttttcgatttgcctgtcggcacgaagtcagatcgccgcaacgcgacccgcttcaggaaattcctcaaggacgatggatttatgatgctgcaatggtcggtgtattcacgcgtttgtcgtggcgacgatgcggcggaaaaacatgggcaacgggtgacgaaaaacttgccgccgcgcggaagtgttcgtacccttcaggtcacggatcgtcagtacgcgcgtatgaggctgttacttggggaagcgaccttcaatgagaaaaaagcacctcaacaattggttctgctctgatttccgcctgtcgaatcacgcggaaatcagagcagtttcagccgcttgtttcactcgcagcctaccacggggaaatcggtagggaagccacggctgcgccaggcgctgcagattgccgctcaacagcctaccacggggaaatcggtagggaagccacggcgcaatgacggtcgacggcgccgtcgcgccaagcctaccacggggaaatcggtagggaagccacggccctgtttaggcgcgagcgcaggcgccgccgagcctaccacggggaaatcggtagggaagccacggcccagacctgtgtcgtgctcgctggagcgttagcctaccacggggaaatcggtagggaagccacggcgttcgcgcacaacacaagtgcaatcgctagagcctaccacggggaaatcggtagggaagccacggccagatgatcgagcagcgcgtcgaaaaagccagcctaccacggggaaatcggtagggaagccacggcacagcctcgacgaactcctcgcgatggccgagcctaccacggggaaatcggtagggaagccacggcacattgcatggcagacccgagcaagtccgcagcctaccacggggaaatcggtagggaagccacggccgatcaccaatctcgccaacggccgcagcaagcctaccacggggaaatcggtagggaagccacggcgcaatggggactgcagcggatcgtcgcgaaagcctaccacggggaaatcggtagggaagccacggcggccctacacgacggcgcctgatccggcgaagcctaccacggggaaatcggtagggaagccacggctgatcggccaatacgcggtcgcgctcggcgagcctaccacggggaaatcggtagggaagccacggccttctgcatgtggtggatgtgatgcttgcgagcctaccacggggaaatcggtagggaagccacggctttcggcgacgagtcgtgcattcgccatcaagcctaccacggggaaatcggtagggaagccacggcagacaacgcggcgacgcctaacgtggtggtagcctaccacggggaaatcggtagggaagccacggcgcgcgatggcggcgctcggcgacgccatccagcctaccacggggaaatcggtagggaagccacggccgacttgctctggtcgatcttcgagatcgaagcctaccacgggaaatcggtaggatgcccggccgatgttcaggcgttagcaacaaatgatggctgcgtgcttgcttcctgaagcgtctccgcctgctgggcagcaccgttgctggggttgttgaggcgggggaggacggccgagaccactcggatggatgagcatccagcccccggaaacccccacccacccccgattgacaaaacgtcagtcgatgctatcaaaatggcaacggtattttggggagagtgaacgtgcgaggggttggcgtgtcggcgatgactgatttcgatatccatgccctgatcgagccgaaatcgatcgcaatggtcggtgtgtctcctggtgcaccgaattcatgggggttccgcaccatgcgggtgctggccgagggcggctataccggcgcgctttacgccgtgcatccgaccaaaaccgttcccggtttcgagaccgttcgctcgcttcgcgacaagccggcgcccgatctggtcgcggtctgcgtgcgcgccgagcaggccgtcgatgtggtccgcgaggcgcgggagatcggcgccaaggccgcgatcgttttcgcgtcgaattttgccgaaatcggcgaggatggcgtccgcctgcagcgtgagctgatcgaggccgccggcgacatgccgtttctcgggccgaattgtctcggcttttccaatcgcaccgcgtcggtgaagatgtcggtggcgccgtttctcaatcggccgttgctgccgcccggtcccgttgcgctggtggcgcaatccggcgcgctcggcctcgtccttgcgcaatgcgtggaggaaagcggcgtcggctattcgcacttcatcagcgtcggcaatgaatgcgtggtgacggcgtcgatgctggcgcggcagctcgtcgagcgcgacgatgtcgggatcgtcttcatctatctcgagacgctgcgcgacccgcaggtgctggcggaagccgccgcgcgcgcccatgcgctcggcaagcggatcatcgtgttgaaggccggcgcctccgacgcgggccggcgcgcggcgctgtcgcacaccgcggcgattgcgggcaacgacacgctgttcggggcgcttgcgcgcgacatgggcatcgtcagcattcgcgacgacgaaggcgttcagcccgtgctggccgcgctccggcgcgactgggtcatgccgccgaagccgcgggtcgcgatcctcagcaattcgggcggcgcgggcgcgctgctggccgaccggctggtggcggaaggtgcgcgcgtcgaggcgttttccgagccgttgcggcaggcgatccgccagaccgggctggtcgaggccggcgatcaaaatccgctcgacatcggcggcggttgggaagcgttgctggatcgcgtcgagccgtgtctcgaagttctcgaccacgccgaagaggtcgacgccgtcgtcgtctactatgcgttcggcgatatcatcggcgcgaaggtcgcgccgatcgccgactattgcgcggcgatgtcgaagccggcggtgttcgtctggcaggccgcgccgtcggaattctatgccagcgtcacggcgcgcgacgttctcaccgggacgatcggcggcggggtgcgcgcggtcgtcgcgcagatggctctggcctccgccggcgaggtcgcgtggcagcgccgcgatgtcgccgccgtggcgttgccggtggtgcaggcgggccagtccaccatcgccgagctcgacgcgggcgccgtcctgcgaaagctcgggatcggcgtcgtcgatgcggtcgtgtccgcgcgcggacaggctgccgcggcaatcgccgaagtcggcgccaagggatggacgcgctgcgtcgtcaagggcaacgccgccgacgtcctgcatcgcaaccgtgtcggcctggtcgaagtcggcgtgccggtcgaacggctcgccgaagtcctggcgcgtttcgagcggcgtctggacgaggtgtcgtccgatccgcagcgcagtctgctgattcagccgatgatcgccttcgaggaggaaatcggcgtcggcgctctgctcgatccgaattacggccccgcgatcctgatcgggcccggcggcgtcggcatcgaggcggcttcgggcgagcggcacgtcctgctgctgagcgcgtccgatgaagcgcgcgcggcttaccagagccgtgtcgaagacgcttacggcctcgcgcccggaacgctcgggccggtcgtcgccggactcgagcggctgctcgcgacgccgactatttccgagatcgatatcaatccgatggtgcgaacgcccgacggcggtctcatcgcgctggatgctctcatcgtcgtcgaaccgcatcacccgacggccgccgcctgaccggcggcgtaaaaaaacgatgcaacccagggaaggaaaccagatgtctcgcagaatcatatcaggcgtcgtggcgctggcggttgtcggcaccgcgtcggccctcgtcgcgcaaccggcgtcgatcaccatcgtcaatccgggcggcccctatctcgaggcgacgctggaggcctggggcaagaccttcaccgagaagaccaacatcaaggtgaagggcgactccccgcagagcctgccgaagatccagcagatggtcggcgccaagaacgtgtcgtgggatgtcgtcgaagtgccgccggtgttcacgatgcgccattgcggcacgctgttcgaaaagctcacgcccggcctcgtcgacgcggcgcgcgtcaatgcgggtttcggcaatgaatgcggcgtgccggatgcgggctacgccaacatcatgctctacaacaagaccaagttcgcgaagggcggcccgcagaactgggccgacttcttcgacgtcaagaagtttcccggcaagcgcggcctgtgggacggcgccgagggcgtgaacctcgaaatcgcgctgctggccgacggcgtcgctccggagaatctgtatccgctcgatctcgatcgcgcgttccgcaagctcagcgaactcaagccgcatatcgtgttctggcgaaccggcgcgcaatccacccagatgatggaaagcggcgaagtcgacatgatcatggcgtggtcgtcgcgcgcctatccggcgctgaagaacggcgcgccgttcgagccggtgtggaaccagcacatcatctacaacaacgttctggcgattccgatgggcgcgccgaacaaggccgccagcgaagcctatattcggcatgcgctcgaggacaaacagcaggcccgcatcaccgaactctatccggtcacgccggcgctgatcggcgccgctccgaagctcgacgaggcgggcatgaaagtcttcgccggcacgcctgagcgggccaaaaccgcgatccgcctcaatctgaaatgggtcgccgacaattccgaagtgatccagaagcgctggatcgagtggttgaactcctgacctcgtcgggcgggcggcactcgccgcccgcccgtctcccgctcggattgaaatcagctgtcgtgtccagagtttcgccatgaaccccgcacgcaatcccaacggcctgtcggttcttgtcggcatccagctgatgctgccgacggcggcattcctggcgttgttcttcgtctggccgacgattctgatcgtctcgcagagcttgctcggcgagggcggatggttgtcgcaatacaccatgttcctgtcgagcgcgggctatgtgcgcatcctgctgcgcacgctggtcatggccggcctcgtcagcacattgtgcctgatcatcgcctatccctacgcgtatctgatgagccaggtgcgcggcaacatgctcacggtgctgatgggcgtcgtgctgatctcgttcttcaccagcgtgatggtgcgatccttcgcgtggatcgtggtgatgcagcgcaacggcatcgtcgaccgtctggcgcagtctctcggcttcgactcgctggtgctgcgcggctccaccctcggcgtcaccatcgcgatggtgcagatcatgctgccgttcatgatctttccgctctacagcacgatggtcggcatcgatcgtcgtctcaatgtcgccagcaagtcgctcggcgcgaatggctggaccacattctggcgggtgtactggccgctgtcgctgcccggcgtggtcagtggctgggtcatcgtcttcatcacttcgctgggcttctacgtgatccccggcctggtcggttcgccgcaggagcagctgctctcgcaattgatctacacgctgatcaacaccgtgttgaacctgccgctcgcttcggccgcgtcgatgctgctgttgctgatggcgctcgcggtggtgctgccggcgatgtcgcggttcgacgtcgcggccggcgtgacggcgcgggccggacaggtcaacgacacgaccgatcgtcgctccgcgtggctttacgtctgggcgatcgtggtcggcgttgcgctgctgctgccgagcctggtcgtcattcccctgagctttccgggcaatgccagcttcgcctttccgccgacctcctggtccacgcgatggtacgagcggttcttcagcagcgacgaatggttcggcgcgctgctggcctccttgcaggtcgccgtcatcacgatggtgctcgccgtggtgttgtccgtcagcgctgcgctggcgatccgccggctgccgccctcgttccgcatcgtgctgcgctccttcgtgatggcgccgcgcatcgtgcccggcatcatcatcgcgatcgcgatctatggtctgtttctctcatggggtctgaccgcgaccaccgccggcttcgtgatcgcccacaccgttctggcgctgccgttctccttcattccgatcatgacggcgctcgaacaattcgatacccggctcgagcaggcttcggcgagcctcggcgccggacgaaccaaaaccttgttccgggtgatgttgccgttgatttcgccgggacttttgacgggcgggttgttcgccttcgtcatctcgttcgacgaggtcgtcgtctccctcttcatcagcggaaccgaactgcggacgcttcccgtccagatgtatcggtccgtcgccaccgatatcgatccgaccatcgcggcggcatcgaccatgcttctgctcctcacaatggtgctggtgatcggaagctccatgctctcaaagaagtttcagcgtgctccatgacgaacatcagaaccaacggcgctgcacttgtcctgaaagatctcgcgaagacctacggttcgctcgccgtggtccgagatgtgtcgctcactgtcgcgccgggcgagttcgtcacctttctcgggccgagcggttcaggcaagacgacgacgctcaatctcatcgccggattcaccgaggccagcgccggccggatcacgctcgacggacgcgatctcggcaatgtgccggcgcatcagcgcggcatcggcgtcgtgttccagagctacgcgctgttcccgcatatgacggtgcggcagaatatcgcctatccgctcgaacagcgccggccgcggatggaccgcaaggcgatcgagacgcaggtcagcgacgtcctgcaattggtcgagatggccggatacgccgaccgccggccgcatcaattgtccggcgggcagcagcagcgcgtcgcgctcgcgcgtgcggtggtgttcgaaccgaaattgctgttgctcgacgagccgctcggcgcgctcgacaagaggttgcgggaaagcctgcaactggagctgcgccgcatccatcgtgagctgggcgtcaccgtcatcttcgtcacccacgaccaggacgaggcgatgacgctgtcggatcgcatcgtggtgttcaacgagggccgcatcgagcaggtcggcacgccgcagcagctgtacgggcagccggccactgagttcgtcgcccgctttctcggcgactcgaacatcttccgcggccgggtcgaggaccagcatctgaattgcggcgcgttcaacatccggctgcccgcgccggccacgcccggtccgctgtcggcgatggtgcgcccggaaaaaatgcgggtgaagaaggacgtcgccggcgcaggcgaggacggcgttgccgccacgctcaccgacgtgacgttctcgggctcgacctggcgggtcgaggggcatgattcggatggccggacattgttggcgcgggtcgccgacggttcgaccctccacatcggcgagatggtcaatttcgtctggtccgtcgaggacgtgcgtatcgtcgccagcgaagcccggccatgagcgacgcgcgcctccagcagatcgcgcaactggcgcagggcgagccgctcgccgaccgttcggcgcatctgcgccgtctggccgatagcacgttcgacattctggtgatcggcggcggcgcgaccggtgcgggcgtcgcgctcgatgcggtgacgcgcggattctcggtcgggctgatcgagaaggccgacttcgcctcgggcacctcgtcgcgctcgtcgaaaatgatccacggcggctttcgctacatgcagaccggcgacgtcgcgttggtgcgggaatcgctgcgcgagcgcaccttgctgcagtcgaacgcgccgcatctcgtgtcgctgcttccgttcttgatcccgctgtttctcaaagggggattgatcaacccgaaagtgtcgcgcgcgctcggcgcagcgctgtggagctatcagttcgccggctcgtggcggatcggtcgtcgccatcgccggctcaaggcgtcggaggtgctggcgcatatgccggtgctcgatcccgacaaggtcggcgaaggctatctgtttcacgatctgcgcacggatgacgcgcggctgacgctcgcgatcgccgccactgcggcggcgcacggcgcagcggtcgccaatcacgctgaatgcgtcggcatctcggatgtcacggccggattgcgccgggtgtccgtgaagacggcggaaggcgagttcacggttgcgacgcggatggtgatcaacgccaccggcatctgggcgggagagctgctcggccacgcgcgactgtccgctgcgcaggggctggtcgccgccaagggcacgcatctggtgtttccgcgacacgtgttcggcaacgacgtggcggtcagcctgcccacgacagaccggcgcacgatgtcggtcgtcgatgcaggcgccttcagctatgtcggatcgaccgacacgacggcggactgcgcgatcgatgagcccggcatcacgcagcgggacatcgactatgtgctggcgggcatcaaccgcaacgtcacgcggccgctgagcgaggacgacatcacgggcggctggagcggctttcggcctctgctcgcggatcagagcaaggcgagaaccgccgacctgtcgcgcaagcatcgcatcacgcacgatgcggacggcttcgtatcggtgaccggcggcaagctcacgacctatcgggcgatggccgaagaggccgtcgatgtcgccgcgaaagcgctcggcggcggccgcgcttgccgcacccgcaagctgcgccttcacggcgccagctccgatttcaaattctccgcgccgatcggccggctcacgcgctacggcgttcagggcgccaaggtggccgcgctcgcggcgcgcga

SEQ ID NO: 4278 - DNA, 23201 bp, synthetic construct
  source 1..23201: mol_type = other DNA
  misc_feature 1..23201: note = Synthetic
agccaacaacatcggcacggcatggagccgtcatgctcagcagcagccgcaatgcggcttcggcaccaccgggctgtgttgccggatctgtctgaagggaccgtgccggatcgatccgttcggccagggcccgcaattcggcatctgcggcgccgaccgcgacaccatcgtcgcgcgccacctggtccgcatgatggccgccggcgccgcggcgcattccgagcacggccgccacatcgcgctggcgatgctgcatctcagccagggccacctgcacgactattcgatccgcgacgaagagaaattgttggtggtcgccaagcggcttggcgtcgcgaccgagggccgcgatctgatgaccatcgtgcgcgaactcgccgatctcacgctgcacgatttccagaatcagaactacgacgagccgtgccattggctggcggcgtcgctgccggcgccgcggctaaagaagctcggcgatctcggactgttgccgcacaatatcgatgcggcggtggcgcagtcgatgtcgcgcacccatctcggctgcgacgccgatccgaccaatttgatcctcggcggcttgcgcgtggctttggccgacctcgacggcgagatgctggcgaccgaactgtcggacgccttgttcggcacgccgaagccgatcgtcaccacgtcgaatctcggtgtcattaagcgcgacgccgtcaacgtcgcggtcaatggccacaacccgctgttgtccgacatcatctgcgacatcgccgccgatctgaacgacgaagcgatcgccgccggcgccaaggacggcatcaacatcatcggcatttgctgtaccggcaacgaggtgatggtgcgccacggcattccgctcgccaccaactatctgtcgcaggaactgccgatcctgaccggcgcgctcgacgccatggtgctggacgtgcagtgcatcatgccgtcgcttccgcgggttgcggaatgcttccacaccaagatcatcaccactgacaagcagaacaagatcgccggcgcaacgcatatggatttccaggaagccaaggcctcggaaaacgccaagtcgatcgtgcggatggcgatcgaggcgttcaagcaccgcgatccgcggcggatccagatccccaacatcacccagcaggcgatcgtcggattcagcaccgaggcgatcgtggcggcgctcgccaccatcaacgccgccgatccgctgcagcctttggtcgacaacatcgtcaacggcaatatccagggcgtggtgctgttcgccggctgcaacaacaccaagacccagcaggacagcgcctatatcgcgatcgcccgctcgctggccaaacgtaacgtactggtgctggcgaccggctgcgccgccggcgcctatgccaaggccggcatgatgacgcaggatgccacccggcaatatgccggcgagggcctgaagagcgtgctgaccgcgatcggcgaatccgccggcctcggcgggccgctgccgctggtgctgcatatgggctcctgcgtcgacaacagccgcgccgtggcgctggccaccgcgctcgccaacaagctcggcgttgatatttccgatctgccgctggtggcctcggcgccggaagcgatgaccgaaaaggccgtggtgatcggcagctgggcggtcgcgctcggcatcccgacccatctcggcacggtgccgccgatcgtcggctccgacgtcgtcagccagctcgtcaccaccacggcgcgcgacctgcttggcggctacttcatcgtcgagaccgatccggaactcgccgcggacaagatgttcgccgcgatccaggagcgtcgcgacggcctcggcatccagaccctggcggtggcgccgatcgccgcgctggccgcagcgaagcgcccggtgctgcctgcgaggttgacatgaagatcgcggtcaccggaaaaggcggcgtcggcaaatccaccatcgtcggcatgctggcccgcgcgctcgccgacgacggctggaaagtgctggcgatcgacgccgatcccgacgccaatctggcttcggcgatcggggtgtcgcaggaccggctggccggcgtcaccccgatctcgaagatgatcgatctggcgcgcgaacgcaccggcgcccacgccgggatgggcagccacttcatcctcaacccgaaggtcgacgatattcccgatcagttctgcgtcgagcacgccggcgtcaagatgctgctgatggggaccgtggaccatgccggcaccggctgcgtctgtccggagcacgcgctggtgcgcaccttgctgcggcacatcctgacccggcgcaaggaatgcgtgctgatcgacatggaggccggcatcgagcatttcggtcgcggcaccgtcgaggcggtggacatgctgatcatcgtcgtcgagcccggcgcgcgcagcttccagaccgcgcggcagatcgagcgactggccggcgagctcggcatcaagcagatctgctacgtcgccaacaaggtggcttcggaccaggatcgcgctttcattgccgagcaatcgcggcgctgcgatctgttggcctcgttgccattcgacgccgcggtgcaggccgccgaccaggccggcgtgtcgttctacgatctggccgaggtgggacgcgaacgcgcgcatgccctggagctgacgctgctcgatcgcatcgcgcccgagcagccgaaggagcaaatgcaatgtgcctaggaaccgtcgtcgtcacgcgcaccgcctcggccagcgcggtcgaagtcaaggacgtcaccgcgatcagcttcgagcccggcgcagtgcgggtctcgaccctgttcggggacgagcagttgttttcgggcgtctcgatccagcggatcgatatgcaaaaaggcgtaatcgtcactctcatcgaggagaacatcacatgacgccgcaggaccaggccaaggcgcggctgcgcgcttatctggcgcatttcatcgatcatgcgcaggaccatgtcgccgagatcgaagcgcagcgcggcgccatcggcgccagcgccaggctcgatcagctgctcgaccaggcggtggccgacgtgcaactggcgcgtcgctcgctcgaagccgcgctggaagcgatcggcggcagcccggcccgcgatgtattctcgcagcacgcgcattcgcatcaaccacaccttcaccactcccacgaaagtgtagtgacacccggcggcgctgatgtgactgagcaccataaagctaacattggagggccgcgcccaaccgcgtgacgactggactcgacccgcgttcgatcggcgcggtcagagcccaatgtcggacaactggcgcccgaggcccctttgcgtgagggaaacgaaatgccgccgcgcttcaatatcgccgatgtcttgaccagcccttcgggagagggattcttcaatggcttcaacgtgcgcaagcacgacaagggaagcatgatctgcaccggcgagggcgacgagaacggcgtcttcgtggtgatgggcggcaggctgaaagtctatctggtcggcgacgagcgggaaatgacgctgttctacctggtcccgggcgacatcttctgcatgcattccggctgcctgatcgaggccgtcgagaagagcgaattgcgcttcaccgatatccgcaccttcagcaagaaactggagcagtgcccggcgatcgccttcggactggtttcgattctcggtcgcgcgatcatgtcctgcatgcgcaccatcgaggacctgatgtttcacgatatcaagcaacggatcgcgtggttcttcgtcgaccgtgcttcgagcgagggaaaggccaccggagccgggatcacgctgtcggtcgaactcaccatcgaggagatcgccaacctgatcgggtcctcgcgccagaccacctcgaccgcgctgaacagcttgatcaaggagggctacatcagccgcaagggtcgtaccgactacacgatcctcgacatgccgcggctgaccaccgcggcggccggccggttgccggcggaggagtggtcgagcgtgggcaagaagatccgcccggtctagagcgtcacagcgaacaggagacgggccatgtgtgcggtttgcggttgcggtcaggggaccgtcgaaggacagcctcttcacgaccatgacgacctcgacgaggccgcgcacgccgcgctgcatgccgccggcacgccgcatggccatcatcacgaacatccgcacgaccatcatcatgccgatcacgatcatcacgatcatgcggccgtgcattacggcgtcggcgaagccggggtctcggtgccgggattggaccagcgccagatcatcaagctggagcgcgcggtgctggcgcacaatgacggtcttgccgaagccaatcgcgcgcgctttgcgcaggccggaattctcacgctgaacttgctgtcgagcccaggctccggcaagactacgctgctctgcgccacgatcaccgcgctggccggccgattgccggtggcggtgatcgaaggcgatcagcagaccagcttcgacgccgaccggattcgcgaatccggcgcgccggcgatccaggtcaacaccggcaaaggttgccatctcgacgccgcgatggtggccgacgccttcgcgcggctcgatctggccgcgggtggcgtgttgttcgtggagaacgtcggcaatctggtctgccctgccgccttcgatctcggcgaggctgccaaggtggtgatcctctcggtcaccgagggcgaggacaagccgctcaaatatcccgacatgttcgccgccgccgacctgatgatcctgaacaagatcgatctggcgccctatgtcagcttcaatgtcgaacgctgtctggaactggcgcaccgggtcaacccccgcctgtcggtgctgcagctgtccgccaccaccggcgagggacttgcggcctgggtgcaatggatcgaagcccggcagcgcgccatcgcagcgagcgtcgcgtcatagcggccacgtcgctcaagccgacccgattgaggatcaaacggagtcttcaatgccatacgagttcgcagttttgttctgaatggcgtacccgacacgattcgaacgtgtgacctttgccttcggagggcaagactctacggcaccaatcgcggagcaccagcactgctggtgtttgtctgaggcgaaacccgattctccggccgttggtcaaacggtgggtcttggtctaggaaagtcggaaatgctttccctttcaatagggattgactgacactctctccgccagcctgctgttaattggagattatatatattttacagaagcttagatgcgcatggcagttggccgtctgaccacgttctgaccaaagttctgaccagcgcaacagcatgctttagacttccatggttggcaggcagagcgcgtgccgggaggcgctgttgggggatatctgaccatccctcagcggggcagaccagggctttgctttagaggccgggcttgatcgcgccgacatcagctaggtggaccgcgggaagcggaacgttacggtgatcgtgctggctcgcattgcgggtgccctgaagacgaccccggacaagctgttgattgccccgcgcaaggcccgaagttagcccccggatcgcgaacagcctaacgatggccgctcattgggacaaagtaggcagaccacggaatggcttacatcattcacggaatgtacggtaagtcggaaatcggatattccgaggacgaccggaaggttctgcgtgcgtttttcgaccggaccgatgcctatcccggcacgatcactagtgcatcctgggttaccggaacctggattccgcccgaggtagtgccccgccgggtgcgcctcacccgggctaaaacaatgtgcgactggatgctgttgcttggcggcggaaatctggtcagttcgcggctcagggacgcggtcgaggagctcgaccccgggcggcatcaatttttcccggtcgttgccgaggacaaaaacggcgtcgccaagcccggcgatttcttcatcttcaatgtcgtcgggcggatcgattcgattattgaagaccggagtaatctcagggcgagtgggcgcggcgatatccaaaactggagttacgagcgccgcgtcgggccttggcaatgcgcgctggacgcggctgtcatcggcggtagggcgtgctgggtcgaacatcgctatagcgggtgctggttcatttccgaccggttggctgcgttgctgcaaaagcgcaagctgaacgcgtaccggctggaccatcattgcgacgaagtctcactctgattccgggataggggtctctgacatgagcaacaatgtccgttactggcccaacacgaacctgccgtcccttagccattgaatcgggtccggtatctgccaggtcacttcaaacgcctgacttcaagcccatccctgaagtcactgcgatgctggcgctaggaagctcgttgagtccggtgatgatgttgggcatcaatccccatcgctaccgaaagagcgcatggtggccccgctgagagtcatggaggcgggctttaagcggtgcagtcgggtccccgcatggaattgcacatcgcacctctttgcagccaccccaccgtctgctggaaccttaagtttcaacgcttctaggagcaaaaacattcagcgttgaaccgggacgataagcatcttcgcttccttcggtcgttcgtcaaggagcctagcgctagcaagcagcttttcgccaatgcgcgccaagtgtttgcagctctatttaggagggccatagagggctatggagtagacgtagttctccgtttcttcgttctcggcccgccagccacttcccgacccatgattgcttgtagagtgacaattacgatggccggtcggcgacaactaggatggccggttttggcggtcgcctctgaagcgatttgagggtgcaaggagttgagcaacgacgcaagatctaattggcgcgattgcgacgattagatcgttttggttacaggcttttgctttgagttttccgaggccttccgatcggtcattcgcgtgactgcggccttgcgacgataactgtcggtgttcatttccagaatgacggcgtggtgcacgaggcggtcgatggcggccacggtcattgccttgtcggggaagatttcctcccagcccccgaatggctgattagctgtaatgagcaagctgcgacgctcgtaacgggcggagatgagttcgaagagcacgctggtttcggcctgatccttgcggacgtaagagaggtcatcgaggatgagcaggtcgtatttgtcgagcttttccatgacgttttgcagcgttagatcgcggcgagcggcctgaagtcgttgcaccatgtcggtcgtgcgggtgaacagaacacgatagccgttttcgatgagagcctggccgagagctgcgccgagatgcgacttgccaacgcctggcgggccaaaggccaatagattggcgcctttgtcgagccaagaaccgccggccgcgagcgcggtgatctggctcttgttgatcatcgggacggcggcgaagtcgaaggtggcgaagctcttccccgccggcaggtgagcgtcctgcatgttgcgctggattcgacgttgatagcgttcggcaagctcgtgctcgagcaaggccgcaagatagcgagcggccggccagccttcgcggtctgaacgctcggcgaggtccgcccacatttggccgatggtcggcagccgcagggaggtcagcagcatcggcaggcgagcgagatcgaccgtgatgggcgctggtgtgttgtcgcgcgtcagcatgacgacacctcgccgtggacgctggacagcagcacgtcgtagatcaacgcggccggcatcgtgacggccaccgtgggcaatgccgccccgccgttttgagccgcggcatcgcggctgaacacagcccgcagggcgttgggatccggcaggtggccgagatcgagcacgctgtcgatatgcgcggcgagttctgcttcgcaaccgctgcaataggcgatgtcgagcaacgccaccatggtgcgacaagcccggtcgatcgggcctcgctcgaccagcgtgtcccaggcccggcggaacgccggccgcgggaacagcgcgtcacgccataccaggttgcgcaaggcctggggtttgcgccgaaggctcggcagcacgtgccggtagtcggcgacgtgtccgcgttgggccccccgcggcacccggccgcgcggcagcacgagcacctgcgtcgagccgaggaagcagtcgagccgatcgtcgtagaggtgcaccttgaggcgatggccgatcaaacgcgacggcaccgtgtagaacaccttgcgcagacagaacatgctggaggacgtgaccaccacggcagcctcgctgaagtccgtggtgcggcgcggcggcagcgcccgcagggcggcgcggtcggctgcgaaggcctggtcgcgggcggcattgcgttggccgacgatgtcgtcggtgaatgcctgataggccacccgagtatcgaagtcacggctaccgcgcagcgtcagcgcctgatcgagcgccttcttgaggtggcgattcgggctttcgatcgagccgttctcatgactgacaccgcgattgttgcgggtcgccgccatgccgtaatggtcacaaagttcacgataggcgcgcgtgaagtcctcctcctccgagaggttcttgaacgcagccgagaggctgtcggtgcgatgctcgcgcggggcccccccgagcagccagagcgcgttctggagcccctcggcaagcgccgagaagctttccccgccctcgaccacgcgggcgtactcccactgcgaatgggccagcgcgaagtgatagaagcgatgcggaaaggcgagcccaaccatcgtcacaccaagctcgcccgcatcggtgaagtcggaaaggccctgcgcaccgggcggatgctcctgacggaagatgacgtcgcgctcggggccggcgagtgcgctccaccgccgcatgtggcgctgcagggttcgcaaatggctgtcgggaaagcggccgggatgacgccgctgcagctcgcgcaaaatggtgatggcctgcagcgacggcatcgattgcagcagcggcacgatatcggcttcccaaacgccgtcgaacgggttgggacgggtccgataacctcggggtgtcttgcgctgcgatggcaaggttggatcgcgatcgatccgacgagccgagcgttcgctgattcccgctttggcggcggcagtgtgctgaggatgggttcgacgatggtccatgtacgttctcacctggtggtcgttgaggtggctgcctggcacgaacggccctttccattgaggaaagaaccgcttgcaccacctcagaaacgaccgccagtgacgtcaaatgaccccacaaaacggcgcagccggtgtggccggactctggtcgggctacgccctcccgccgtccggccacaccggccaagctagttgtcgtccgccggccaagataattgtcgtcacacaattgctgttctaacggggcgaccctgcgccgccatacgcgtgcgcctcttccaatgacatggcaccgttatctccaaacgagacgagagcaggccggcccagatttcggatgcgcatcgatcgggtctggaaaggctgcggcgagcggcgcgcgctggtccgatgattgccgatgtgaggagtgagatttccggcgcaggaagatagccattttgcgcctggcgcgtttcacggctggccgagttcagccgagccaaagccgactgacagatcaaatgaatccccccgtcacgtttccgtaacgggggtaatccttcgtaacgaaaaccgaggtttccgttacttgccgtggctttcctaccgatttcccaccgcatgattgccgaaatacacaagacggtcaataatcgatttttgattgtgtgcaatcttggtggcgtgatgagtgagcgtgttgtccggcgtattctcggaattgacctcggtatagcatcgtgcggatggggggtcgtcgacataagcggggccgggggaggtatcatcgctaccggcgtccgctgtttcgacgcccctctgatcgacaagaccggcgagccaaagagcgcaacgcgccgcaccgcgcgtgggcagcggcggatcgttcgccgccgccggcagcgcatgaatggcgtccgccgcttgctttgcgagtttggtctgcttcccgatccgcgaccggacgctctcaatcaggcgatgcgccgaatttcgacagcttcggcagcagcgcaagtcacgccgtggacgcttcgcgccgccgcacatcagcgtcttttgagcaacgaagaactcgcggtcgttcttggtcatatcgctcggcatcgcggctttcggtcgaacgccaagaacgaggccggcgcgaatgccgcggacgaaacctccaagatgaaaaaggcgatggaggccacgcgcgaggggctcgcaaagtatcatgctttcggcgacatgatcgccaacgatccaaagttcgcgaaccgcaagcgcaatcgcgacaaggactactcgcacaccgcgaaacgctccgatctcgaggacgaggttcgcgcaatccttcgcgctcagcttcgatttggcagcgcggccgctaccgagacgctggcgcaaacatttgcggacgtcgcattctttcagcgtccgctgcaggacagcgaagacagggtgggcgattgcccgtttgaaccgggacagaagcgcgccgcgcggcgcgcaccttcgttcgagctgttccgttttctctcccgactggcgaatctcaaattggccgtgggccgatcgccggagcggcgactgaccgcggaggaaatcgcgttggccgccaagggcttcggcgaaaccaagaagaccatcacgttcaaatcgctgcgcgaggcgctcgacctcgatccgaacgcgcggttttccggcatcggcaaggacaaggaagcatcgctcgacgtcgtcgcgcggaccggcggtgcagcctatggaacgaagacgttgaaggatgcgctgggtgatgcgccgtggcgatcgctgtcgcgaacgccagaaacactcgatcgtatcgccgaaatcctgtcgttccgcgaggacatcacatcgatccgcaatgggcttgaagacctcggtctcgatagcctcgtcgtcgaggccctgatgcaggcggcggccaatggcgatttcaaggagttcacccgggccgggcacatctcggcgcgcgcggcacgcaatatcatccccggacttcgcgaagggttggtctattcggaggcctgcgcgcgcgttggctacgatcatgccgcgcggttgtcggtcccgctcgatcaggttggcagcccggtgactcggaaggcgctgagcgaggctcttaagcaagtgagagcggtggcgcgcgaatacggaccgatcgactactttcatattgaactcgcgcgctcggtcggaaaaagcgccgaggagcgcaagcagctcacggatggcatcgaagcgagaaacgtcgagaaggcgaagcggcgcaagcaagctgaggaacacctcggccgcgcccccagcgacgacgagctcttgcgatacgaactcgccaaggaacagaacttcaagtgcatctattccggcgatgcgatcgatcccgcaggggtcgcggccaacgatacccgctatcaggtcgaccacatcctgccgtggagccggttcggcgacgattcgtatctgaacaagacgctctgcaccgcgaggtccaatcagaacaagcgcgggcgcacgccgttcgagtggttcgaggccgacaaaaccgacgtcgaatggatggagtacgttgcgcgcgtcgaaaacctccaggaggtcaaggggcgcaagaagcgaaactacagcatcaaggatgcggcggcgatcgaggacaaattcaaggcccgcaacctcaccgatacgcaatgggccactcggctgctcgccgacgaactctcgcgaatgttcccgccgcgcgagtgcgagcgggcgatttgcggtcgggcggacggcggcaacgacggattgacgatcgtggaggagcggcgggtgttcacccgaccgggggccatcacctccaaactgcggcgggcctggggcctggagggcctgaagaagcaggatggcaagcgggtcgaggacgaccggcatcacgccgtcgatgcgctggtgctggccgccaccaccgagagcctgctgcagcgcctgacggtcgaagtccaaaggcgcgagcgcgagggccgcccggacgacatctttcattgcgccgagccctggcggggcttccgcgccgatgttcgacgcacggtctatgggtcggagaccatgcccgggattttcgtctcgcgcgccgagcgtcggcgcgcgcgcggcaaggcgcacgacgccaccatcaaacagattcgcgaaatcgaaggcgagaggctggtgttcgagcgtaagccggtcgaaaaactgacggacaaggacctggagaagattccgattccgaagccgtacgggcaggtgagcgatcccaagcggttgcgggatgaactggtggaaagtctgcgcgcgtggatcgcggccggcaagccgaaagacaggccgccgctgtctccgaagggcgatgtcattcgcaaggttcggatacagaccaacgacaaagtatcagtcgagatcaatggcggcaccgtcgatcgcggcgacatggcgcgcgtggatgttttcaggaagaaaaacaagaaagctgtttgggaatattatgttgtgccgatctatccgcatcagatcgttgcactgaacgatccgccggaccgcgccgtgatcgcttatgcggaggacaaggattggaaagagatcgacagcagttatgagtttctttggtcgctgttcgggttgtcctatgtcgaaatatcgaaagcgaacggggagtgcatcgacggttactttcgtggtcttcatcgcggcacgggagcagcaagcgtctgcaagcatatctcgctcggcaaagatgcaacggtcagcggaatcggactgaaaacccttgcatcgttcaaaaaattcaccatcgaccggctcggacgaaaatttgaaattccgcgcgaggtgcgtacatggcgtggcgaggcctgcacctgacgcaggcggcaaggctgtcgcttgccgacggtcaggtttgcgtcagacaggatgcgggcgaagtgcggctcgcactggaagatattgcctggatcgtgatcgacacgccgcaggcgacgctgtcgagcgcgctgatgagtgcgtgcatggacgccggcgtcgtgctgatctttaccgacgagcggcacacgccatcgggcgttgccttgccgtttcatcgtcaccatcgccagggcgcgatcgcgaagcttcagttcgacgccaaggacggcgtgaagcggcggctgtggcaagccatcattcgccgcaagattctcaatcaggcggcttcgctctcggttcttaaccgccagaattcagagactctcgcggagattgcgcgtcatgtcgagccgggcgatccggagaacgtcgaggcccgcgcggcgcgcttctattggggccgtctgtttggggatttcgtgcgcgacgacgagggtgatcttcgcaacaaaatgctgaactacggttatgccgtcatgcgcgccggcgttgcgcgggcgctggtcgcctgcggatttcttccggcgttcggtttgaagcacgagagcgcggccaatgctttcaacctcgcggacgatatcgtcgagccgttccggccgtttgtcgatggtctcgcatggacgactctcggtgatcgcgtggccaagaacggcgatctcacgctggatgaccgtcgcgccatggccggcgtgctgctgatgaatggccgggtcggggacgccaaggtgtcgcttctggttgccgcggaaatggcctccgccagcctctgccgtgcgctggagttcgaaaagccggcgttgctcgaattgccggaattggagcgcatttcatgaaaagcgaggaggtccgattcgtgtggatgttcgtctttttcgatcttccggtgggcacgaagaccgatcgccgtcacgcgacgcggtttcggaaattcctgaaagacgatggattcatgatgctgcaatggtcggtgtactcccgagtttgtcggggcgacgacgccgcggataaacatggtcatcgcgtagttaaaaacttgccgccgcgcggcagtgtccgtacccttcaggtcacggatcgccagtacgcgcgtatgaggctgttgcttggggaagcaacgttcaatgagaagaaagcaccgcaacaactggtcctgctctgatttccgcctcgcggttcaggcggaaatcagagcattttcagtcgtttgtgccgctcgtagcctaccacggggaaatcggtagggaagccacggcggtcggtgacggcggctcgcagcatcgcgaagcctaccacggggaaatcggtagggaagccacggcgtctctcttacgaacgtgcgggtaaacaccagcctaccacggggaaatcggtagggaagccacggcgcgaccgatagcctatcggtgcccccgcaaagcctaccacggggaaatcggtagggaagccacggcacggtttgcgagccgtcaacagattggctgagcctaccacggggaaatcggtagggaagccacggctggtgtagccgagcagcgccaggtcatcggagcctaccacggggaaatcggtagggaagccacggcttccgctgttattgctcgctgcaacacgccagcctaccacggggaaatcggtagggaagccacggcgatcgccgttggcgtagcggcttattcgttagcctaccacggggaaatcggtagggaagccacggcccgcgcgctgcagcccggtctgttcgggctagcctaccacggggaaatcggtagggaagccacggcaagcttagccatggtggttccctttgagctagcctaccacggggaaatcggtagggaagccacggctacaagtcagccggtatgaagcccagcgccagcctaccacggggaaatcggtagggaagccacggcccgttgccgtcgtggcaacgatactgccatagcctaccacggggaaatcggtagggaagccacggcactcagagcgatcacgtcgacgccgtcggtagcctaccacggggaaatcggtagggaagccacggcccaaaacgtaaacacgaacgcgaagtcattagcctaccacggggaaatcggtagggaagccacggccgttatcgcgatttcggaaatgaccgggtgagcctaccacggggaaatcggtagggaagccacggccttgatcagagagcaccgccacatcttgcgagcctaccacggggaaatcggtagggaagccacggcgggcggtgctgcagtgcttcgcgaccaaacagcctaccacggggaaatcggtagggaagccacggcgcgaaacgcatgcaccccggtgaaggtcgaagcctaccacggggaaatcggtagggaagccacggcccactctcagcggcatcgccggcattctgaagcctaccacggggaaatcggtagggaagccacggccccagtcatggtcatccagtcaccgaatcgagcctaccacggggaaatcggtagggaagccacggctgcccacctcatgtacgacgcatggggcgccagcgatccgaagcgccggatcgcattggcgaaaaaagcgctcggactatctccgctctgcgccgacgcttatgtcctgctggcgcaggaaaccgccagcaacttggatcaagcaatcgagctctatcgccaaggcgtcgaggccggcgaaatggcgctcgggaaggccgcgttccgcgacgacgtcgggcatttctggggcttgctggaaacccgtccgtatatgcgcgctcgccacggtcttgcgcagacatctgggagaaaggcctgcgtgacgaggccgtgacgcatttcaaagggccgacgccgcccgcttcttcccgaagtcgttgcgcgggcggcggatgctgtgcggctctggaaccgaattagtgcgcaaccagaccgcgaaatccgggcgacaacgttgcttttgaaagtcgtttgcgttcaccggccgccatgataagcgaggtctggggggcgctgtgggcaaatcgcgacaaacgcatgcggtgggactgacggccagcttcatcgcggcctatgcgttggtgctcaatgtcgtgctgtccagcctgttgctggcagcgctgtcgcccaccgcgcaagttgcgagcgccgcgatttgcgtcactcatcccgatcaaacgacgggggtgccgggcgacgacaagccgaccggcatcgccgtcgtgcattgtccggcctgtatcggaaatcatgcgccgggtgcaccgccggcgatcgcgtcgttcgccatcacgcgtattgccgtcgccatcgaagcggtggttcccgccgccaacgatcgtcgcccgcggcaggtcgctgccggacaccgcgcccgagccccgccgcagctgagctgattgtcgcgttctcccgcttctcagttcaaaatggtggactctcccatgcgatccgtctcatcacggctgcgccgcgctctgctggcatccgcggccacgctcgtcaccggcgcagcgtcggcgcaatcagcttcaacgtcgctgccaaccatcacggtggagtccgcggcgccgcagcgcacggtcagcgcgcgcaaaccgcggcaagtcacgggcggcggccgctcggcacgccaagtcacaccagcggcgccgtcgcccaattcggcggggcagggaacgcgcgcgcctggctctctcacggttccgaccgcgcagcaggcgctgaaagaaatcgatcggactccgggcgcggtcgccgtggtgcccgatacggcgttcaagaacggcccggccaacaccgtgaaggacatcctcggctgggtgccgggggtgttgattcagacccgatgggggccagacggccgggtatcgatccgcggctcgggtctgtccaggaactacggcaatcgcggcatcaacatcttcatggacggtctgccgctcaacacctcggacgggctgttcgacctgttcgaggtggatcccagcgtctatcgctacgtcgaagtgttcaagggcgccaacgcgctgcgctatggcgccaattcgctcggcggcgcgatcaatttcgtgatgccgacgggacgcgacgcgccggcgttcgacgcgcgtgtcgatggcggcagcttcggctatgtcaagacccagagcagcatcgccggcgtcaatggcccggccgactatttcatcaccgcctcggcgcagcgcgaggacggctaccgcgagcacagccgaaccgataccgagcggctcaacgccaatttcggctatcaattttctcccgatgccgagacgcggttttatctgaacgccgggcggtggcgggcggagttgccgggcgaagtgaccaagcaggcggcgctgaactcgccgcgcgccgccgacagcgaattcctgcggcaggatcagcagcgcaatatcgacacggtccggatcgccaacaagaccacgctcaggttcgacgacaccaccgtggatctcggcgtcttcggcctcgcccgccacgtgatgcatccgatctatcaatggctggacttcaccgcgcaagactatggcggcttcgtgcgcgccaccgacgaacgctcgctcggcggcttgcgcaaccggctgaccgctggcgtcaacgtgctcaacggcaccattgatatcaaccagtatcaaaacctcaccggcgcggtgaagggcgcgctggcgtcgtccaacctgtggaaatccgacaacgtgaccgcctatgcggagaactcgctctatgtgctgccgaacgtcgccttgatcgccggcgcccagttcctccacgcctcgcgcgaacagcaggaccgtttcctgtccgacggcaatcagtccggcacccgaaactgggacctggtcagtccgaaggtcggcgtgctgtgggacgtcgatccgacatggcaggtgtacggcaacatctcgcgcaacgccgaggtgccgaccttcgacgtcaacagcttctcgtcgccagcgagttcgaacgtcgaggcgcagaccggcaccacctacgagatcggcacgcgcggccgccggccggacgtcacctgggacctgtcggcgtatcgcaccgatctgcgcaacgagtttcagtgcctgaccacgtcgccgttcagtccctgcaccgtggtcaatgccgaccgcaccgtgcatcagggcgtcgaagccggcctcggcgtggcgttgctgaaatccagtttcgcgcaggatgaccgcttctggttcaacgtcgcctacacctacagcgacttccgcttcgaccgcgacgcgacctggggcaacaaccggctgccgggtctgccgccgcactacctccgcgcggaaattctctacaagcatcagaacggcttctatgccggcccgaacgtcgaatggatgccgcaggcgttcttcgccgacaacgccaacagcctgaccatcgacccctacgcgctgttgaacttcaaggtcggctacgaccacggcatcggctggtcgggctatgtcgaagggcggaacctgctcgacacccgctacatctccagcaccatcaccgccggcgtggcgacggcgacgtcggcgttgttcaacccaggcatggggcgcgcgatctatggcggcatccgctatcggatgtgaggtacggagtctggaccggcgcgatcacctcgcgggcagtcgcggggacgatactgccgatcttcggactctccatcgcggggattgccgggctgacatggctgcgtcggcggcctcttggtgcgcccgccatccaccggtgagggccgattgccacggcgtttggcggcgcgtgctgcgcctggacccgaccatgacgacctccgcgcttaatgccgcagcggcttgcggaatttcagcacgaaattgtcggcttcgccgatcgccgcgtatgtgtcgcggtcgacatcgccgagcgagaaggtcggcggcagcgtccagacgcctttcggccaattcgcggtgtccttcgggttggcgttgatctcggaggaagccacgaattcaaagccggcgcgttgcaccaaggcgatcgcgtagtcctgccggacatagccgtccagcgcgcgcgggtcctgcgcgacgtcgcgctggccgcgatgatcctccaaccccaagatgccgccaggcttcagcgcgcgatagaacgtcgccagcgcctggtcggcgttgccctgtttcagccagttgtgcaggttgcgaaaggtgagaatgacatcggccgagccatcgggggcgatcggcgcaggattttttggcgcaaattcggtgagcttgacggcgccatagagcgccttgtcggcgtcgagcttgatttgaaacggcgtcttggcgtcgggcgaggtttcgctgccggcactgcgcggctcgatcgcggcgtagtacgtgccatggtcgtgcagatagggcgcgagaatttccgtccagtagccggcgccgggccagatctcgatcaccgtggcgcgcggcgtgatctcgaagaaggtcaattcctgcgccgggtgccgcaccgcgtcgcgcgcgatgaagcgggcgctgcgctgcggtccatcgatcgcggcctgcagcgcggcggcgtcgcccggctgcggttcggcggcgtccgcgcgtgaggccaacgtcacgccgatcaagcaggcggctccgagcagaaaaaaccgtgcagtcgttcgcggcattgagcgccttcggttggatggcaacggaacccggcgcgtcgcgccaagcgaagcgtgctgcgcaagctagcgcgaatccacagcgccggccatggccgctcgacgcgccgcctcctggttgataagcccgctctccgcagggaggttttgagtcgacatgacggttgcgatcgagatgggacacaccgcggcaggggccgcggcgacgctggaccttgaggaactgctggccacccggctgttggtgcagggcaattccggttccgggaaatcccatctgctgcgccggctgttggagcagagcgcgccctgggtgcagcagaccatcatcgatccggagggcgacttcgtgtcgctggccgacagcttcggccatctggtgatcgacgccgaggtgcataccgaacgtggcctgcaggtcgccggcgagcgcgcccgcatccatcgcgtctccacggtgctcaatctcgaggggttggatgccgagaaccagatgcggcgcgccgcggccttcctcaacggactgttcgaggtcgggcgcgatcactggtatccgatgttggtggtggtggacgaggcgcagttgttcgcgcccgccgtcgccggcgaagtctccgacgaggcgcgcaaactctcgctcggcgccatgaccaatctgatgtgccgcggccgcaaacgtggcctcgccggcatcatcgccactcagcgcctcgccaagctcgccaagaatgttgccgcggaagcgtcgaattttctgatgggccgcaccttcctggacatcgacatggcgcgcgccgccgatctgctgggcatggagcggcggcaggccgacgcgttccgcgatctggagcgcggccaattcatcgcgctcggccccgcgctgtcgcgccgctctttggcgctgcgcatcggtcccaccgccacccagccgcgcaacgccacgccgcgattgatgccgctgccggaagcctccagcgaagcccacgctatcatcctcgccgcgccgccgcccgagccgcagcggccgcagcgccgctcccagcccgacctgctcgggcaattgatggcggcgaagtccgcggcgctggaaagccgcgccgaggcggcggagcagccggtcagcgccgagcaattggcggagcggcaggagcgcgtcgaccgcgtgctgcgcgcggtgatggccgaacccgacgccgggttccgcccgatcggcgtgctgtatcaggagttcgtggtgcgctgccggatcgacggtctggggtcggacgtgccggatctggccggcttccgccacatgctgacgcgcgcccgcgccgggctcggctccgacatcgcggacgacgatgcctggcaggacgttgcggtccgcgcctcgatcctgccggaggaaatgcagggcgtgttcatgatgatcgcgcgcgccgcgaaagaaggctggccgtgcccgggcgacgcggcgatcgcgcgggcctatggctcgcactcgctgcgccgggcgaggcggctgttgagctacatcgaggagcaggggctgatcgtgtgccagctcgacggcaccggccggcgcatcgtgacgctggtcgaattggcctgggccacggcgccgggcgatcccaatgccgacgagcccgcggcggagcaaggctgcgacgccccctcggtgtgatgcgatcttgatgtcgccgtcatccagggtgtgaaatgccaacgcccggcgatggatcgccgggcgttgaattctttgcggccttgcaaggggccgagggccttcggctattccgcggcgttcgccgtcgccaccgacaatgtcacgacctcgtcttcctcgtgcgcctcgctgaaggcacggccgtaatagctgtcgagcaggatagtcttcagttccgagaccagcgggaagcgcgggttggcgccggtgcactggtcgtcgaacgcttccaccgcgatgttatcgaccttggccaggaagtcggcctcggacacgccggcttcccggatcgacgccgggatgtcgagttcgcgcttcaatccttcgagccactccagcagccgatcgatgcgggcggcggtgttgacgccgtccagccccagcgcgatggcgatctcgccgtagcgatgccgcgacttcggccggtcgtattgcgagaacgcggtctgcttggtcggattgtcgttggcgttgtagcggatcacgttgcagatcaacagcgcgttggacaggccatgcgggatgtggaacgcggcacccagcttgtgcgccatcgagtggcagacgccgaggaacgcattggcaaacgcgatgccggcgatggtggcgccgctatgcacccgttcgcgcgccaccggatccttggcgccgttgacataggccgacggcagattctctttcaacagcttcagcgcctgcagcgcctggccgtcggtgaactcgctggccatgatcgacacataggcttccagcgcgtgcaccaccgcgtcgatgccgccgaacgccgtcaacgacttcggcagatgcatcacgaagttggcatcgacgatcgccatgctgggggtcagttcgtagtcggcgatcgggtacttgatgccggaggcgtcgtcggtcaccaccgcgaacggggtcacttcggagccggtgcccgaggtggtgggaatcgccaccagctccgccttctggccgagcttggggaatttgtagatccgcttgcggatgtccatgaagcgcagcgccagatcttcgaattgcacgtcggggtgctcgtacaacacccagatcagcttggcggcatccatcggcgagccgccgccgaacgccacgatcacgtcgggcttgaaggcgtgtgcgatctcgacgcccttgttgatgatcgacagcgtgggatcggcttcaacctggaagaaggtttcgacctccatgccgttctttttcaagagccggatgacgtcgtcggtgtagcccttgctgaacaggaagccgtcggtgacgaccagcgcccgcttcttgccggcgagatccttcagcgcctcgctggtggcgccgcggcggaaatagatcgatttcggcagcttgtgccacagcatgttctcggctcgcttcgcgacggttttcttgttgatcaggtgcttgggtccgacattctcggagatcgaattgccgccccacgatccgcagcccagcgtcagcgacggcgccaggctgaaattgtacagatcaccgaggccgccatgcgacgacggggtgttgatcaggatccgcgcggtcttcatcttggtgccgaaatcggcgacg

SEQ ID NO: 4279 - DNA, 23192 bp, synthetic construct
  misc_feature 1..23192: note = Synthetic
  source 1..23192: mol_type = other DNA
agcaggtgttttcacagatccgcggggctgcgccctatctcattctcgatttgccgcatcactggtcaggctggatgcgccaaacccttttggcctccgatgagattgtcatggtggccacacccgatctggccagcctgcgcaacgccaagaatatgaacgaccttttggcccggcttcgacccaatgacgcgcccattcgcctgattttgaatcagaccggcgtgcagggtcggccagaaattccattgcgcgaatttgcccgcgcccttgagattgaccccagcctcgtcgtgccctttgaccccaagctgttcggcgacgcggcaaataatggccaaatggtcatggagctcaatcccaagtcgaaaatctccgagggtctcgtccaattcgccaatatgctggcgcgtagaacgacgggagcgccgccgccgccggcgggcgcccaatccttgttcgcccgcctgttggcgcggcgctagggaggggtcgccgatgttcggcaaaagatcaggttcgcccgactctctggccaagccccccgccgcaccggcaggcggatcgtcaatctcgacgcgaccgcagcgggaagacgctcccgcgcgtgaggcaggccaagacgtgcaggcgctggcgaaatcggccgcgccgcgcaaaacctctgggcttgaccagttgcgcgcggcacaagccgggacggccgctgcccccgcctcccccgccgatgcggggggcgaacaggccgaagcctattacgccataaagtcatccatctatgccgccctgctgaacaccatcgatcttggccaattggcgcagctcgaccagaagacagcggcagaggaaattcgcgatattgtcgccgaattggtggcgatcaaaaacgtctccatgtcgtcggcggaacaagactatcttgttcaagacatcgtcaatgacgtcttgggctatgggcccttggagaccttgctggttcgcgacgatattgccgacatcatggtcaatggcgccaaccgggtgttcatcgaagtcaatggcaaggtccaactgaccaatgttcggttccgggacaatgcccagttgatgaatatctgccagcgcattgtcagtcaggtcggtcgccgggtcgatgaaagctcgccgatctgcgacgcccgtttggcggacggcagtcgggtaaacgtgatcgcgcctcccttagcgctggacgggcccaccctaaccattcggaaattccgtaaggacaagctgaccatcagcgacttggtcaattacaagtcgatcagcccagaaggcgcccgcatcctcggcgttatcggggcgtgtcgctgcaatatcgtcatttccggcggcacgggctcgggcaagacgacgctgctcaataccatgaccgcctttattgaccccaccgaacgggtcattacctgcgaagacgcagcagaattgcaattgcaacagccgcatgtggtgcgcctcgaaacccgcccaccgaacctggaaggccagggcatgatcagcatgcgcgatctggtgaaaaactgcctgcggatgcggccagagcgaatcatcgtcggcgaagtcagaggtcccgaagccttcgacctgttgcaagccatgaatacgggccacgatggttccatgggcaccttgcacgccaatagtccaagagaagccatcagccggatcgaatcgatgatcaccatgggcggctatggcctgccgtcccgcaccattcgcgaaatgattgttggctctgtggatgtgattattcaggctgcccgtctgcgcgacggatcacgccgcataacccatattaccgaggttttgggactcgagggcgacgtcatcatcacccaagacgtgctgctctacgaaatgaccggcgaagacaaggacggcaagatcatcggcaaacacaagtcgaccggcattgcgcggccgaggttctgggatcgggcccgatattatggacttgagcgagaactggccgaagctttggacgcggcggagtagtcaccatggagttaggctccatcacgccaatcgtcgctggactgatcggctttctggccctgaccggcgtcgggttcgccctggtcggtggcgagccatcaggcgccaaggccagcaaacgcctcggcgcgcttagcgtcgacaaacgcacgccgcaatccaaggcgcgtaacaccgtcgacaatcaagcgcgtcggcgcaaacaaatcgtcaaggccctcaagacccaggaacaacttgaacggcgcgcgagcctgtcgcttgaggcgcgcatcgtccgcgccggtttaaacatcaccccgaccgtattctgggttgcttcgggcatcacggcactgattgcgatccttccagcggtactctttcgcgcgccgattttcgtgattattggcgttcccattgcagcgggcctcggcttgccgcgcatggtcttgaagaccatggcagagggtcggctgaagaaattcaccaagatgttccccgacgccatcgacgcgatcgtccgtggcgtgaagtccggcttgccggtccacgattgccttaaattgatcgcggctgaagccgaagacccgcttgggatcgaattcaagaaactactggaaaacatctccatcgggttgggcttacaagagtcgctcgacaagctctattcccgcgtcccgtcggctgaggtgcgcttcttttccattgtgctcgccattcagcagtccacgggtggcaatttggcggaagccctgaacaatttgtcggtcgttatccggtctcggatgatgttgcgggaaaagatcaaggccctctccagtgaagccgtcgcctcggccttcatcattggtgccctgccgccggggatcatggttctgatcagtttgatgcagccgaatttcatggcgcccctgtttcacgacccccgcggaccgctttacttggctggcgcagcaggaattgaaggcgttggcatcttcgtcatgcgccgcatgattaacctgaagatctgagctgcagatgggaaagctcgcctcctatatcaccgtcgaaaacataatcatcgccgctgtcgcgatcatggtgtttgtcacggcgaccatgtttgcagagccattgctcaatcgctcaaagctgagcgaacgcatgaagtcgatcaagttgcatcgcgaggacctgcgccgccaatcccgatcgcgtatccgcaatgagtcgcccaccagcctgcgccgaactgacgatagtctggcaaggcgggtggtggatgcgctgcaattgtcaaagttgttggccgatcccgccgttgttgggaacctggctcaggccggactgcgcggcccgcgacctgtcaatacattctattttttccggctggttacacccttcgtgctcggcagtgtggcggccttttacatcttcgtgttgcacgcgatcaaacttcccggggcgacgggattttgcgctgtcttcgtcgcctttgtcatcggtttctatgggccgaatatttatatttccaacctgaagaccaagcggcttgaggaaatcgtcagtgcctttcctgacgctttggaccttttgctgatctgcgtcgaagcgggcatgtcgatcgacgcggccgtgcagaaggtggcgggcgaggtcggaacccggtccatcgccttggctgaagaattatcgctgttggccgccgagctctcctatttgccggaccgcagcatggcctatgaggcgctggcccagcgggtcccctatgccggtctcaaatccgtaacgaccgccatgacccaggctgaaaaatacggcacgcccctcggtgtggccttgcgcaccatggcgaaagaaaatcgcgaaatgcgggtggcggacgccgagcgccgcgcctcagctctgcccgcaaagctgaccgttccgatgattatctttttccttccggcgctgtttatcgtcattctcgggcctgcctatttgagcgccacggccccttcaaagcccagtgtgatgcagccgaagggcaagacctagggtcgggcaggcgaggcgagcgtcgcagcactcccagttgcagggcttaccgttggggccacttgctggggctggttttgtaaagcccgcaaataggccagattgttctgggccagttccggcgggaggtcttcgcggatcatggtttccgcctctttggtccgcccgtgcagtcccaaaaacagcgcaaggttttggcgttccttgatgcccgcactgggctgagccaccgccgcgcgcagataggattcagccgggccgacgtcgcccacttcggcgtaagcgagcccgagattggacaagaccgcgggattgttcggcgacagtttgagcgcggtcatataggcttgtcgcgcctcgtcatacctttcggtttgttgataggcgacaccaagcaaggagacgggtcgccagtccttcggggccaatttcgccgcttcgcgcaagggttggacggcgtaaaacccctgccgaccggcgatgcggatgcgcccctgctccaagagcgcatcgaggtttttcggtgcaatcaaaagcacccgggtcacggcggcatccgcctcatcgaaacgctccaatatcctcagcgcccgggcgagagaaacgccggcaaccaaatcgctggggtcaatatcgacctcatgggcccagaaggtggcgcggcggagggggtctagcctttcagcagcggcccgatcagcagccgaggccttgaccggctgaggcggcggtagctgggcctgaggctggcggttggcgcgcggcgattgcgccggtggggaagccgcctgaccggaattggccatctgggccatagccggtccagcgccgaaggtcgcgcttagcaagatcaaggcccaacgcacgtcgcgtcctggacttttcatgacgccttcctgtcccatttatcggtagaaggtcggaaggatcgggtgactcgcctcaatttatggttaacaaaattgaaacgcgaagcagagatgggtcgggcgtggcgacaaagaggattgaaagcatgcagggctgggaggcagacgcttacaaggctgtggaaggcctcttcgtgcaagacagttccaccgcaggtttcctcgaggccattagcgaatccgagtttgcgacactcaccgccacggaccaaagccttcaggatcaagcggccttgcacgacttcgccgctcaagccaaccgattgcttattgttcgaggtccagatggatcgccgcacgcctatcttggtctgggagcgggcccgccacgcgcaacagcttttcgttccgcgccaagccgactgccgccgggcgactggcgcatcataccgcccgcaggcctaaatcccttggactgcgtggtccagtttggcctgggcgcctatcaatttccaggctggaagtcggcttggcgcgaccttggcgtgcggttggtagcggcagacttacgcgagcaagcgcttcgcatcgtccgcgcctgtgcgctcgcccgcgatctggtcaactgtcccgccagtcatctcggcccggcggatttggaggcccacgcccgcgccctggcgagcgagttcaaggcatctgtgacctgcaccaccggcgatgcgctcctcgccgacggctatcctgcggtccacgctgtgggccgggcggcggccaaggatcgcgcgccgcgaatgatcgagctttcttggacatcgcctgaagcgcccgccgagcccccggttgtggttgtgatcggcaagggtgtgaccttcgatacgggtggcctcgacctaaagccgtcttcggccatgcgtctgatgaaaaaagacatgggtggggcggcgcacgccctggccttgtcgcgcatgatcatggaagccaatctgcccatttgtcttcacaccctgatcccagcggtagagaacgctgtgtcggggtctgccatgcgccccggcgacgtgattgcgacgcgcaagggtctcagtgtcgaaatcggcaatacggatgcggaagggcggctcatcctggccgacgccttggcccgcgcgggcgaactttcgccagacgttacgattagtctcgcgaccctgaccggcgcggcacgggtggcgctgggtcccgaagtcgttcccttctataccgaccaggacctgcttgcagacggattggcggacgccgcgcaagcgaccttcgaccccctgtggcgtatgccgctttggggaggctatgaagacgcgctcagctccgacatcgccgatcttaaaaatgatccggacggttgggcacaggcggggtcggtcaccgcggcgctctttttgaaacgcttcgcgccctctggggacttcgtgcatttcgatatcttcgcctggaacccgaaggccgggccaggacgacccgtcggcgcggaggcccaagccattcgggcgctcgatcactatctttgccacaggttcgacgccggatgaggcccgatccccgcctgaccctatgccgtggcgacctcgctgacgcccgattggagggcatctttcctgcggccgcctatcgcaccacgccgggctttcgcgtgcagagtcggctcgcggcggttcgtaaacagccagacccgcaagccgagcaggtgtcggaactattgtttggcgaacggtttcatcgtctcgaggcggtggacggctttagtttcggccagtgcgatcgcgacggctatgtcggctatgtcgcgtccgaggcgctcgcccctgctacagaccaaccgcttgcccgcccctatcgtgtcgcccatctgacgacatttgcctttcgtgacccctcgatcaaggcgccggcgcgcggtccttttgcgcttaacagccgggtggaggtgacggccgaggaagaccgatttttgtacgcgcccgaggtcggctattttgtcgccgatcatctcgccccacttggtcaatttgaacgcgacccggccacggtggctgagcgatttttacacacaccctatttgtggggtggatcaagcgctttgggtgtggattgttccgggcttgtgcaacaggccttacgcgcctgcggcatcgcctgtccgcgcgattccgaccaacagcaggctttgggaaaggcgctcgagcctggtgcaggcgctctgcaaaggggagacttggtgttttggcgcggccatgtcgccatgatgctcgatgacaaaaacatggtccatgccaatgcccgtcacatggcggtcaccatcgaacctttgcaggaagccgtggagcggatcgcggctgaccagggccaccgaccggtctgttatcgccgcctcgccatctgacctccatgcccgccaccccgcgcatctcccgttcccgccgccgccgatgggtcttgatcctggccttgagcctgatggcattgccaatcgtccaggtggcggctttccgcttccttccgccgccgatcaccgtgctgatggtcctgcgcgccgtggagggaaaggggctgaccaagcattggcgacccttaaaccgcatttcgccggccttggccgaatcagtaattgccgccgaagattcaggcttttgcagccatcacgggttcgactttcaggccatggaaaaggcggcccaggccaatgcacgcaaacctggcaagatccgcggcggctcgacactcagccaacagaccgccaagaatgtctttctctggcccgggcgcgactatgtgcgcaaaggcctggaggcgggctataccgtgctgattgagaccttttggggcaaaaggcgcatcctcgagacctatctgaacgtggtcgaatgggggcctggcatctatggcgctgaggccgcctctgaaacctattttaaaaccagcgccgaccgcctcagccccgatcaagccgcgcggcttgccgccatcctgcccagtccgttgaaatggaaggccgttcatcctggacactatgtcgcgcgccgctcggccaagatcggcgcgcgggcggaaacggtccgcgaggacgatctcgccttttgcgtcaggtagggcaaagtccgatctcgttggatcggactttgctcctagtctttataaatagcgcattttttgcgacgaaccggcctccacttcgtcggaaaatgcttgggtgctaaagcgccaccacagccgcctcgccgacctcgtcgccataggcaaggcgtgcgccatcggcggatagggcgatggcgctaatggccgcacccttttccgcccgggcgaagggccgggcttggctttgcagatgcacgctccagacccgcccgtcggagaggcccgccgccacccgcaagcccaaagccgatccggcgcaccgcaccaccatggcgctttcatcgacaccgatctcgaccgcctccttgcccatcggcccctgagccccggcaaagggccagatcaccacgcccggcgcgccggacgtcgccagaagcgcacccttagagaggaaggccagcgagcggatcttgccgggatagcctgccatcttcatgtccttgccatccgacagccgccagccatgcagcgcgttttcttgcaaggacgacatcagaaagcggccatctgggctaaagcgcgtggcgagatgggcgcccggccatttcatcagctgcggcttttggtcggcaatgcgtccataccatagcgccaccccgccataggttgcggcggccagacgacggcccttaggatcaaaggccagatcggcgacgctgcgctcatggctaaacctgcgctcaaaggctgggtccttgacatcgagcaccgccacctcacggccaaaggccgctgcaatcaggccgctctcagcactgaccgccaccgcatcaatccatttgccggaaaagcttttcagctcggtcgcgccttggcgacgggtccagaccagccgtccatcatcgccgccggtcaccagaccctcgccgctcgggtgcacctcggcgcacaatattgcgccctgatgggcacagacgcgcgaaccgtcttcgaaggcaaccgtgccatcgcccaaggcaaagatcgccccgtcgcggtcgaacacggtggcgctaacataggctgagaaagaatagagcatgggggctcgatactccgtcacgcacggcttgcctagtctggggaaaggacgcgagcgaaggcgaagggggcgcctctcaaacaggctgaaggcgggtttggtggcggcagcgcaggattctgacgctcgcggcgataatcaggctttacatcgcctcggtttgtggcgatctatcgccgaagttaaggagcgccgcttgaaagcggcttgggagacgcaacgaaatggcggcgaaacttgccggacctgctggtggcaataggttcgacctgggacaaaattccgatatcaatgtgacgccgttcgtcgacgtcatgctggttttgttgatcatcttcatggtgacggcgccgctggccaccttgtcgatcaagctcgaccttccccccgcccagcccccgacgacgaccgccaagccaaagccgccaaccctgatccagattcagcaatcgggcagcatgctggtgggcaccggctcgacgacgcaccaaaccacagacgccagcttgatcaatgacgtcaaatacgagctttcgagcagcaagaacgacaccgtcttcattcgcgccgacaagcacgtcaaatatagccagttcatgaatgtcgtgaacgagctgcaagacgctggcctctacaagatttcgctggtgaccgaagacctgtcgaacgaaacctaggatcacgcccagccaatcccattgaaaaaccccgcctctggctagaggcggggttttttgtgtcggccaggcggcttgctccaaaaagaagccccggcagttgcgtgccggggctctcttatcgaaaggaagccggtttaatggaatccccttccgggtaatcctgcggggccggaaccccttaccgtgacttccctaccgactcccgaacgaacacttgcatcatttcaaagtccgcgtcaatgatctcaaagcaacttttggggtcgaagatggatatttgtgagaacctaacgctcggcattgatctgggtatcgcatcttgcggctgggcattgatcgaccaggacgacatgaacccaggacgtattgttgcaatggggtcgcgcacctgggatgcccccgaaacggataaggaccgtaggcccaccaaccaactgcgtcgggggcaccgaagcatgcgtcgcgttttgaacaggcgtcgtcagcgaatgagcgaaatccgccgcctatttcacaaacagggcttgatcgaagtgcaaggaccgacgggcttaaggatcgctaaactcgacccttggaaccttcgggcggaaggcttggaccggaagctgacggggcgtgaattagcggttgcacttggtcacattgcaaagcaccgcggcttcaagtcaaaccgcaaaggcgagcgaggcgctaattccagcgatgatagctccaagatgttaaaggcgatcaacgaaacccgagaccggctcgcccaataccgtacggttggtgagatgtttgcatgtgacgacgcctatcgtgaccgcaagcgcaaccgagacagccagtttacccactcggtgctcagggatgatcaagtgcgtgaggtggcgcttttaatggatgcgcaacgccgcatgggcaattctttagcatccaacgaccttgaggcggcgttttgtcaggtcgcattttttcagcggccccttcaggacagcgaacaccttattggcgcctgcgcattcgaaccgaatgaaaagcgatgcgcaaaacgtgcaccatcgttcgaaagattccgccttctttgtcgcctgcgcgcgttatcgatttctgatggccacgaggaacgccccctcactgccgatcagatcgccatcgccgaggcagagttcggcttgcaaaaaagctacaccttcaaaagactgcgcgaacgcctggaactttcggacggtctgtcgtttagcggcgttgcgaaatctgaggaaggtcgcgacttcgtcggtcgcgcaagtaacgcggccgaaggtacggcaagtttgcgtggcgtcattgtcgattcagcaggtgaagtcgcttggcagtcgcttcaaagtaagcctgaggcattggatcgaattgcgtctatcatcagctttcgtgaagatatcaactcaatacagaagggcctgaccgagctttgtcttgatcaatctctggtcgacgccctgatggcggcggtcgaagacggtcgaccctttaaagccttttccggcgccgcgcatatctctgcgaaagccgctcgagcgatgcttccctaccttcgtcagggattaacctatgacaaggcagccgccgaagctggctatatccataccgatcgggtcgggccagggcgggcggaaggaactcaacatgagcgcatggtccacgatatcaaatgggtcgacgcaaacgtcgccaatccggtagcccgtaaagcggtgattgaggcgttaaagcaggtatacgctattgtgggcctatatggcttacccggcgcaatccacgttgaactggcccgtgaggtgggcaaaagcagggaggagcgtgaggagatcaagtcaggcatcgacaagcgcaatgccgaaaaagaacgccttcgggcccaatttaaggaaacttgcggtcaaaatccctcccgcccagaggatttgcttcgatttgagttgtggacggagcaaaatggtcgctgtctctattcagatcaggcaatcgcgccgcatcaaatcctagcctccgataatagtgttcaaattgaccacattttgccctggagcagatcgggcgacgacagtttcgtcaacaaaacgctctgcttcacacacgcaaatcagaacaagagaggactgactccctttgaatggttcggcgctgacgccgaacgttgggaaacctatcgcggcgtaattgaaagtattaagtcgatgaaaggtcggaaaaaacgcaactacttactgaaagatgcgtctatcctgacagaaaaatttagaccgcgaaatcttaatgacactaaatatgcgacgcgcttggtcctcgatctactggcccgcttgtatcctgaaagcgagcgcttcactggacttcctcgccgacctgaagaagcgcggcgtaaacgacgcctttttgcgcgacccggcccgctgacggatcgtctgcgtcgtgcttggggccttcaagggctcaaaaagagcgcggacggcaagcggatcgcggatgaccgccatcatgccctggacgcattaattgtcgcagtcaccagcgagcgtcgactcaacgagctgacccggtttgttcaggatcgtgaaaacgccggtttatcgcgcgattttggggctatcgaaccaccttggccgggctttcgcgaggaagcagaaacccgccttcgtgaagtgttcgttagccgagcagagcgtcatagggcgcgtggcgaagcgcacttgcaaaccgtgcgtgggttcgagcatgaaactcaggggccggttgtgtacgagcgcaagtcggtcgaccttcttagcgaggccgatctggatcgcgtcaaagaccctgatcgcaacgcagcgctgatagagtcgctgagagaatggattagagacaaaaaaccaaaggaccgaaggccgctatctccgaaaggtgatccgattgcaaaagttcgtctaaggaccacgaagaaggtcgatgttttggttcgagatggcgtggcggaacgcggagagatggtgcgcgtggacgtgtttcgaaaacaaagcaaacgcggtgcatgggagtactatttggttcccatctatccgcaccaggtattcgacccaaaggattggccaacgccgccaaaccaagcgattcgggctaacaaaccggaatctgaatggtcccagatggatgagtcctacgagttcgcttggagcgcctatccattttcatttttggaggtcgagaagtcagacggcacctttatcgacggataccttcgtggggttgatcggtcgactggtgccatcggcctatcaccccattactcccgagacgaaacgattcgtggaatcggtgccaaaacgctcaagtcgattaataaattcaatgttgatcgcctcggattccgtaaccaagtcctccgtgagaaacgtacatggcgtggcgcggtctgcacctaacccaaccttcccggctgtccttggcagatgatcaggttgtggtctgtcagaatgatggcgaggtgcgtctggctttggaagacgtggcgtggattgttatcgatagccctcgcaccagcctcaccgcttcgctaatagcggcgtgtatgaattttggtgtcgcggtgatcttcactgacgcaacccacactccgtccggcatcgctctacccttccaccgtcaccaccgccaagccgacgtcgccataaagcaggtttccgcctcggcacccttgaaaaagcgactttggcaatcattggtccgcgcaaagattgaaaatcaggccgcagcattggaggcggtgaacgcgagcgggggacataccctgcgggaaatggccaaacgcgtaggctcaggtgatccgagcaatattgaggcccaggccgcgcgttattattgggggcagctttggaaggatttccgccgacaggatgacggcgaccgccggaacaagttattaaattacggctatgccgtggtgcgttccggcgtcgcgcgcgcgcttgtcgcctcaggccttctgcccgcactggggttgaaacacgccagtgtttcaaacgcgttcaatctggccgacgacgtcgtcgagccctttcgtcctttcattgatgttttagcttggcgaagggttggacatggagcgccgagccgcgacgagctttcggttgaggaccggcgaactatggcagggtgtctgatgggggagacgagcttgggaggggaaacgctgacccttctgaccgcgagtgagcgaactgcagagtccttggtacgcgctattgaaggtcgctcccccgccatccttcttttacctaggctcaattcaactcggtcaacgtcatgaaaaccgacgaggttcggatcatgtggctgttcgtttttttcgatcttccggtcaccaccaaggctggccgccgcttggcgacgcgctttcgtaagttccttaaggacgatggctatatgatgttgcagttttcagtatatgctcgcgtgtgtcgcggcgaggaagctgtggacaaacatattggtcgcgtgactcggaacctgcccaaacaaggcaatgtccgcaccctacaagtgactgacaaacaatatgcgcggatgagattgctgctcggggaggctgaaaaaaatgagcgattcgctccccagcaaatggttttgctctgatttccgccaccttcggacggcgaaaatcagagcaatttcaaacctttagtcgtgatatagcctaccagatgggagtcggtagggaaaccacggccgcgcgcgacctgttgcccaccttgtcgccagcctaccagatgggagtcggtagggaaaccacggcaggtcataacgcacccatgaagccgagcgcagcctaccagatgggagtcggtagggaaaccacggcaaaggcgagtgcgccgtcctggttgccggaagcctaccagatgggagtcggtagggaaaccacggccttcaacgcgctcttgagcggcaatgtcagagcctaccagatgggagtcggtagggaaaccacggctcttatctacgccgctcagcaggctcctgcagcctaccagatgggagtcggtagggaaaccacggcagccctgcttgaggatatgttcgtcatcgaagcctaccagatgggagtcggtagggaaaccgtgagcgaatttggaaatgagtttagagtctgaattacttcagttttaatcccatcaagttttagcgctcccttaccccagcatgccgcgttcatcgagcagttgggcgatttggacggcgttgagggccgcacctttgcgcagattgtccgacaccacccagagcgacagaccgtttttgatcgtcgggtcattgcggatgcggctgacaaagacgccgaactcgccgacgcactctttcggcgtgatgtagccggtcgggtcgtgcttatcgatgaccaccacgcctggactgtcgcgcaagatgtcgcgggcgtcgtcggcgtcgagcggtgtttcgaactctagattgaccgccagcgaatggccgacaaacaccggcacccggacacaggtgacggtcagttggatcgacgggtcgatcattttttgcgtttcgagccacatcttggcttcttcatcggtgtagccgtcatcgcggaaggcgccgataaaggggatgacattaaaggcgatctgcttggggaagacgtgcggctcggtggggccaagcacgaagacgcctttggactggtcccaaagctcgtccatggcctccttgccagcgcccgacaccgattggtaggtcgagaccacggcgcgcttgatcctggccgcatcgtgcaaaggcttgatcgccaccaccagttgggccgtcgagcagttcggattggcgatgatgttttttgcacccacgccttcgacggcgtctgggttcacctcaggcacgatcaagggcacgtctgggtgctgacgccaggctgaggaattgtcgataacaatcgggccttgcgcgccgatcttctccgaccaggccttagagaccgatccgcccgccgacatcaaaaccagatcgacctcagaaaagtcgaaactttccatgtccttacatttaaggatgcggtcgccataggcgacttccttgccaaccgactttcgcgaggccaccgcgtgaatctcgtccacggggaattccaattcctcaaggatgttcatcatttcccggcccacattgcccgtggcgccgacaaccgcgatgcggtagcccattgtctcgtctccgttgaggaaggggcgcaggcctagcttttcctgacccgaaaggcaaggcacgcttaagggtgacgggcgcgccactcttgaagggtctggccgtacatgtcgacatcatgggcgttgggctcgggaatatgggcgagacctaagcgtttcgaccccaaccggtgggccagcgcaatcgacggcccattggccgggtcgatggaatgaatgacctcggtccagcccagttcctcaaaggcaaaagccatggcccgcaaggcgccctcggtcgcatagcccttgccccaggcgtgacgcgaaaacgcccagccgacttccgggcccggccatccttccggtcgccaaggtcccaagcgcccaatccactggcctgaggccttttcaatgacggaaaacatcgaaaaccccatcatcgaccaagccccgatgaccgaggtgatattgcgccaggccgacagcggcggttgtggcccgcctaacaggcgcatgacctcggcatcggccatgtgggcccgccaggatggaaaatcctcagcgcggggggcgcgcaagatcagccttggcgtttcgagcaccggggtttcaagcactgggatttgcatcggcttgcgactttaaagttttggtgtggtcttgactgtcgcagcccaccttaagccaagggatttttgggtccaaggcccaatgcggcgaagctacttatagcgcaaaggcgaaaagtctgcgaccttgcgtctccctgtcgctcctgattttcggagactgccgcaatgtccctggccctctccgccgcctattggtgcgtgctcatcgcctgtctcctgccctatatctgggtcggcgtcgccaaatggggcccgcattatcagaatgatcagccgcgcgatcttgaccagtatcaagggtttcgacgccgggcccaccatgcccatacaaatgcctttgaggccctgcccttcttcattgctgccgtggttatggcccaccagtttggggcgggcggcctttgggtcgatggcttggccgtgctttgggtcctgttccgcatcggccacgggctcgcctatattaccgaccgcgccaccttgcggtcgcttttatgggtcggggcctttatcgccaatctcgccctcttcctcgcgcctgcctttagctaagcgcgttgcggcacgccgccgccatggcgaccggcgccagcgccaccgaaaaaaggctgaaggcggccagcagggccaagggcggaccgatattgagcccagccgccgccgcatctactgcacctgcaccaaagaccaccaggggcgtaaagagcggcaggacaatgaccgcaatcagcaccccgcctcggcgcgcaccaagcgccaaggccgcgccgaccccaccaataaaggcaaagcccagcccggctaacaggctggcaaggaagaggatcggggcaaggcttggggctgcgcccagcgtgatggcgacgagcggcgcaaccgcggccagcggcaagcctgtggcgatccattgggcaaggcacttgaccgctgccaccactgcaagacccggttcgcccaaggtgagcaggtcaagaccgccgtcttcatagtcgcgctcaaatagccgctcgagcgtcagcaaggaggcgagcgccaaactggcgaaggctgcacccggcgccacggcagccagccgggcgggatcgggtccctccgccaaaggcaaaagcacagccacgcccgcatagaagccaagcgccaagagcggcccgccaccgcgtcccaaagccagccccagttcgcgcccaaacagggccctgatcggacctctccccatcccctggcccatcacttcgcctcctgcgggatcgacaccggccgtacaagcctaacctcgcgggtggggatgggtaagggatcatgaacggcggcgagaataatcccgcccttggctaaatggccgaccatctcctcggcaaacctggcgcgcgtggcgatatcgagcggggccatgggctcgtcaagtaaccacaatcgccgaggcgcagcggcaagcctcgccagcgccacgcggcgtctttgaccggcggacagccggcgcgtctccaatcccaaaagcggtgtcaggccatagcgctgcacggctgcgtcgcgggccgccatcgaccctcccgcccaacgggcccaaaagctcagctcgctttgcaccgtcgcctgggctttcagcccatcctgatgaccggcgaaatgaatgtcgtggctttgggcctcgcgcgggtcgagctcaccggcttggccaagatagcgcagccgtcccgcactcggctgggccaagcccgccaccacccgcaacaggctcgtctttcccgccccgttggcgcccgtcaggctgaccgcttcgccagccttaaggtgcagattaagctcagaaaatagcacacggccgccgcgcgtgaccgcgaggtcttgcaagacaagctcacagatcgcatcgggtttcggggcatccgccgtttcggtcatggacgagtaaccctttggggtttatggagacggtcggccgcgcgggaaagacgcggcgcgcgagcggacgctgtgtgtccgcccggtctgcgcgcgaacccgcccctcatcctagggccccggattcccgggtcaaaggcggccctgcacaggagaccatgtgtcatgccttccattgacagcctcaatacccgccgcgaacttcaggtcggcgacaagacctatctctattacagcctcaaggccgccgaggaagagggtctatcaggcgtttcgcgcctgcccgcctctttaaaggtgctgctggaaaatctgttgcgcaatgaagatggtcgctcggtcgatgccagcgacctgcgcgctgtggccgcttttgtcgataatcgcggccgtgccgagcacgagatttctttccgtccggcccgcgtcttgatgcaagacttcaccggcgttcccgccgtggtcgacttggccgccatgcgcgacgccatgttgagcttaggggctgacccgaccaagatcaatccgctcaacccggttgatcttgtcattgaccactcggtcatggtcgataattttggcacgccgaccgcgtttaacgccaatgtcgaggtcgagtaccaaagaaatggcgagcgctaccgcttcctgcgctggggctcgtcggccttcgacaatttccgcgtcgtgccgcccggcaccggcatttgccatcaggtcaatctggaatatttggcccagaccgtctggaccggcaaggatggcgaccacgaggttgcctatcccgacactgtggtcggaaccgacagccacaccaccatgatcaacggcttggcggtgctcggctggggtgttggcggcattgaggcggaagcggccatgctgggccagcccattccgatgctcattcccgaagtgatcggctttcgcctgaccggaaaattgccggaaggcgccacggccaccgaccttgtactcaccgtcacccaaatgctgcgcaaaaagggcgtggtgggcaagtttgtcgagttctgcggctcgggcattgccaccctcaccttggaagaccaagcgaccattgccaatatggcgcctgaatatggcgcgacttgcggcttcttccccgtgtctgccgccacactcgcctatctggctgaaaccggccgcgcaccagagcgggtggccctggttgagacctatgccaaggcgcaaggcttgtggctggatgaaaccaccgaagagccgcttttcaccgacatgctcgagcttgaccttggcacggtgcagtcctcgctggccggacccaagcgtccccaagatcgcgtgcccttggccgaagctgcgcccgccttcatgacggcgctctctggcgattttggcaaggcaggcaacgaaaccttccgcgttccggtgaagggggacgcaggcgaggccagctttgatcttggccatggcgacgtggttattgccgccatcacctcctgcaccaatacctcgaacccgtcggttttgatcgcggccggactggtggcgcgaaaagcccgtgcgcgcggcttgatggtgaagccctgggtaaaaacctcactggcgcccggatcacaggtggtcaccgactatctgacccaatcgggcttgcaagaagacctcgacgcgcttggctttaatctggtcggctatggctgcaccacctgtatcggcaattccggtccgctcccggccccggtgtccgctgcaatcgccgaaggcgatctggtggcggcggcggtcttgtccggcaatcgcaatttcgaaggccgggtcaatccggacgtgcgggccaactacctcgcctcgccgcccctggtggtcgcctatgccttggcaggcaccttgcaaaaggacctgatgagcgagccggtcggtgaaggcgccgatggtcaaccggtttatctgcgcgacatctggccgaccaatcaagaaatcgccgatattcagcggcgctatgtgaccaacgccctgttcgcctcgcgttatgccgatgtgttcaagggcgacgcccattggcaaggcatcaaggttgaaggcggccaaacctatggctgggacaaccagtcaacctatgtgcaaaacccgccctatttcactggcatgaccatgacgccagccccggtgacggatgtgaaggaagcccgcgtgctggcggtgttcggcgattccatcaccaccgaccacatttcgccggctggcaatattcgcaaaagctctccggctggcgaatatctgacggagcaccatgtggatgcgaccgactttaattcctacggcgcgcggcgcggcaatcatgaagtgatgatgcgcggcacgtttgccaatatccgcatccgcaaccgcatcacgcctgagattgagggcggcgtgaccaagcacttcccgtcgggcgaggtcatgtcgatctatgatgcggccatgcgctatcagtccgaaggccggtcgctggtggtgtttgctggcaaggaatatggcacaggctcgtcgcgcgactgggcggccaagggcacgcgcctcctaggcgtgcgggctgtgattgccgaaagctttgagcgcatccaccgctccaacctcgtcggcatgggcgtgcttccgctgcaattcattgaagagggctggcaaaagcttggcctgaccggcgaggagatcatctccatccgtggcctgacggaaatcacgccacgcaagaccctctatgttgagctttatcgcccctcggaccaccgcacggctcgcttccccgtgcgttgccgcatcgatacgggcaccgagctcgactattaccgcgcgggaggcgttatgcctttcgtgctgcgcaatctggcccgcgtcgctgacgcggccgaataggcgcaaaccttgcggggggcggtccaggcgcgggaaggttttttccgcaaggcttgggccgcgctcacgcagaggtgaggccagtttggcgcaaacctggtctaagaacagcgggacatgacgagatcgatccggacccttggcgccgccttcagtgctcttatcgggctctatgccctgcctgacgccgccatggcgcgcgcgccagcccagcctcacctggtggaattgttcaccgcccagggctgtgcgggctgtccagaggccgatcaaatcctgaaaggactaacgacccgcaaggacgtgatcgccctcacctttgcggtcgactattgggattatttgggctggaaggacagcttcgccaagccggaattcaccacccgccaagccgcctataagacaaggtttcgcttgcgtgaaatctacacgccggaatttgtcattgatggacgcagcgaagccgccgccgccacagcccccgccgcccttgagacggccctgaaggccaggcttaagcccagtgtccatctgcgtcgccagggggcacaacttgtggtcagtggcaccgcacccgcgggcggcgccgacctctggctggtgcgctacgaccccaagccccacgatgtgaccgtggcggcgggcgaaaatcgtggcaagaccttgaatgaagtcaatgtagtgcgcgagctaaagcgtctgacccactggaagggcggggcaaggcacatcgccctgccggccgaaaccgagcccggcctcaccaccctcatcctcgcccaaaccccccacggcggcgaaatcctcggcatagcgcgttaggtcgcaaggccgcctcggctctcggtccggaggagcgggttgatgtgtttttcaagattgtccgctcatcctggagaaaaacaggtcagtcgttgtcggcaaaatatttgaaggaatatatttacagtataagcggcacatgcttctgtaaaaaagggctttatatcgacatattcatttaagaagctgttgtaacaaacatcaagtggaggcaggtaaaccccgtgaaatattttgtaaaaaatcctgacaagacccagccagaaataaattctgtaaaagctgatgggatggcccccaaaaaagtaaatctaaatttgattctaaaatagaggcagctccgtttaaatggcaaaatttatggaaaaggataatattcgtggatatttaaattattttatatttttatttgttttggtaatatttatatatatgatgatttattttattccgttgccaccgcttcaaggtcacacccctgattatggctctaacgaatatataagcactattcattatctagaaaattttaaacgactagtcctaatttttatttttggtgttatgcttgtagttggggttgttgtttttgcgctgcgctggcggttttgggctagattggggcattttagaattagggcaaggtaaaggcctatggcccgctcagaatccaatctggcaggtgcctcagcatggaccaccaggatggacccatccttggcatcacgccgacagcatggccttaacctattcaggacgcagcggaatccgccgtgctggcttgccggtggcgtcgaaaaacgcgcctacaatcgctggcgcggccaatgcattggcgctttccgagccctggccgtaaatctcggcgcctttccagggcacaaccgctcgccttacccgaggggggtggggggcggtgcgccttatttctgcgactgcttcatcagggctggcggatagcgctcaccttcgatctttaccttgcccgcggcgtcttc

SEQ ID NO: 4280 - DNA, 23183 bp, synthetic construct
  misc_feature 1..23183: note = Synthetic
  source 1..23183: mol_type = other DNA
gccctcgcccggaagatccggtgcctgtccatcaagttcataaatcgccatgctattctcctgtttccatccccggctgaaaacagggatttacagcttgggcggttcgtttcaacccgaggtttgcgccgttacgtctgcaactctggcgcaacagggcaaatccggccgtcctccagggccacagccccccggagcggcacgaaaatacgcgcctggcgatcggctgccatggccgaaggcctgtacccggctttccggcacatccggcggccatgctggcgggcagccctccccatgggggatctgcagttgaaagccctggagagggcagagtcggccgcaaaccagtctggtcccggccacaggctgccgccgccagcgcggcgccttcggcaacgcgggtggtccatctattgtggtgcatgtattgcagggggcacggcagcgctgcatgcggcgattgtgacgacagccctcaccacggcccatccgcaggatggctgaacgcaggctcgcgaccgcaagggagcggcccctccggggacaatcgtgcatgtgtgaaactgtgaagcgtggcgcgacagagcgcgcatgttctggcgcagcgtggcatgatcctgcgcagattcgcagcctcctgagccgacagaggccaatgatggcgcaggcccgcaaggtcagaaaccgaacctatctcctcccgatcacacttgccgtcactctcgccgtggccgcgaccacggtcgtcacgcatctgctctggccgacctttgcagcgggaacatcgggcaccagtcccatgctgccgatcagcattggcggcacggtgttcaacgttccgacggcggcgatccgcatgaaggtccagcgccaggccggcccacaggaacgcatcgacctcgactttcttttcccctcgctcgctcctcccggccccgccaagcgggtcaccgccaacaccatcaatgaagccggtcggccgcttgatcgcattttcctttcgatcgccgtcttcgacccggccatgccacccgaaacccgcatcagcgcaatctatccacgctatctcgaccccccggcgaccatgcccgaggatggccttgtgatgcgccggttccatgccgacagcccctatgccggtgaggatctgttttctgccatcgaccccgccttcaatgcccgctgcacccgtgacgccaccacaccaggaatgtgtctcgtcgagcgccggatcgagagtgccgacctcatcttccgctttccacgaagctggctgcatggcgcgtggcgcgacgttgctgccgccattgaacggctgacggtgctcctgcgaagcccgcggcagcgctgacgggccccgcgccggccgggtccgtctttcgaacgcaggggcacatccctgggcgctgccggaggcgtcggcaaccgcagctttccggatacctccggcagcagcaactgcctgcggcaaagccagacctgcacgcgccgggtcgggacacgggcaagcccggcagaaacagacaaatcctgttcagccggcgaattgcgtctcattctccattcccggtgcgcgggtggacgaaagatcgaagcgcgcatgttccgccacctccctcatgcgatggttaacgggacgcaggaaaccaccgtgccgcgcccgcttccgcctcctctcgcggcaaaccgggtccgccgagcggaattgttcctgcagaacagggccattggcgggaattcattcaatttttatagttcggatcaagattgcgttaaacgcattaaatattacgactacaatatccagagtcagcaatctatatataccaagaaatccggcatttgaggttaagagcgatgtattttctcctgggtgatgcctttcgaactgttggtcgcacctgtgcaaccctattccgtgcagccgcatgtcagactttatttcgcgcgattcgacgcagcgcatccggttcggtctcgatcacattcgcgctgaccgcgactgtgttgctgttgatggccgcagtcacaatcgaatttgcccgatggagcgccgaacgggccgccatgcaggtcgcactcgacaattcggtcgtgtccgccgtaaaagccaaccagatgaccaccgaatacgccgacagctttttcaaggcgggtctcataaacacagtggccgcccgatcggtggagtcacttccgaccttgagttgcgcgaaagacgggtcgacgttcacctgttctgccaacggagacctcccgacgatgctggtcggtgcattcacgggggtgcggacgctgcccgtcaaagtcgcgtccgctgccggaacccctgtgtccggaaacctgcagccgaagagcgtaaagttcacggtctcggacgtgaaagggtggtcctggaagaaggtcaccatctggacccacaaacccggcaacgtctgggaagcgcctgtcgcaagcatcatctaccagcccagcgatcgaaccgccggtgcgggtgtgaaaggagatgtctgtcaggctctcaccggccagaagtgcgtaagctgcccgggcagcgtatgcccggcgattgaactcggctcggactatgattttggctatctgtcaatgcaggtctggaccgatggctgtgacgacacaaagatggacagcggattcaccagatctccagcgaaccccccgtcctacgtgtcctgcaccgccctgccggccgggcgtgacaagaccaccaccgccgagtacaaggctggccagttgacgacatttacgctctacaccaacaagaatccggtgcagattgcaccttccggcacaaacacgccgataaccggtgctcctcctcatctttacgtcaacggctcaccgatcccgcttgacaccgcgggctcgcttctgaagtacttcgattgcaccaagaacgtgacccaggcgtgggaagacacgctgaatgggccgatcagcaattacgcctgggagacccaggacttcaccttcagggtcgcgacggaatgcgcggccaatcccaacttcaaccaggggggcggtccgggcggcatggtgaggcttacgaaatagcccaggccggggacaggcgcgccccccgaccggcgttgcacacgcggcaggcggggtgtgccgccgcacagggatgatcggctgcgcctggcacggctttctttctgtaaagcgggatcggttcggtctcggaaccggcacctggcattttcgtgccgggagacattcaatctccggccgtttacctcagcacagccgagccaactccccccgtaaaccgcgcgcccgccctatggaatgcggccgcgcgggaaacggatccgatggtgccggatgccatggcacagggtgcgattcgcctgtttctccccacagcaggccatccctgatttctgtctgcgcaagattgccacctcccagcccgccagctggcgccgcgcccgaaacccgggggctgtgccgacagggaatagcaccccgagggtccccaagggtccccaagggtcccgaccgggcgacgccggaccagcgcgcgcaaaagaaccggatgaagccggataaggtgtcaccggggcgccccgcgagaacacgaaaccgacccgcgcagacctggcgggcatccgatgacttccagtcaccgcaacccgcagggattgcagcactcttctttgccgggatggcgccggctttcgttccagcgccctgtcatggactgaactcgccctgcccgggtttcccgcgggcaacagccggcaacaatcaggcctgatcggcgagatcctcctcaaggatcgacatctcgaactgataggaatgatcgccatcctcgtcatcgacgaacagcacggcaatgaattcatcgccgatgaaaacatcggccgaatcattcttcttctgccggggcacgacacgaatcgccggattgccgaacacgcgcttgagataagcgtccagcttcctcacttcctttacgtccacagccatctccaatgccagatctgagtggcggggactttaagacgagacgaatggaactgccagcaacttatctggttagatccccattccgttgagcatctggtccatggcacgcgacggctcaatgcagccggattcgccgacaatccgggccggaaccccggcaaccgtgacattgtcgggaaccggcttgagcaccaccgagcctgcagcgatacgtgcgcagtgtccgatttcgatatttccaaggattttcgcccccgccccgatcaggacgccatggcggatcttgggatgacggtcataatgttccttgccggtgccacccagggtgacgccgtgcaggatcgagacattgtcctcgatcaccgcagtctcgccacagacgaaaccggtggcgtgatcgagaaagatgccacggccgatttttgccgccgggttgatgtcggtctggaacaccgacgaggactggctctgcagataataggcaaagtcacggcgcccccggcgatacagccagtgcgccagacggtaggcctggatggcatggaagcccttgaaatagagcaagggatcaatgaagcgtgaaaccgcggggtcgcggtcaaaaaccgccatcaaatcaacgcggaaggcattgccgagatcaggttcgtcgcgcagtgcgtcgttgaaggtctggcgcaccagatcgcccgacagcgaggtgtggtcgagccggtcagcaaggcgatggaccaccgcatcctcaagccggctgtggtgcagcaccgttgaatagatgaaggtcgcgagttcaggctcgcggcttaccatggcttccgcctcaccacggatccgatcccagatcggatcaaaggaggtcagtctggcggctggattgatctgatggattgtcataaacgtaactttcgaaccacgggtctataacacgtataacccgccaagtcccttttggttcccggcgcaagtgactgaatccgccttatttgggtaggaacaatgtcgctaccgggattattctgctcccgggtttaaagagtggtcaaaaaccgtcataaagcaaccacattttcacttatcaatatgaaatcactggaaattctgccatgaccgtcacttccgggctgagcccaaactggagggtggtatcatttttaccgcattagcccgcgcccggagttccgggaacccgacatggctgcgtctggccgtcctgagcctgctgcccctgcttctgatcgccccggcgatatggaacggatatcccctgctgcaatgggacaccgggggttatctggcgcgctggtatgaaggatatctggttcccagccgatccacggtctttggtctttatctccatctcggcgaaacctcgaatttctggctcaacctcttcgtccaggccctcgccactctgtggctgctgcagctgacgctgcgggtgctgggagcgatgcggaccttccgtttcgtcactatctctctgctgttgatgctgtcgaccgcgctgccctggctggcgagcatgctcctgaccgacatctttgccgggctcgccgtgctgtcgctgttcgtgctgaccgtccatggcaacaggatttccagacttgagcggttttcgctgttcattttcaccgcctttggcgctgccacccacagcgccaccctcggcgtgctgttcggcctgtgcattgtcggctggatggcgcggcccctgcttggcagacgcctgccgctttccgggctggcacagggcagcctgaccatcgtcgccggcagcgcgatgctgcttgtcgccaatttcgccctgtccgggacctgggcctggacccccggcggctacggcgtcgccttcggccgcatgatgcaggacggcattgtggcacgttatctccacgatcactgcccccaggagaagctcaagctgtgcccctaccgccacgaattgccggcgaccgccgatgaattcctgtggggccagagcatgttcaacatcctcggccgctttgaggggctggaccctgagatgagtcacatcgtcctgcgctcgcttgccgaatacccggcctggcaggctgaggcggcattgcgtgccaccggccagcagctcatctctgtggccaccggtgaaggcaccaacggctggatcccccacacctatggcatcattgagcgttttgtgccctcccaggtcaggatgatgcgtgcggcacgccagcagcactgggagatcaattttgattacgtcaactggctccacgtgcccgtcgccctggcctcaatgctggcactgctcggcctgctcggccacgccgtgatccgacgccggtttgacggtctgacgcttctcgccaccacggtgacgatcgcgctccttggcaacgccttcatctgcggcgtgatctcaggaccgcatgaccgttatggtgcacgcatggtctgggtggcgaccttcgtggtgctgatcgctgcgacacggcatttcggcaacagcgaggcgcaggagccccccggatcatcataaggggagccatcatgggtggcgggagaggaaatccaccacaccgttcttgaagaccctgtcgccaaccgcgcgcatatggtcgcgatcgggaatgtcgagcacttccgcacctggaatgaccgcagcgagcgcctgtgcggagcccgcaatatcgtctcttgtgccgaccgcgatcaggaccgggaccctgatgcgcgccatctcctcttcggtcatgtaacgccgtgtcgcacgaaggcacgccgccagggccttgcgatccgacctggttttttcggcgaaatcgcgaaaactgcgccccaccggatcagtgacatcgtcgatcgaggccgcatcgagcgccagtgcaacctcttctcccggccccctgccggcgatcaatccctcaaacccgatgccggcgaggatgaccgtgcggagccgttcggcgtgattgcaggcaagccaggccgcgatccgtgcccccatcgaatagcccatgacatcggcgcgcgggatggcgagatgatccatcagagccagcacgtcgcctgccagatggggaatggaatattgcgcctgatcgtggaaccgggtcgactcgccatggccgcgattgtcgggtgcgatcacccgacggccggccctgcagagttccgacacccagcccggatagatccagttcacatatctgctcgaggcaaagccatgaatcagaaagatcgggtcgccctcgccctcgtcgagataggcgatttcagccgctccattgtgaaaactcagcatcggtccatcccaatgtcgggtcttgagaaacaggcaggggttaggccgcgcatctgaccgtctgaagggccgcggcagcgagttcacgacggcgacggcgcgccttgccgcgccggatcgcgaagcgggtggtccgctcggtggtcgacttgatcgccgacagcaccccgaaaagtgcaaacagtgccgcaaacagccaccacaccaattgcatcaggccggcgagaatgagcagtgcgccacggcccagaagcttgattaccgccctggttttgccacccattttctccgccagcttcgcggcgcgcgacacatctttggggccttcggcgatcttgagcacatccagcgcccccctggtgccgctgctggtggtcacccgcgccacatccttgccgagccgcaccagcccccctgccttctcgacccggaacgccgccttgatggcgccaatggtctgccccgggcgcatcagggagccggaggccaccgcctcccgcaggactttggtgtccacgacatcccgggcgacgcgaccagcccattctgccagccccttaccaagccgacccagcttgcgggcatccttgaccattgtgacaccggcccggaccggggcaaacccgcccagcgagacataggtcgctccggtcactgcaagcccggtcgccgccagacccagcaccaggtggtcggcctcctcacccacggcaatatgtttgccctcacgcaccacatcgcggatgtcgccgataacgaagagatcgccgaccacggtgccggagaggctggcaacatcgtctgcgctccccgtcaccaggccggtggcaaagcgtttggcaacatggagcgttgaccgttccgcggcgaccgcgtcctcgacctggctgacgacggaatcgggcagcacaatattgcgtgaacgtgccagttcaaggaagctgttggcgagatccgcgtccccctcggcgagcgctgcggcaatattgctctcgatcacggccccaccgtccctggccagaaccgaatccagccttcgctctgacagtgccgcggggtcatcctgcgctgcaagcatgacggccgcctcatgggcgcggggcagcaaaagcatcagggccagcgtcaacaggatcagccctgccaccctgattcgcagccgtcgcactcgcagccgtcgcaggcccctgatgtctgcccaacgcatcgctcaacccgaaaaaagaccgccctccttcaatacagatcttatctgaaccgtgccacaacacccccgacgaaagaaggcttttctgaggcggaaacatgctgcacaagcctttttacgggcagggaaattttgatggcaccgggctggcaatcgggcccccccgcttgtatggtccgccgcgtcaaatgttgccgtgtccctgcattcacacccaggatgagtcacgatgtcgcatcatgtcgtcccacattttcagaacgatgctggcgtgccggttatcgagatcggtgcccaggagttcatgtgcgtgggcgccacccctccttttgaccatccccatgtgtttctcgatctcggcaacgacgatcagatcatctgcccctattgctccacgatctatcgcttcgcctccgaccttgcccccggcgaggcgcggcctgcggaatgcgtggtcaaagagaaagcagcctgagcgggcttgggggaagtctcctgtttcgctcaaggcatcatcgattccgcatcgtccgatgggcgtggctttcgacgaccgctttttgtctgtgaccgaacggccagggcttgagcgaatccgtgccttcccggaacaggctcattcccttgcccttcggggtggggtgccggagacagggcgaacccagacagaatttgggttagctcataactctgactggctgatacttgacttgtcagtaaaattgcaaaattggactgataacttttgcgggcgtggcgaaacaggtagacgcaagagacttaaaatttctcggcacgaaagtgccatgccggttcgaccccggccgcccgcaccacactggtggaaaaccgcaagagtcacgaaacgtttaacgttcgggtcgatcccaatggaaccccatgctccatttgaggtatcaatttacctcagcgacatcaacatagttccacccatgactggcgtgtattgattgagggcagaccgagatcagcccaaatgttgtgaagggcaggcagccacagctttggcaagtaaatgtttcgcagaaggagcaaggcccctccccctctaatcaccgtctttcatcacccgagcacgccggttcgctgccaccaaccgccggcagtacaaacatctgtgcggaattcatctctctgccacgccacgcagaatggcgaagttctcaaattaaaaagctatttcaatcacttattgtggtctccaccaaacagaacaggatggcgaagctgatccggaatagcgtttgctttggaactcgggcacccatcgtaagttcgttggaaccgctttcgattgcgctatggcatcagcaaagtctgcattctgatggtccatggagccaactgactcaccaacgccatccaaccaacatgaatccccccgttgcgggttccgcaacgggggtaatccttcgcaacgtttaccgaagttctcgttgcttgccgtggttttccaaccgatttcccagagcatgattgcctaagtgcacgataacgtcaataataaaatttctggttccgtctggtttctgttgacaggtggcgaaatgagcgcacgcggctatcggcgcattctcggaattgacctcggaatcgcatcctgcggttggggagttatcgaggttggcgagaatgacggaaacatcattgctgccggcgttcgctgtttcgacgcccctctcatagacaagacgggggagccgaagagtgccgatcgccggaaagcacgtggtcaacggcgaattattcgtcgtcgtcggcagcgcatgaatctcatccggagattgctcgttgaatttcgcgtgctgccggatcacacaccggaagctctccaccacgcattgcgtcgaatcccgccgactgccgcaggttcacaagttacgccctggacacttcgcgccgctgcgcacatgcgtctcttgaccaacgatgaatttgcggttgttctcggccatatcgcccgccatcgtggtttccgctcaaactccaagaaagaggctggcgcaaatgccgcggacgaaacgtccaaaatgaagaaggcaatggaggccacgcgcgaaggcctcgcccaataccattctttcggcgacatgatcgccaacgatccgaaattcgcagatcggaaacgtaatcgagacaaagattattcgcataccgccaaacgctcggatctcgaagatgaagtacgcgcaatcttccgcgctcagcgtcggctcggaagctctgctgccaccgagcagtttgagcgatcgttcgcgggcgctgccttcttccagcgtccattgcaggacagcgaagatgtggttggcgagtgtccatttgagccaggcgagaagcgcaccgcccggtgctcaccgtccttcgaaattttccgctttctttcgcgactggtaaatttgcgattgactgtcggccgtgtcgagagaatgctgacacccgacgaaatcgccatcgcggcaaagcacttcggtgagcagaagagcattactttcaagaccttgcgcaagcgcctcgacctcgatccaaacgtgcgttttgccggcattgcccccgacaaggaaggcgtcgacgtggctgcgcgaatgggcggcgcggcgttcggcacctgtgtcctgcgcaacgttctcggcgatgccccttggcagtctttattgcgatcacctgaaaaacttgatcgtgtcgcagaaattctttcgtttcgtgaagatgtggattccatccgcagaggtctcgacgaagtgggccttgacgccccaattgttgaccgattgacgcaggcggtggccgacggtgatttcagggacttcagcaaggctgcccatatttcttcgctggctgcgcgcaacatcattcctggcctacgccaggggatggtcttctcggaggcctgtgcgcgtgtcggttacgaccacaccgcgcgcccatccgtttcgcttgaacagattggcagtccagtgacccgaaaggccttttccgaggcgatcaagcaggtccgcgctgttacgcgtgaatatggccccatcgacatcatccatatcgaactcgcccggtctgtcggcaagagcgcagaagagcgcaaagcgataagcgaaggaattgaacaacgcaacgtcgagaaagaaaggcgccggaaagaggcgcaagaactccttgatcgtgctccaagtgacgatgaactcttaagatatgaactcgccaaggagcagaatttcaagtgcatttattctggcaatcctatagaccctggcgggatcaaagcaaatgacacacgatatcaggttgatcatattctgccgtggagtcgttttggagacaactcgtatataaacaaaacgctctgcacaacgaaggccaaccaggacaagcgcgggcgaacacctttcgagtggttcgaaaccgagaagacagaacaggaatggatggaatacgtcgcccgcgttgaaagtctgaaggaagtcaagggacgcaagaagcgtaactactgcatcaaggatgcgggaaatttcgaagaaaaattcaaggcgcgcaacctgaccgacacccaatgggccacgcgactgcttgccgacgaactgaaacggatgtttcccgcacatgagggagaacggcgggttttcacacgccctggttcgatcacctcagccctccggcgcgcgtggggacttgaaggcctcaaaaaggaagccggaaagcgggtcgaggacgacaggcatcacgcagtcgatgcgctcgtgctggctgcaacaagcgaaagcttgctgaatcgtctgaccaaagagattcagaagcgggaaagcgaaggtcgccaggacgatatcttccattgcagtcaaccttggccaggcttccgcctgggcgttgaagagactgtctatggctcagctggcattttcgtctcccgcgccgaacgtcgccgcgcgcgtggaaaggctcacgatgcaacgatcaggcaaattcgtgaaattgatggcgaaacagccttatttgagcgccgaccaattgaaaagctgacggaagacgacctggacaagatccctgttcccgaaccctatggaaagatagctgatccacggaaattgcgagatgatctggtagaaaatcttcgtgtttggatcgctagcgggaagccgaaggacaagccaccgcggtccccaaagggtgatgtcgtgcgaaaagtgcgcatcagatcaacgaacaaggttgcagtcgaattgaacggaggtgctgtagatcgcggcgacatggctcgggttgatgttttccggaagaagaacaaaaaaggcgcctttgaatttcatgtggtgcccatctacccccatcagattgttacactggagtctccgccgaacagggcggtgatcggcaataaagccgaaagtaattggacgctaatcgacgacaattttgagtttgtctggtcgctcaatccaatgtgttatctgaaactcacaaagtcgaatggcgagatgattgaaggatattttcggagcatggatcggaccactggtgcaatcaacttgtccccaatggaaacaaattccaagacgatccgaagcattggggtcaagacgctttccagttttcgtaagttcgtcattgatcgtcttggtcggaagtttgaaattcctggcgaggttcggacatggcgtggcgaggcctgcatctgacgaacgcagcgaaactgtcgctggctgaccgtcagatttgcgttaaacaggacgctggcgaaatccggctcgctcttgaggatattgcctggatcgtgattgacacacctcaggcagtgttttcgagcgcacttgtgagcgcatgcatggaagctgggattgcggtggttttcacagacgaccgacacactccttccggtcttgctctgccctttcatcgccaccatagacaaggggcggtggcaaaacttcaggttgatgcaaaagacagcatgaagaggcggttgtggcagacaatcgttcgccgtaagatactgaatcaggcagcgtccctctcaattctggatcgtgaaagtgcgaccacgcttatggaaatcgctcgccatgtggaacccggcgatccctcgaatgttgaagcccgggcggcgcgcttctattggtcgcatctgttcagagattttgtccgcgatgacgatagcgatctccgcaacaagatgctgaattacggttatgctgtggtgcgtgccggggttgcacgtgcacttgttgcatcgggctttttgccggcattcggcgtcaaacacgatggatctgcgaacgctttcaaccttgcagacgatctcgttgaaccattccggccttttgtcgatgttcttgcatgcaagacggttcccgggggcacagacaagagcggagacctgactctggaacatcgccgcgcgatggcaggcgtgctcttcctgaacggcaaagtgggtaatgaaaaagtatcgcttcttgtcgcggctgaaatggccgccgcaagcttctcacgcgctttggaatttgaaaagccagcgcttctcgaactgccagaactggagtgggacccgtgaaaagcgaggaggttcgtttcgtgtggatattagttttcttcgatctgccagtcggcaccaaaaccgaccgtcgcaacgcgaatcgctttcgccaattcctgaaagacgatggcttcattatgctgcaatggtctgtctactcccgcgtctgtcgaggcgaaaacgctggagaaaagcacgagcaacgtgtaacaaaaaaattgccaccgcgcggcagcgtccgtgcccttcaggtaaccgatcgccagtatgcacggatgaagctattgctcggggaggcgactttcaatgagaaaaacgcgccaaaacagctggttctgctctgatttccgcctgactttttggcggaaatcagtgcattttcagtgtcttctgccgttcggagcctaccaccgggaaatcggtagggaaaccacggcaccccagtgaaagcacctataacccctgcgagcctaccaccgggaaatcggtagggaaaccacggctctcctcgtcgtaccattccaagggcttggagcctaccaccgggaaatcggtagggaaaccacggcacgtagcatgcagaaggatcgaagaggttcagcctaccaccgggaaatcggtagggaaaccacggctcactacacccgtcacgtgagccgggaggacagcctaccaccgggaaatcggtagggaaaccacggccgcctggtacaatctgctcgcccggtatgaagcctaccaccgggaaatcggtagggaaaccacggcccttcaggttgttggcgattgcatgcagttagcctaccaccgggaaatcggtagggaaaccacggccagcagccgtcggccgctcccgcgccatagagcctaccaccgggaaatcggtagggaaaccacggcacgacaacgtcgctcgtttgcgcgaactccagcctaccaccgggaaatcggtagggaaaccacggcttccagaccagatgtaagccgagggcaggcagcctaccaccgggaaatcggtagggaaaccacggcctcgactgctctggcggggaccaccagagcagcctaccaccgggaaatcggtagggaaaccacggcgccacccttgggcgatcccgatggacaagtagcctaccaccgggaaatcggtagggaaaccacggcctgctgcgccccggagcgacaggccgcagcagcctaccaccgggaaatcggtagggaaaccacggctgatcaatttggcggccttgagccaccagtagcctaccaccgggaaatcggtagggaaaccacggctaataacgtcgtatgccgcgttggcaccgaagcctaccaccgggaaatcggtagggaaaccacggcgcgcgtgaccgatcgctccaatcgcctggtagcctaccaccgggaaatcggtagggaaaccacggcgcgaaacgccagaagtcgcagagaccgcgcagcctaccaccgggaaatcggtagggaaaccacggcagggaagtcgcgtggtcaaggcgcagtacaagcctaccaccgggaaatcggtagggaaaccacggcccgtggagcactcagctccgcaacctcttcagcctaccaccgggaaatcggtagggaaaccacggcgatctgtcgcgcttcggcgaggctgtaggcagcctaccaccgggaaatcggtagggaaaccacggcgcggattgtctgcacggccgccacgactccagcctaccaccgggaaatcggtagggaaaccacggctgcatctttcgatcagcgacagcgagggcgagcctaccaccgggaaatcggtagggaaaccacggcgctacggccacttcatcaccgagggcgggaagcctaccaccgggaaatcggtagggaaaccacggcggggccgcgcagctcggcaagcgcccgggcagcctaccaccgggaaatcggtagggaaaccacggccgcggctcgcgccctggttgccggcctgcaaagcctaccaccgggaaatcggtagggaaaccacggcggacaccaccaattgtcgatggagtcccggagcctaccaccgggaaatcggtagggaaaccacggccgctgctgcgcgtcctccgaaggcgctccgagcctaccaccgggaaatcggtagggaaaccacggcgagggcggggagatatcctcctccggatcaagcctaccaccgggaaatcggtagggaaaccacggcgtgcgcccgcttctcccgcctctctttctcagcctaccaccgggaaatcggtagggaaaccacggctcacggtatcgccctgctcatagcgcggcgagcctaccaccgggaaatcggtagggaaaccacggcgaatagtccgcgcacagcggcgtaatcaggagcctaccaccgggaaatcggtagggaaaccacggcaggaaacggcgatcgcgcccaccttcacgcagcctcccaccgggaaatcggtagggaaatcacggcgtacctactcgggtggtcatcaatcttgcccgatctcccacagcgagaaccaacctgccgccgaaccatctctcccagactgagaaattccgacaaaaaattgcctcaatctcgacatttcggcttgctttgaacgtgccggcgtctctatcaggcgacagtcgttttagggttttcaaccggattatcaattcaccatgcctgtttcccgtggcctgaggcgcagtctgttcttgtccgcattgatcgcgggcggtttcacgttgtgcggttgcgccgacatgagcgaaaccctcagcccggcctttgccgatcccgggaaatatgacctgtgggactgcaagcagcttgagggggaacggaaaaatcttgccacccgcagcgaggaattgcagaaactgcgaagcaaggccgaaaccggcgtcggcggctctgtggtcgccgagatggtctatggcaacgacgtcgtcgccgtaaagggtcagtcgcattacgtggacaaggcctggcagcgcaatcgatgcgtggaaactcccccgtcgccaccgccagcagcaaacccgcccctacccccagagccgaaagtcgccgccaaaggcaccaagggtgccaagcccaggaaacccgccaggcccacggatctgacccccgggaagtccgcgaaatgaggcgctacgcgcatgcggatgccagaacaggttgttttcgcgtgtgtttccgccgtcttgcggcggcgttgagctagatttttgtcttcaggaaggggtagcgagacgacttggcattttcccgggtctgttttccggatccggaactgccctcggtgcctttgcgcgcccgcgcgggtggttctgcctgcccggcattttcgctgcctggtgctcctgcacgacgctcgccctggagatattcacgccaggacagcttctgcgaccgccccagcacttcccggcccagcgagaccggcggcggcagtgtcgcggcgagtgcccgccacatctcaaccgcgtcttttgcttccttgatgtcctcaagaaacgcggcctcgctgcggctgtaccagcgccagcgcccggtttcgaacattccgatgagatgattcaggcgacgctcagcgagcgcgcaccagcgcgccgccacccccgtgccatttgccccgtcgtccgccatagtccactcgcccaatggaaagaagcatgaacaccgaaacacatgcaaatcaagtctcttttgtggaaaagccgaatttgtgccgatgacgggttgacgtctctccggccgctcaaaaatcgaccagcggctgtcctcagggaagaaagcatcgccacgaatcaggcctggcggattgactgggcgcatacccggacctgacgaactcttgcggctgtcgacggcagcgggcagattgcggccccttcatcaaaaacgggtctggcatgagcttcgaacacatcatcgtcgaaaacaaaggcgcggtcggcattatcaaactcaatcggccgaagatgctgaatgcgctgtcgttcagcgtctgtcgtgagatcgcagctgcggtcgacggctttgagaaagacagtgcaatcggctgcatcgtcatcaccggtaacgaaaaggccttcgccgcaggtgccgacatcaaggaaatgcagcccaagggcttcattgacatgttctccgaggattttccttccgttggcggcgatcgcatcgcgctttgccggaaaccgaccattgctgcggttgcgggctatgcgcttggcggtggctgcgaactggcgatgatgtgtgacattattatcgctgccgagaacgccaaattcggccagcccgagatcctgcttgggaccattccgggcatcggcggcacccagcgcctgccgcgggcgatcggcaaggccaagaccatggatctctgcctcaccgggcggaccatggacgctgccgaggcggagcggagcggtctggtcagccgcgtggtgcccaccgacaagctgatggacgaggtgatggctgccgccgaaaagatcgcctcaatgtcgcagccggcggccgcgatggccaaggaagccgtcaatcgggcgttcgagaccacgttgaccgaaggcctctgcctggagcgcaacctgtttcactccaccttcgcgctggaagaccgctccgagggcatggccgccttcatcgaaaagcgcaagcctgccaacaggaaccgctgagttcctgacgccagtccgcctttcacttccgaaggcgaaaacctgcagaccggatgctgtggtcgatgacgaatcgaccgcagtatccggcaggcaagagcatcaccgctacctgacgccgtctgcctctgcgctccgtcacctggcttgaaaacgctggattcccaaacagttccagataattccaggattgcgccgcggcgggcgctcgcggccacgtttgcctgcacgggcgatgcccgttaaacaatgacacggctgttaacgtttgcgcccaacgaccgcagccgcttctcagggatctcatgaccagatggtcagccacagctctgcataggaaacggcccgtgcgcaccgcgctcgccgcggtgatcctttacgcctgtgccggcatccacggtgccgttgccgaaaccctgtccgatgctctggtgaaggcctatcgcagcaatccccagatgaacgccgagcgcgcccgtcagcgtgccaccgatgaaaacgtgccgcaggcgctctccggctaccggccacagatcgtcgccagcctcagcgcgggtatgcaggcggtgcgcaacctgcttcccgacaacacaagacaatcggcctcgctcaaaccgtgggaaatcggcgtcacggtgacgcagacgcttttcaatggtttccgcaccgccaacaatgtgcgggtcgccgaattgcaggttcaatccggccgtgaagccttgcgcaatgtcgcacagggcgtgctgctggacgcggtgaccgcctataccaatgtggtggcgaatcagtctctggtcgaggcccagcgctccaatgtcactttcctcaaggaaaccctggcgatcaccgaacgccggctccaggccggcgacgtcaccccgaccgataccgcacaggcggaagcccggatgcgtcggggactcgccgatctcaacgctgccgaggttctgctcgcggtgagccaggcaacctataatcaggtcatcggcaacaaccccgggcagcttcgtcgcgcggaacctgcggatcggctgctgccgaccagccgcgacgccgcgctcgccggagcgctccacgagcatcctgcgatcacagccgccagtttcgacgtcgacattgccaccaccaccattcacctcgccgaaggcacgctgctgccaagcgccacactccagggcagcatcagccgcagccgtcaggatgatccgaccctcggcacttcggcaaccgatcaggcctcgatcgtcggcagcatcaccgcaccgatctatgatggcggcatggcggcgtcacagacgcgccaggccaaggaactcacaacccagagtcgtctggtgctcgatcaggtccgtggtcagacccgcactgcggtggtcggcgcctgggtcgccaatgaaggcgccaaggttgccgtcgaggcatcggaagccgagctgcgtgccgccacagtggcactggagggtgtccgccgcgaatcccagggggggcaacgcaccaccgttgaggtgctgaatgcccaggcggatgtggtcctggccaaggcccacctgatcagcgctgtgcgtgaccgtgtgatcgcgtcctacaccctgctcagtgcggtcggtcatcttgacgtcaagaccctcaatctcaacacccccgactatctgccggaagcgcattatcaccaggtccgcgacgcctggcacggcctgcgtacgccatccggtcaataggggctgtcggaagaagccggcagcgggttcgcgattgcagatcgtcatccacagcctgcagtcctccaagcgacgacccgcgagctgccagcaaggttgcaagccccccgacgagcgctttcgctcttttttcggattccgcctttcagcggaatgtgccgcctctaccgcggaccgcgccgcgagaacagcgagatcaggaccgggagcgtcaccaggatcaccaccggcgccagcatcattcccgccaccaccaccaccgccagcggtttctgcacctgcgagccgatgccctgtgacagggccgccggcaggaggccgacgcctgccaccacgcaggtcatcagcgccgggcgcagctgcagttcaccagtgcggatcgccgcactgatgcgatcgagcccgtcgtcgatgagctggttgaactgggacaggattatgatgccattcatcaccgcgatgccgaacagggcgacgaaaccgatcgccgccgatacgctgaaggggatccccatcacgaacagcccgagcaccccgccgaagatcgccatcgggatcacactcatagccagcagtgtatcggtcagggaagcaaaattgagccacagcaggatggcgatcagcgccagcgacaccggcaccacgatggccagcctcccgatcgcctcctcgagattgccgaactccccgacccactccatatgcgagccgggcggcaactgtacctctgcggcgatcttctgacgcgactcctgaatggcactgccgagatcacgctcgcgaaccgagaacttgatcggcagatagcgctcctgctgttcccggtagatataggccgcgcccgacaccagccggatggacgcgacttcgctcagcggaatctgcgccactgtgtcgttcgcagccggcgtgccgatgcgcagattgcggatcgcctcggcgctctttcgatacggcgccgcaagacggacaacgatcgggaaatggcggtcggatcccggctcgtagagatcgcccgcgctgtcgccgccgatcgcgaccttgatggtggcgttgatgtcaccgggcgtcagcccataacgggcggccttgacgcgatcgacatcgatctggatggtgggctgtcccagtgaagtgaacacggcgagatcggtgatacccgggaccgtcgccagcaccgccttgattttgtcggccgtattggtcagggcctgcaggtcattgccatagagcttgatcgaattctcccccttcacgccggagaccgcttccgacacattgtcctggagatattgcgagaaattgaattccacgccgggaaagcggtcgtcgagttccttgagcagctgcgccgtcaattcctccttgtcgcgcgtgcccggccattcactcaccggcttgagcggtgcaaaaaactcggcgttgaagaagccggtggcatcggtaccgtcatcgggccggccatgctgcgacaccaccgaatcaacttccggccgggcggcaatgacctggcgcatggcgttgacgtaactgttgccctcttccagcgagatcgtcggcggcagcgtggcgcggatccacagattgccttcctcaagcttgggcaggaactccagacccaggagccgggccaggatcagcgtcagcaccacgagaccgatcgcaccgccgaccaccagcttgcggttgcccaccgcccagcgcagcaccggcatatagatgcggtgcagccaggcgacaaaggcggtttctgcgtcccggacatgggccggcaggatgatcgcactcagtgccggcgttaccgtgaaggtcgccagaagaccacccgcgagcgcataggcataggtccgcgccatcggcccgaaaatgttgccctcgaccccgctcagggtgaacagtggaatgaatgccgcgatgatgatggcggcggcaaagaagatggaccgtgacacgtcggccgatgcgctcatgatcgcatggctcttctgttcccgcatggtgtcgggcgaaatcgcgtcatattcgccgggcggggttgtctgcgtcaggcggcggaagatcgcctccatcatgatcaccgtggcatcgacgatgaggccgaaatcgatcgcccccaccgacaggaggttcgcggactcaccgcgcagcaccaggatgatcacggcaaaaaacagcgcgaaaggaattgtggcgccgacgatcagtgcgctgcgcagatccccgaggaagatccactgcagcagcacgatgagaaggatgccgatcaccatgttgtggagcacggtatgggtggtgaggctgatcagatcctggcggtcgtagatccgctcgatatgcacccccggcggcagaatattggagcggttgatctcgttgacgagggcttcgacgcgcttgatggtcggcatggtctgttcgccgcgccgcatcaggacaatgccctgcacgatgtcgtccgcgtcgttgatgccggcaatcccgagccgcggctgggccccgatggtcacgctcgccacatcgcgcaccagcaccggattgccgccggtctgcgccaccatggtgttggcgatatcatcgatcgaacggatcagaccgaccccgcgcacgactgccgattgtgctccgatattgatggtattgccgccgacattgatgttggaattccccactgcctgcaggagctgcggcaaagtcaggtgattggcaatcagcttgttgaaatcaacc

SEQ ID NO: 4281 - DNA, 23177 bp, synthetic construct
  misc_feature 1..23177: note = Synthetic
  source 1..23177: mol_type = other DNA
acgggtattggcaattccgtggtttatgtggggtccaagacagggcgcgacggcattcatggcgccacgatggcgagtgcggaattcagcgccgattcggaagaaaagcgcccgacggtgcagatcggcgatcctttcgccgaaaaactgctgatcgaagcctgcatggaattgatggcaacggatgcgattgttgccattcaggatatgggcgcggcggggctcaccagttccagcgtggagatggccggcaagggcggcatgggcatcgaacttgaaatggatgcggtgccgcagcgtgaagaaggcatgtcggcttatgagatgatgctgtccgaaagccaggaacgcatgctgatgatcctgaagccaggccgagaggccgaggctgaggcgattttccgcaaatgggaattggatttcgcggtgattggtaagctgaccgataccgggcgcatcgtgatccgccataagggcgtgctggaagcagatattccgctggcgccgctggaatccgaagcgccactttatcgccgcccaacggcggaaacgccgaagcagccggtgttggtggcgtccgccattcccgatccggtggggattgcgtcggccttgatgacgcttgttgcctgccctgatctttgttcgcgccgctggatttgggaccaatatgatagcctggtgaatggccaaaccgtgcagcgcccgggtggggcggatgcggcggtggtcaggattgaagatcatgaccgggcacttgccatgaccacagattgcacgccgcgctattgcctggcggacccagaagaaggcggcaagcaggcggtggcggaagcgtggcggaacatcacagccgttggcgctttgcctttggcgatcacggacaatatgaatttcggcaatccggaaaagcccgaaatcatggggcaatttgcctcggccgtcaggggcatggcggcggcgtgtatcgcgctggatttcccggtcgtctcgggcaatgtgtcgctctacaatgaaaccgaaggtcgcgcgattttgccgacgccggcgattggcggggttggcgtgctggagaaagccgcgcaggcggtggggctcgccatgcctgcgtccggtgatctggtgctgattggggatacgcaaggctggcttggccaatcactgtggctgcgcgaaatcgcggggcgggaagaaggcgcgccgccgccggttgatctggtggcggaacgtcgcaatggcgattttgtgcgcgggcgcatcctggcgggcgaggttctggccagccatgactgcgccgatggtgggctgttggtggccttggcggaaatggcgatggggagtggcactggcgcgaggctcagcccggcgccggagggcattcccgctcatggcttctggttcggcgaagatcaggcccgctatgtgctggcggtggccgatggcgcggcgctgatcgcccaggccaaggcagcgggggttccggcccggcggatcgggatagccgccgggggggacttggttctgcccgatggcactgccatatcggttttgaagctggcggctgcccatgaggcgacgctgccagcactgatgggggagagttagcagccatgggcatgcaggccgcggaaattgaggcgctgatcaaggcagcgctgccggatgcggaagtgacgattgaagatttggccggcgatggcgatcactacgccgcgaaggttatatcttccgccttcaagggcttgccccgcgtgcggcaacatcagattgtctatgctgcactacaggggcgcatggggggggtccttcatgcgcttgccttgcaaacctctgccccggaataggaaccaagaacatgagcaacccggtttttgaacgtatcgacgccgacatcaaggcgacccccgtggtccttttcatgaagggcacgccggttttcccgcaatgcggtttttccgcccgcgtggtgcaaatcctgtcccacatgggcgtgcccttcaagggcgtgaatgtgctggaagatatggaaattcgtgaaggcatcaaggaattttcgaattggccgactatcccgcagctttatgtgcagggcgaattcgtgggcggctgcgatatcatcaccgagatgttccagtccggcgagctttccggcctgctcaaggaaaagggcgtggcgcataaggccgaagcctgaggttttccagccccgaaaagaaaaaccccacctgatcaggtggggttttttgttggatcagccttcggcaggcggggtacgaggggtgcggttgcgattggccttgttgctgctgccgttgctgctgctgcgattctgccgattggccttctggccttgggaagcgctgcggttgcgggtggattggctgcgctgcgtggtgctggcagcggcttccgtaccatcagcggcgcggcgcggcgcggcatcagccgggactgcgctggtcgcgacgatcaggccaccaagggcagccagaaccagaatattcttcatcatggggtcaaccttcctgagcgaatcggaaatttttgtagcacgaaacgcccaggagccgcccatgcaaatcaccgcacatcgctgacgaaggtcgccctagatgatgaaatttacttaatgatgcacaggcggcggcctcattccccgctcgcccttgccttcgcttcttccgcgctgccaatcccaccatttgccttggaccaatgcatcgggtcttccaggaatttccgcacttccttcagcgcggcttcgctgaaatagggacgttcacggcagacctccagcacatcccaccaggtgcaaagatggtgcaggttcaggcccatgctcttcatggtctcaaaggagccggggaagacgccgtaatagaagacaacgaaggtgtgatcacaaatcgccccggcatcacgcagcgcggtcgcgaaacggattttggaggcaccatcagtggtcaaatcttcgaccagcagcgtgcgctggccaaccggcacttcaccctcgatcaacgcattacgcccaaagcccttcggctttttccgtacataggccatgggggcgagcatacgatccgcgatccaggcgccgaagggaatcccggccgtttcgccacccaccaccacgtcaattgattcgtaaccaacatgccggccgatcttttccacgcccaaatcgcaaatccggttgcgcgcgcgcgggaaggagatgatcttgcggcagtcaatataaacggggctcttccaaccgctggtaaaggtgtagggctcttcagggcggaaattgaccgccttgatttcaagcaggatgcgcgcggtggtgagcgccgcgtcgcggtcccagtcggaggcatgaagggcgggcatatggatagggctcctctctttccgggctttggtaatgcgctggggcggtggcgtccatgaccccgcccgagtcgccccgcatttgggtgctggccgacccgcgcgccggcacggcggcccaggctttgggcattgctgagcggctgggtgagcccttccgccgggtggatttggcctgggggaagctggcgcggctgcctttgcccttcccctccctggcgggcctgacgcccgaagcccgcagcgccatagcgcccccttggccggcattagtgatatcggcggggcggcggagcgcgccggtggcgctttggttgaagcaaaaaggcgcgcggctggtgcattgcatgcggccaggctttggcgcggcgcgcttcgatctgctggtgattggtcggcatgatgcgcccaagcccgcggctaatatcctgcccattctgggcgcggcgcattgcgtctcccccgaaaagctcgccgccgcgcgggcggaatttgccgcgcttgtcgccctgccctcgccccgcgtggcgttgttgatgggcgggccaccgcgcgccgagggcatggatgcggctgtggccggcgccatcacggccaaggtggcggggtttgcgggcagcgtgcttgccaccgcatcacgccgcaccggccgcccagcggaagatgccatggcggcggcgctggccgggcatccgcatcggttgtttcgctggggggatgcaccgcccaacccctatgccggcttccttgcctgggcggatcaggtggtggtgacgggggattcggtttccatgctgtcggaagcactcgcgacctccgggccggtttttattgccgatccaggcgggcttgggccgcgccacaagcgcctggcggagagcctgattgcggcattgcaggcgcgggatttggccgccgcacccgtgcccttcccgcgcgcgccgcttgatgaaagcgggcgcatcgctaccgaaatccgccggcgcggcttgctgggctgaaccgcgctttcatgaggatttcatacatccaaggtgatggcgcaggtgatctgccaaaaaactgatctatgcttcgcctaaccccataaggtgccgccatgacccgcagcctgagccttgccttttcgccccgcttcatctgcctgagtctggcatgtctggcagctctcggctttggcttcgcgctgttgatggcaccaggcttctggaccggcttgggctttgtcattgcggcggcactcagcgtgcttgggcttcgcgatctgttccacccaacccatgccattctgcgcaattacccaatcgcagggcgtttgcgctttctcatggaagaaatccgccccgaaatgcggcaatatttcttcgaagatgaaaagcacggcacacccttcagccgcgacaagcgggccattgtctatcagcgcgcgaaaaagcaattggataagcgacccttcggcacgcaatatgatgtctatgacacgggcttcgaatggttgcagcattcgctggccgcccgcgcgcctgcccacgacctgccgcgcattctaatcggcgggccggcctgcacgcggccctattccgcttcgatattgaatatctccgccatgagtttcggatcactatccgccaatgccattcgcgccttgaaccaaggggcaaagcgcggcggctttgcgcatgatacgggcgaaggcggtctcagcccctatcaccgcgaagcaggcggcgatctgatttgggaaatcggttccggctatttcagcgcacgcaatccggatggcagtttttcgccggaacgcttcgcggaagtggccgcgcttgatcaggtgaaaatggtggaactcaaactcagccaaggcgccaaacctggccatggcggcgtgctgccggctgccaaggtcagcgctgaaatcgccgccacgcgcggcgtggccatggggcaggattgcgtttccccgcccgcgcataaggcattttccacaccgattgagatgatgcacttcattgcggagatgcgccacctatccggcggcaagcccgcaggcttcaaactttgcatcggccacccgtgggaattcctcgccatctgcaaggcgatggtcgaaacgagaattgcgccggatttcattgtgattgatggcgcggaaggtggcaccggcgccgcacccctggaatttatggatcatgtcggcatgccgctgcgggaaggactaagcttcgcccataatgcgctgatcggcattgggctgcgtgaccagatcaagcttggcgccagcggcaagatcgcatctgcctttgatgtggcgcgcgcgctggctctaggtgctgattggtgcaatgccgcgcgtggcttcatgtttgccattggctgcattcaatcactgtcctgccatacggatcactgcccaaccggtgtggcgacgcaagacccaacccgccagcgcgcgctacgcgtgccggacaaggcgccgcgcgtgcatcaattccatgctgctacgctggaggcgctgaatgaattggtcgccgccgccgggcttgcacatccgtccgaattacgcgcagaacatttcagccggcgcatttcgccaagcgtcgtcaaaagctttgccgaactttacccacccttgacgcccggcgctttgctgaccggcacggatgatccccgctttgccgaggcatgggccatggcggatgcccataatttcgccccgcgccgcgcgtgacatccctatagcggcgctcacgcttcttggggcaggttggtgctgcgcgacgggctggcgctttagtgcgcgtccagtgaacgattgtgaacgggacgcgcactaagcctagttaaacgcgcagccaggtctcgctaaaggccagcatggcggtggagattttctgccccgccacttcgcgcggaattggcgcgcccggacggcgaatgccattcaccgtaacggcggcactttcgcagccgatgaacaggcttggcatgtaatgcttgccggtcgccgattgcggcggggccagcgcgaaacagaagggctcgcccaagccctgccaagccaatgacacggccaaatcacccgcgcgcacgctttcgctataatgactgcgcgcatcgccggccgtttgaacctcatcaattttgcgatagcgcaggccagcaagccccgcgatgccgcgaaaggcgccgaaattggccacatattcggccaccagccagcgcgcgaggggttcattatccgtcaagcaccaattcgctgacccttctgccgggttcgcctcatgcggggattgcatcagcaccagcgcatggcccgccccatggggtgaaagcaccacacggaaaaaactggcgagcgtggtgaaggggccattcgggtcctccttcaaggaaatgccaggattttcgccggaccattcgaccttgcccgggaataggatggtttcttgcatggtgtttctcctcttcaatgcgtcacagcgtgacccagccatgcgctgggatcaatgcccaaagccatctggtgcttgacgcggcacggtgccggggcgcaaggaacggcttgatttttccgagatccacttccccatgtccttttcaggtatccctgccacgctgcaatcagcgctggcttcccgtggctatgcagcccccacccccgtgcaaagcgctgtcctggccgaaggcgcggctgggcgggatttgcttgtctcggcccagacgggctcgggcaagacggtcgctttcggcttgtccatcgcacccgaattgctgaatggcgcagaacgcctgccaccgcccggcgcgccgcttgccatcgtcgtcgcaccgacgcgcgaattggccttgcaggtgaaggccgagcttacttggctttacgcccccgccggtgggcgcattgcgtctggcgttggcggcatggacccgattgcggaaaagcgtcagttgctcgccggcgcgcatatcatcgtcggcacgccaggccggctttgtgaccatttggaacgcggcaatctgaagcccgattccctgcgcgttgtggtgctggatgaagccgatgagatgctggacctcggctttcgggaagaattggcagcgatcctggatcgcctgccgccggaacgccggacattgatgttctcggccactgtgccgcgcgccattgccgcactcgcgaaaagctatcagcgcgatgcgctcaggcttgaagtgggcggcgggggtgaggcgcatggcgatatcacctatcgcgccatgctggtcgcaccgcatgaaattgaacgcgcggtggtgaaccttatacgcttggaaaacccgccacttgccatggtgttctgcgcgacgcgcgcggcggtggcccggctacatggcaatctggccgaacgcggctttcccgccgtggcgctttccggcgagctcactcagaccgaacggctgcgcgccctgcaagcgctgcgtgatggccggtcgcgcgtttgtgtcgcgaccgatgtggcggcgcgcggcattgatttgccggaactggacttggtgattcacgcggaattgccgcgcgatggggaaaccctgctgcatcgcagcggccgtactggccgcgcggggcggaagggcaccagcgtgctgctggtgccgcatccgcgccgccgccttgccgaacggctgattggcgctgccaaggttaccgccgcctggggacctgcgccatcggctgatgccgtgcgtgcgcgcgatgcggaacgcctggcggaacaggcgcgcggcgttttgaccgaagaagcatcggaagatgatctggtgcttgcgcgccgcttgctggcggatcagccgattgcgccggacgccctggcggcggcgctgatcaaaatgctacgcgcgcctttgcccgcgcccgaggaaatcgccgaacagcgccccgaaaggcgcgaagcgcggcgggaagggcctgatgcggatgcgccgcagggcggagaaggtgtgtggttccggctcaatatcgggcgcaacggcaatgctgatccgcgctggctgctgccttttctatgccgacgcgggcatctgacgcgccaggaaatcggccgtatccgtatccttgaccaggaaaccatggtggaaatcgcgccttatgctgcggagcggttcgccgcagccgcccggcagaccagcaccgaggaccatgaggatatccagatccagcccatgcagcccttccggcaagcttcacgggaggcgccgccgagaacggagcgaactgcgcccccgcgtgaggcgaggccaaacaaggctgcaggccccggcgggccgcccagaccaggcaagcccttgaagcctggccccggcaagccccccaagcgctttgaaaaaaagccaaagccgggtcccggcatggaagggcgtaagcgcgacgctggcgcccccaggcttggcaagcgcggcggggtcgcgtaacccccgcgcgccggtttggtgccggcgcacaaaatagggggcgcagatggctgacatcatcattgatattggtggcgaaattttcgaggcgttttttgaagacgccgccgcacccaagacctgcgcgcgtttccgcgccctgctgccctatcaggaccgcatcatccatgtgcgttggtccggcgaggcctgctggattccgatgggtgagcgcgaactctccatcccctgggaaaacgccaccagctaccccgcgccggggcagattattgtgcatccgggcacgatgagtgagacggaaattctggtcgcctatggccccacctgctttgcaagcaaggcgggccaattggctggcaaccacttcctgaccattcgcgaaggcctggaccgcctggccaagaccggccgcgcggtgctgtgggaaggggcgaagcccattaccttccgcgccggctgaaagtgccaagcgcagttcgcaaaaatccggatgcttgaccccgctgcctcttgattggcggcggggctatttccatttctcctttgctaaggggcgccatgcgggcccctggtgcgaaccgaaccttttgccgcccagatgggggctttggggaatggcatcgctggcctcaacggaccttgctttgcaaaggagtgtccttgctatgaacgctactgatttttccccccttttccgtaccgccattggctttgatcgcctggcgcgtttgatggatacggcccggactggtgccgatgccgggggttacccgccctataatatcgaaaagaccaccgatgacagctatgtgctgaccatggccgtggctgggtttgccgaggcagatctggacatcaccgcccatcagaacacgctgacggtggttgggcgcgcccagcctaccccggaagaaacccgccgattcctgcatcgcggtatcgccgggcgtggttttgaacgccgcttcgtgctggccgatcacattgtggtgagcggtgccaagcttgagaacgggctgttgcacatcgcgcttcgccatgaagtgccggaagcgctgaagccgcggcagattccggtacgggccagccgcccggctgcgctgatggaagcggcgcctcaggcggcttgaggctgactgtcccgcctaaacataagtagcccagaaaagggatcgccccggcattgctgccggggcgaagaaccttcagtggaaaaccactttaccgtggcttccctaccgactcccattttcaaggtgacaaaatccgtcaccttctgtcaatctttttcttcgggaatggattgggggaatcggtgaaaagcctgggtattgatcttggtattgcgtcctgcggttgggcgctgatcgaaactgatgtggcgcaggggcagatcattgcctgtggcgcccggaccttcgacgcgccagaaaccgataagaaaagaacccctaccaaccagcttcgccgccaatttcgcggaatgcgccgcgtgatgcgccgccgccgccagcgcatggcgcagttgcgtatgcttttccaagaaaatgggcttttgaccgacgcgaagcgcgatgcgctgcgctttccggggcttgacccctggcagcttcgtgtggccgcgctggatagaagactgacgcccgaggaattggcggtgacgcttggccatatcgcgcgccatcgcggttttcggtccaataagaaaaaccagggcaatgaggccggtgatgatggcagggtgctgaaggccgccgcagccaatcaggaaatactgtccaaatatcgcagtgtcgcggaaatgttcgacaaggatgaccgcttcgccagacgcaagcgcaaccgcgacggggaatacacgcaatcagtcaatcgcattgatctggaacacgaagcgcggctgattttcagcaggcagcgcgccttgggcagcgcccatgccgatgcccatttgcaggaaaagtttgctgaactggctttcaatcaaaatcccttggcggacagtgaagataaggttggcttctgcccctttgaaaataaggaacggcgcgcggccaagcgagcctatagttttgaggtttttcgctttctgtctcggctgaatgcccttcgcatcggcgatgcgcgccaggaaagggcgctgacggaagccgaacttgccgccgccatggaagggtttggcagccagcgcggaatgacctttgcgcgcctgcgcaagctgattggcttgcgggatagtgaggccttccgcgatgtgccgcgtgatgaggaaggtggccgagatgtggtgaaccgtagcgcgggcaatggctgcatgcagggttcagccacgctgcgcgccgcacttggggagcataactggaaaacgctattgcagcggccggaaaagttggatgagatcgccttcatcatcacctttcgcgcgacaccggaaagtatcgaaaaggggcttttcgaagcggggctcgatccggatatgctgcatgcgatcatggcggcggttgaaaagggcgcttttgcttccttcaccggtgccggccatgtttccgccagggcatgccgcgcgattattcccggtttgcagcgtggcttggtatattcggaagcttgtgcggcggctggctatgatcccacggcgcgaccggtgacggaaatctcttccatcaataatccggttgcgaagcgtgccatatttgaagcgctcaagcaggtgaaggccattattgccaagcatggcaagcccgaccgtatccacattgaaatggcgcgcgatgtcggtaaaagcaaggaagagcgcgacaagatcaccagcggcatcgaaaagcgcaacaaggaacgcaatacgctacgcgccgctttcaatgacactgtgggtggcgagccttcgggtcccgaagacatgcttcggtttgagttatggactgaacaaaaggggcgctgcctctatacggatcaggcgattccacccggcgctattcgtgccaaggacaatagtgtgcaggtggatcatattctgccctggtcgcgctttggcgatgacagtttcatcaacaaaacgctgtgcttcgctaaggccaatcaggaaaagaaaggccgcaccccctttgagtggttgaaggatgaccccgagcgctgggcgaaatttgtcgcctgcgttgaaaccaacaagggcatgaagggccggaagaagcgcaattacctgttgcgcgatgcatcggcggctgaggaaaaattccggtcccgcaatttgaatgacacgcgctatgcctgccgtatcctgatggagcatctggccagggaatatttcgagggtaccaagcacatggtcgttgggcgtcctggcgcccttacggataagttacgtcgcgcctggggtttgcaagatttgaagaaggtgctggaaccggatggcgagaagcgcaagcatgatgatcgccaccatgccttggacgcaatcattgtggcagcaataactgactcggctgtccagcgattgacccaggccttcaaggaaacggaagatcgcggatcgcatcgggatttcgcggatttcccgccaccctggcccggctttattgaggatgtgcggcggcatttcagggaaattctggtcagccgcgcggaacgcgggcgggcgcggggtgaagcccatgccgcgaccatcagccagttgaagcaaaccgatgaagggctggtgatttatgaacgcaaggcggtggataagctgacgctcaaggatttggatagggtaaaggacccggatcgcaatgcggcgttaattgcagcactgcgcgcctggattgaggctattaagccgaaaagcacaccaccgctttcgccgaaaggggacccgatccggaaaatccggctgatcaccactgacaagcccgctgttgcggtgcgtggcggcaatgcggaacggggcgaaatggtgcgggtggatgtcttccgcaaagccaataagcgcggcgccttcgaatttttcctggtaccgatttatccgcatcaggtggcggatgaaaaggaatggcctgcaccaccgaatagggcggcgcgcggggccactgctgaagagaattggcccgaaatcacggcggagcatgagttcattttcagcattggcccgcgtactttcctggaagtggaaaagcgcgacggcaccattattgatggttatttcatgggcatggatcgagcaaacgctaatatcgccattagcgctcatcattccaccaagaatattacgcgaagtatcggggtccttggcctcaagcgctttgaaaaattccgcatagaccggcttggtaatcgccatgctgtgcccaaggagacacgcacatggcatggcgcggtctgcacctgacccagccagcgcggctggcgctggcggatggccaaatcctgatcgggcgggatgatggggaaattcggctgcctttggaagatatcgcctacatggtgattgatacaccgcaggcgagcctttctgtgccgctgctgaccgcctgcatggaagcgggggtggccgtgatcatcacggaccccaagcatttgccttcaggggtcatgctgccttttcaccggcattttcgccaaggcggcatggcgcgcttgcaggtggaccagaccgaacccttccgcaagcgcttgtggcagaccgtggtgcgcaccaagatcgaaaatcaaggcgctgtcctgaaggtgttggggcgggcggattccggcccgcttgccgccatggcgcggctggtgggttcaggtgatccagaaaatgtggaagcccgtgccgctcgcgcctattggtcccggctatggtccaatttcaggcgggaagatgaagcggatttgcggaatgcactgctgaattacggctatgcggtactgcgggcctgtgtggcgcgcgcgctggtaggcatggggttcttgccatcctttggcattcaccatgccagcgtgacaaatgcgtttaatttggctgatgacatgctggaacccttccgccccttcattgacctgctggtttggcgacacctgggcgggctggatgaagcgcgggcaatgagcctggaagatcggcaagccatggccggcgccatgatggaaaatgccgccatgggcgaagatgaagtgaccttgctggtcgcggcggaacgcctggcggcgtccttggcccgcgcgatggaagaaaggcgggtagaagccttgttgctgccgcgcctaatgacctgagttttgtccgatgcgcgcggaggaggtgcggatcttgtggcttttcgtattcttcgatctgcccgtgggcaccaagccggaacggcgggtggcgacgcggtttcgcaacttcctgaaggatgatgggtatatgatgttgcagttttccgtctatgcgcgggtgtgccggggggaggaggctgtggaaaaacatatgcagcgcgtgacgggcaacctgccttccaagggcagtatccgggcgcttcaggtgacggaccgacaatatgacaggatgcgtttgctattggggacagcgaaaaacagtgaaaaacccggcgctaaacagatggttttgctctgatttccgccaaagaatggacgaaaatcagagcaatttcagtattttaccgccgagggagcctacacgatgggagtcggtagggaaaccacggcttaccggagaaagagacaaaaggcacgccaagcctacacgatgggagtcggtagggaaaccacggctattcaggattacaaggcaagccggttttgagcctacacgatgggagtcggtagggaaaccacggcgaggctgctgcctgcgtgatgctgccccccagcctacacgatgggagtcggtagggaaaccacggcccaggcgtggatgacaccacacggacggctagcctacacgatgggagtcggtagggaaaccacggcttatctggccgccagatcacgcgaatagtgagcctacacgatgggagtcggtagggaaaccacggcagaatcagcttgacttattggccgggcgtgaccgaaaagtaatagggggtttaaaaaaacaaatcgtgaacctacccttcctcaccccttcctgaaaaaagcctccgccgcgttacgctgcgcatcgcgtgcgccaatcgctgcctcggcccggctgatttcggtctgcaaagcctcgatatattccctgagttgcgccacatcccagccgtcaaagaccatgggttgaaagcgcggcgcgcgccgggggcgttcttcttcctcgatcggggccattttttctccttctgggcgcgggcaggttttgaccctgggcgcgcctctctctataggaaccgcaacaaggcgggggttgctctcgcccgcccgccccttgaggttatgccatgaaccagccattgatgcccaaggccaccgccgtgtggctaattgataagaccgcgctcacttttgaccagatcgccgaattcgtcggcatgcatccgcttgaaatccaggccatcgccgatggcgaagtggcccaagggatcatcggctacgatccggtaatgaatagtcaattgacgcgcgaggaaattcaacgctgtgaggcagatggcgaagcgcggctgcaattggttcgcgccgtcagccatttgccaaaatccaaggccaggggcgggcgttataccccggtttccaagcgcaacgaccgtccggatgcgattgtctggctgctccgcaatttcccgcaggtgccggaagccaccattgtgaagctgcttggcaccaccaaggaaaccatcggcaaggtgcgcgacaagacccattggaacagcgcgaatatcaagccgcgtgatcccgtgattctggggctttgcacgcagtctgagctcaacgccgcagttggtacgatggccgttttggaagtgcaggccgcggaaggtgctgcggcgtaaggacagaagcgggcgttgcgtgaggaaatatagggtcttgattacgggcctttgatcaatcatgccgcgcatcattttgtttgtgtgtgacgacgcaatggaccggtttttttgagggcttgaagcattgtcaagccaagtggaataatttggcagttcggaaaatgagactaaacacgggcctagtgcgtgctcgataagcgaatttgaaccgaagaagcaccgaagtaatgcgcggtgggcgttgccaacggcacccgtagcagcaaggcgcccaggtatcttttgaaattatttccgcggaaatgggcaagaaaaaagggcgcctcgcgcccttgggtgacatgccttgaattacactctggctccccgagttggactcgaaccaacgacctagggattaacagtcccgcgctctaccagctgagctatcggggatcaggagccgcgcggcgtaatagcagcgtcgtgcagcttgtcaaagccccaggacatcgcgccgcagcacgtcatggaggtccggagcggaatcgaaccgctgtagagggttttgcagacccttgcctgaccactcggccaccggacctcacgccgtctctatcgggccacgaccgttcctggtcaagcgccaccttggcgcccaggcgctcacggacctataaaggccgctacgagagttgaaggaacggcatgatggatttcgcgcgcgccagacgtttcatggtggatggccaattgaggccgaaccaggtgcaggatccgcggatcctctcggcttttggcgacttggcgcgagaagctttcatcccgtccgatcttgccccgcgcgcctatgcggatgcggatgtgcccctcccgggcgggcgtttcctgatgcaaccaatggtgatggcacggcttttccaactggccgaactccgccgcggggaccggacgcttttgctgggcgcgggctgtggttatggcgcggctgttctcgcagccatgggcgccaccgtgaccgcgcttgaaaatgacccggtgctgcttggcctggcgcagactggcttggcgcgctgcctgcccgaagcttctgtccggctgctgcgcgaggacccagcccagccgccagcggggcttggccctttcgacgtgatcatcattgaaggcggtgttgctgccattccgcgccccatagaaacgctgctggctgaaggcggccggctggtcgcattggtcacggcgggggggccgccggcacgggccacgttggtgcgccatattggcggcagcttcacgccgcgcaccgcgtttgaggcccatgccgcgccactgcctgcttttcagcccaagccgagcttcgcattttagacgcgcttcggttgtattcactcatgggctggcgcaaccgcatgagcatgctgtaacctcacaaaagagccactctggaggtttcggagtgggggtcgcccaggtatgtgcaccggggcttgggggttgcacttgatgaaaagtttccgtgcatcgctttttttatctgcggcgttggcaatggcgccgctcgcctctacgcgcgcgcaaacccttcaggaagccctggcggcggcttacgcaaataatcctgcgcttcttgccgcgcgggcgcagctgcgggccgttgatgaaaatctgccccaggccctggctggatggcggccaagcgtcaccttctctggcgcgggcggctatacagatacgtctttgcggcggcgggtcgacggcgccgccggccccttttcgaactttgcggaaagtgagcgcaacacagccaccatgactggggcgatcactcagccaatctatcgtggtggtcggactgttgcaggcaccaggcgggccgaaaaccagatttacgcccagcgatcgcgcctcatcgcgacagaacagcaggtattgctcgattccgttgcgtcctatgtctcggtgatccgggattctgaagttgtgcgcctgaacacgaataatgttcaggtgctcatgcggcaattgcaggccactaatgaacgctttcgtgttggtgaaatcacgcgcaccgatgtggcgcaggctgaatcgcgcctagctggtgcaagggctgcgttggaacaggcggatggcaatcgggaatccgctcgcgcggtgtttcagcgcctgatcggcatggcgcctaatcgggtttcccctccgcaaccgctgatcccgcccgtgcgttccgcgcaggaagcggtgcaaaaggccggcaccaataacccaaatgtcattgccgccatgttcgacgaagcggcggcgatcgaaaatatcgacctgcaattcggcgcgctgctgccttccattggcgtccaaggtcagactttcaggctggatggaagcacggatcgtggctcacgccagaccggttcgcaagtcaccgccaatctttccgtgccgctctatcagggcggtgctgaacatgcagcggtgcgccaggcgcgccagcaggcgcaacagcagcgccaattggtggaagacgcgcggcgggtcgccggccagcaggcggcgcaggcttgggaaacgttgcgtaccgcccgcgcccaggtggaaagtgtccgcgcccagatcagggcccaggaaatcgcgcttgatggcgtgcagcgggaagccgttgtgggcagccgcaccacgcttgatgtgctgaacgccgaacaggaattgctcaatgcccgtgtcagcctggtgcaggcgctggccaagttggtcgatgcttcctacgcgctgaccgccacgattggtcgcctcacggcgcaggatcttgggctgcctgttcagctttacgacccgaaggcttatcatcaggcggttcgtaacctttgggttggaactggcgattacagtgatgttgcggcccgcccagcagccgcgattactcccacggcgccacagacgcccccgagaggaacacgatgagcggcaccgccccaccccccgccggggggcaggatcaatccatggatgacattctggcgtcgattcgccgcatcctgaatgaagatgaggctgcggccgaggccactgacgtggcggaacccgtcaagcccgagcatgaggccgaacccgagcctgaggcctttgcgacgccaccgccacccattgccccggcgccggttattgcgccgccgccaagggcaccttcggggcctgagcccgttgaattgacctcggacatgttggtcacgcccccgaaccttccccccgcagcaccgccgcgtatggggctgggcatggatgacgcctcgggcctgatcgccccggcagcagcagcagcggcggcagcctcgatggggtcattgatgcgcgcagtcagttctgagcgcgggtcgccggtttatcgtggtgggccaagcattgaggatgtggtgcgggaagaaattcgcccgatcctgaaggattggcttgatacccacctgccgccattagtggaacgccttgtgcgtgccgaaatcgaaaaggtcgtcaatcgcgctttgccgtgatgcaggcgacctaatcagaccgaatattgttttcctgcaccacacgcccccacagtgccatttgtgccttgaagaatgcgctgaattcctcgggcgttgaaccaaccacatcaatacccaaaggcccggtcagccgcgcgcgcaatcctggctccgctaaggcttttgcaagagaagcgtgaaagcggtgctggatcgcctcaggcacccgcgccggcgccagcagcccccaccaggcaagcgcatcaatcccgggcaggccctgttccgccaccgtcggcaaatcaggaaatagcgccgaacgcttggccccggtttgcgcaagcgggcgcagcgtgcgcctcacctgaccaccaagacccgcattggtcgccatgggcatgtccaattcgccggcggccgctgcggcactcatcgggcccccgccgcgatagggcacatgcaccacccggaaatcgccggccttttgcatcagtgtcatggtcagatgcgaaagactgccattgccgatggacccataagtgagcgtatcgggcttttccttggcggccgcgatcacttcccgcagattctgccatgggcgagaattatgcgtcgtgatgatcatgggcgcggtgccaatcagcatgatcggcgcgaaatcccgttccgtatcaaacccaagattggggatcagaaaggggttcaccgcgtgggtatcgaataccatgacccagctattgccatcggctgtcgcacgcgccgccgcctgagtgcccaaagcgcccgaagcaccggggcggttttccaccaccaccggcacgccgagttctgccgcaagccgcggctggagcaagcgcgtaatggtgtccacgctgccgcccggcggaaagggggcgatgatgcggattggcccattcggccaagcgggcgcctgggcaagggccggcgcggcaaggcaaagccctgataggctggcgatcacggcgcggcgatggaacatggcggcttcccgaagctttgatgttttgcagcgcgctttgacccagaacacgcgcctgcccttgacgtaacgccctggggcggggaagggaagcagcatgctcgacaaggtttttgaccccgctgcgattgaaccccgcctctatgaaggctgggaagcgtcaggcgcattttccgcccgtccggaaagcccggcggaccccttcaccatcatgatcccgccgccgaatgtgacgggcagcctgcatatcggccatgcgctggataataccttgcaggatgtgctgatccgctggcggcgcatgcaggggcgcgatgcgctgtggcagcccggcaccgaccatgccggcattgcgacgcagatcgtcgtggaacgcctgctggccgaacagaagcagccagaccgccgcagcatggggcgcgaggctttcttgaagcgcgtttgggaatggaaggcggaatcgggcggcaccattacgcggcaattgcgccggcttggtgcatcgctcgattggccacgtgaacgcttcacgatggatgaggggctttcgacagcagtgcgcgaagtattcgtgacgctgcacgcccaaggcctcatctatcgtgacaagcgattggtgaattgggacccaaaattcctgaccgcgatttccgatctggaagtcgaaagcaaggaagtgaagggcagcctgtggtatttgcgctacccggtggaaggcgtgccggggcgcttcctggtggtggcgacaacgcggccagagaccatgctgggtgatacggctgttgccgtgcatcccgatgatccacgcttcaaggatttgatcggcaagcgcgtgatcctgccgctgctgggccacgccattccggtggtggcggatgagtattccgatccggaaaagggatcgggcgccgtcaagatgacgccagcgcatgacttcaatgattttgaggtcgggcggcgccatggcctgcccatgccatccgtgttggatgccgaagggcgcgtgatgctggaagaaatcagcacgcatttcgctgccgcagatggcatagccgatcacgaatttgtgcgcgggcttacggggcaggatcgcttcgcggcccgcaaggcgattgtggcgcggcttgaggaattggagctggtcgagaagatcgaaccccatacgcatatggtcccgcatagtgaacgttctggcgtgccgattgaaccgcgcctcaccatccaatggtatgtggatgcgaaaacgctggcggggccggccattcgcgccgtggaatccggccagaccgtgtttgcgcccaagcaattcgaaaatactttctttgcctggatgcgcgatattcagccttggtgcatttcccgccagctttggtggggccaccagatccccgcctggtatgcgccggatggcgaggttttcgttgcccataccgaagaagaagctgaggcagcagcacgcgcgaaatacggcgcagccgtgacgctgacgcgcgatgaggatgtgctggatacctggttttccagcgcgctttggcctttttccacgattggctggccgaagaaaacgccggagcttcagaaatactatcccggcgatgtgttggtcacgggatcggatatcatcttcttctgggtcgcccggatgatgatgatgggcattcatttcatggatgggcgggttcccttcaagaccatttgcatccatggcttggtgcgcgatgaaaaagggcagaaaatgtccaaatcgcgcggcaacggcatagatcccctggaattgctggatgcctatggcgcggatgcgatgcgcttcacgctctgcgccctggcaagcccggggcgagatatcaaacttggccggcaaagggtggaaagctatcggtccttcggcacgaaaatctggaatgcggcgcggttttgcgaaatgaacggcattgcgccggtggccgggttccatcccgcctctgcgcggctgccactttcgcgctggattttggatgtgagcaatacggcgctggccgaagccaatacagccttggaaggcttccgcttcgatgattatgcgaaggcttgttatcgcttcgcctggaatgatttctgcgactggttcctggaattcgccaagcccgtgctgaatggcccggatggtgccgacaaggatgaggtgaaggccaccgccgcgcatgtgctgggcgtgattctccgcatgctacacccggtgatgcccttcatcacggaggagctgtggtaccgcatgggctatggcgctgagggtagcctgatccgcagcccctggccggaagccatgcaggttgccgatgcagcagaagcgcgcgcggaattggattgggtggtgcggttgatttctgaaatgcgcaccgtgcggtccgagatgaatgtcgccccttccatcaccgtgccgctgttgatggcgggtgcccggccggaaagcctggcgcgcgccgaacgctgggccgatgccatccatcgcatgggccgcgcaagcgaaatccgcgctttgagcggtgacccacccaagggcgttgttcaggccgtgctggatgaaatcacgctgatgctgcccttggccgatgttattgacttcgccgcggaacgcgcccgccttgccaaggaacgcacgcgcattgaaggcgaagtgcaaaaggttgaagccaagcttggcagtgaggcgtttgtctctcgcgcaccccttgagatcgtggaggaaaaccgcgaaaggctcgctgcctggcaggcggaaatcgcacggcttgatgccgctttggcgcgaattgctgggtagggcatgtttgaaggcagcacgctcaacctattcgcggccatcacgctatttgtgggcgtgacgatggtgctaaccaatggcttggcgcggctgaatttgggtggtgccccgctgagccgcgcggtggcgcaattcatcgcggccct
